United States Patent Application Publication US 2005/0208558 A1 - sequence listing, part 5

SEQ ID NO: 3961 - DNA, 7120 bp, DROSOPHILA
ggttagtagactgacatccgatgcatcagacgattggctcctgtagtgattaaatttcggataaaaaagtcctttggatttaagtatggctgctagtagttttaagatattttgttatgaaataataaggtatatacatacttatgttcgaaaagggctttagtttctgttaaacttttataatgttttaatatcttttatataaggcttgccttttaaatactttacatatgtattttggttgatatatatatatattcccacactatttagttgcgaaccgtacataatgaaataaattgagttttagtttggaggaaaggaaaccattaaatatgtgctaatgctaataacaatgggcgaccttaactcaagtgctaacgaatgtaaatgagctttgtatttttcacctatatgcattatgatttcattcaaataataaagaaatgtataaaccacttgagcgagtgctttaaaatgatctccttctgatttctgcatactttatgcgaaaacaattgactatacaagcacttgacaaacataagatatttcctaaatatgtaaccatggtatgggtaagtcatcccagaaactagtaatacaagtaattaattattgaatatgaccatttgagttttttggcaaaaaatacatttctaggctccgtgctccgtgattacgatttggaagtatactagacaacaactaagcgcatatacatgatgaaaaagatgagactgtagtaaccggctgctcgatttgatttttggtggggtcggcaggggctgctccatggtcatttagctaaaagtgaagtaagtggctagtaagtgacaatgcgacgaagtaccaatgaatcggcaacctaccaccaagagaagaaagggctcttattttggaagcgctgcgtaaaagagaagaaacgactgccacttgatctgaaatgttagaaaccattattggcctcctataatccggagtcatgaaagtatgatacttaccgctcgacaatcaccgctggcatctggaccagttgcaccggcgacttgccatccctcagtgcctgtgtgagatttagaatctggccccgcatcaccgacatctggcgctcgaagagacgcttgtcaaagccgcgatcctgctggaagaggtacaacaactccgtgcagatctcctctacaaagttcatatctgacaactgcggcagcacctgctccttgatttcttcgctaaacggaattttcgcctgtggcaaccaggcccaatggtagggataagctcgccaagagtccggatgcttgaagggaaaagcgagaccattgtcgatggcagcgatccgaatgaaggccgagttcaccacattccaatcgggttccgacgtagggggggatctcgacgagggttcatcttcgctgctggccaaactgctgctatcttgctgtgcacttgtggctgctccacccgctaggtggttcgaagggcgaccaccagtagtcggtttcgggctagcctgcggcggctcgtttaggtcaacgatttttgaagcccccaacgcattgggcaatttgggggtcacaactccgtgcatagttctgccgccagtgcctcccacctgggtcgtgatcttaggggccacgtacttgatcagccagttgtcgttgccacggtccgtgttgcgtatgatataatcgagcacgacgaggcgctcgaactgcagttggaacgacttcgccactgaaggcggcaagggttcgctttcaaagcgccgcagccaatagtccgcatccttgtaaccctccacgaagagctgaaaggagccagtctgcaaggaattttgacttggttaatacccaatcggtttgtttttggagacgagttcacctttagaggaaggctcattcggttgaagtgagccgacggatagtgctctttaatgcgcttcttcagcttggccttctgtcgatcaatgcgtgcgtagttaaagctctcggcaaccaatctgaccactcgcgtctttggaaccacattcagattgagttttcgatcaaccaagctggctcctgattcggagaggtacctaagaaatataaataccattttaatatatatatcaacaaatgaaataagttcctcaattggcttttaatgaatggtgacaacttgtattatcttacccctgattgggaatcaagcaagctcggccaaaacaacacgggcagcacagcttatgcatccatttcgtccacttcggattcagtctgccatagggttcctcgtcctttggcttaaatacggccaggcattgctaagggggagcatcataagaaatggcataataaatacatagagcataagcgggtaaacaatatacaattcactattttgaaactgtttcaggaaaaaaccaaaagttttgcaaaagccttatatttgcagtacttccccgattacccgatcttatttatctatgcgcggaaaagtaaaagatcgacgaagttaggcccagaactggacgacccaactcccaccttatgcgcaagaacggctagaagatcgtcaccccgattccctactcacatgggaggcatccttgacaaagtaggaaccactgctaccctggtaaatgcgctcgggcagcacaccattctcgatggccccctccgccttcgccacgatctccgagaaaagcgggtcatctataagaatcaaagattaaaattaaaaataggcattagcactagggctttaaattactaaaaaagtttgtgcgtagaacgaagattcgcatgcctcaagcgacgggtaaaaaacggactgttcgtcatttattaaaattgaacaaatttgctatataattatggttttaataatttataaacacaccaacgaaataacgtgccatctgttggataaaaataattacagcaaacatgcacgaaaacgcttataagactgcgatgaaattcaagaccccatcctacactttactttatatcaaggaatggcataggactgttgactacgctaatcctctccacgctacctatgaaatcaaagttgtcgttgaaatcgccctgcaagtcctggcaaatggtaaacacttgcggtatgaagttttcgcgactgctgctcgacaagcgcgacatggaggcactggtatattaagtgcgccggcagtcgagaggtttcgagtcggctggcagttgataaaggagaaccaggtcacaattagcatagccaaagcgtttcgataagggccaaccccttgccaccacttacagaggttcctcagcgggcagttggcacaattgcagcgcggagccgcgatttgaacggttactgtgtctttggagtcacgcgccatcgacggtgagttcaccagaaagggcggatcgccctccttgtccgactgcgactccaagaaatccttctccagcgggcacttgtgctcgcaacagatgcaggcgtaggcggcggaggcggagggcaccgaggagctgctctccagcgcatccttgcttgtcgtgggctgctcatcgtctcttggttcgcttggctcttggtacttggctgctatagcgttcggcaacggcacctggctgagaaacgacttaatgttgtttttcggcatggggctatgtccaattggcgacagttgccaaaggaacaagttccatttttgaagtgccttcctcgaaattctttatatgcttcccgactgacttcgattccgagctacagacgtccacggtgacatccaagtacaccaagatttataacacacaattttgtgctcaatttcgaaaaaaaactaattcttgtaaaaaccataaaattgtaaaaaatgctttgaaatgtggggcgatgactataggattaacatacaaagggcaagcgaaatatggccatctagtgatattcagtactgagtaaaacgattgcaaaaagaacagacaaactataaatcgctttcggaagttatttcgaaatgcaacgaaaacaaatcggagggtattactcatcagcgtatgttcaaaggcagcagagcagtgcgaatcacctgagtcacaaaggtcaaagatctagatgagtactcatttggcagtgtatatcgctcccacaacacactctacatatatctataaaagttagctcaattccctgcacaacgtacaaattgactaatatttgagtaagcacttcatggactaaccaatagaaatgtggttattcttatgattgcattgattcatatatgtattatttatcttagcaagggaatacaaaagcagtttgtattagtttttaaataaatctaaatgtaaataattcttttggaggacggaaatgcttgggttgaccagggtgcttttgttgactttaatttaaatttaaaacgtatagcagctaggaatctaacccttatcattctatttaagagtctttttggttcatttggtcggacattttgtctagtttatattcacgtttagtttatattcaagtatgtaacagaggcgaaatagctagtttccagttacagatcctccccgtataaaagaaattagatgaagttgaatgaataacatcgaggccctaaataatctgttctaagcttgcgctgcttgtggagatagaaccaccatatgtagccgtagaagtgataagcacatcatgagtaaagccacaaagcaaacaaggcagcaatgtggtctgggtgtggtaggaaatgcaacttgtacgacttcattagaccgctgcgcactcaccgccaaatgtgttcgatacaaactccacatgatcgtgcccgcgtcctagtccgcccaaaagctcgctgatgcgacttccgtgactggcattgcctccccccaagagcggctgtgactcccggttgtcgctgccggcgtccgtggacatgccctcgaagtcgatttctggcaccaggcagatgtcgtcggcctcgtcatgcggatgacgggcgagagcagtgtgcgaagtggttttcagcggagatgtcaatgcagatgaggctaccttcgcgggtgcgatgtgacaaataatcggtggctgttggctgctgctgtcgatgctatcctcagcgctacctttgagtctttggttgcgcgggtttgagcttctcttcagcagcacagcttcttcgccatcttcgtcgtcgatctggtcgtcgtaatgcatgaccaagttatccagttgcggtttctgaataacagcatcgccgccggcactctcctcgcctggcggcagcccgttggtgtggttcctctcctcttgcgcctcttcctcgtcatcctcgtcgtccaccgacagtagcatgggttcccgcgcctttttccctcttctccttgtcttgcgtttgcccatgccgacggtgttgatctaaggaaaaagtcagttcatattgccatatgtattgcagaaggtgaggttgagaacggagtgcactcacctcaactttggtggtcaactggttgcttgtcgactcgaagccatttaaaagcggagacagttggtttctgggcggaggttggtccttggcaaagtccccgatgagatccacctcgtcctcgagctggagcagcgggggatccgtctgatcccgagcgccgctcatgttcgcactgagcagggggtggcaggcacgtgggtgattgggcgtgggtcaagagggctggatgagtgggaggtgccgttgccctcaatccgcagctgacggaacaacaaaggcccgcgctgtgctgcagcttcttcttgcgcttctatccgcgactttttgggcgtcgcttggttctgttatctgctcctccgcttttcctccgctcgcatgttcctgcacaatatgcttatattattcgggctgcaagttgattacattacttgctaattgcttcaattttgtgcttctatttcgtttggcaatttattatcgatttttggtttagaaccccagcttctgtcccagttttatttcagaaacggatcttgggacgcggaggatctcaaacaccatcgagatagggactcaccatgcactccgcaaatgtaacaagtgaattacgcgttcgatttaattttcgctaagaacacgaagcgaaaaatggttgacaaatcaaacagctgacgagtagaattcgcggtactgcccacttgctggttctgcactcgccgagtggcagcctcgcacatgagagcgctgagcggaaatatttaaaatttaggcgtactaaaatatcaagataaggtttgtggaagtctatattgtataaattagctaaataacagtgcaaaaatctttgtttctaactcttaaaggttagaaaaacgtgtgaaagtagaactaaagacaaggggagccaatttatggacttcttattctgtgaaaaactaattggcttactaaaataagaaaaattctaagctcgatataaatatgtagtccattttaataatgtttgttatttgatactaaagaaaaggcatttctgggcgtcatttataggtttttttaaacgaggtgggatcatacgtcagataattatgaaattgacgtttcagatagatcaacaataatttctcgcatatcttcttcatcgagagtcagtgagtgctgtttcaataatgttttcaaatctactttattcttaacattgtatggattgtgtgcgcgccataagtatctagctaagcagggcactccttcgcagctttgtgatcgaatccagcgcttctcctagctgccgctgcagattagtgctctcggcgaccagctctatgcagtccttgaacttgttaacagcattgcgcaagctcatcggtggcagtaccctggaaaaaggagtaagtgagttatcacattgacccacatacacacaggctttatcagtgctcacgagaaccaatgcaggggctccacgaagcccttggacttgtcaaccgcctgtcgctcgatgcagacgccatccgtggagtccacgacccggcagagggcgttaaactcggcactgttctccgtgggaatctgggccgtggacacgcactggctgcctccgtgctgaaatctagtgcgggccaggagaatcgccccactggcgttacatcg

SEQ ID NO: 3962 - DNA, 2335 bp, DROSOPHILA
atttttcgcttcgtgttcttagcgaaaattaaatcgaacgcgtaattcacttgttacatttgcggagtgcatgcccgaataatataagcatattgtgcaggaacatgcgagcggaggaaaagcggaggagcagataacagaaccaagcgacgcccaaaaagtcgcggatagaagcgcaagaagaagctgcagcacagcgcgggcctttgttgttccgtcagctgcggattgagggcaacggcacctcccactcatccagccctcttgacccacgcccaatcacccacgtgcctgccaccccctgctcagtgcgaacatgagcggcgctcgggatcagacggatcccccgctgctccagctcgaggacgaggtggatctcatcggggactttgccaaggaccaacctccgcccagaaaccaactgtctccgcttttaaatggcttcgagtcgacaagcaaccagttgaccaccaaagttgagatcaacaccgtcggcatgggcaaacgcaagacaaggagaagagggaaaaaggcgcgggaacccatgctactgtcggtggacgacgaggatgacgaggaagaggcgcaagaggagaggaaccacaccaacgggctgccgccaggcgaggagagtgccggcggcgatgctgttattcagaaaccgcaactggataacttggtcatgcattacgacgaccagatcgacgacgaagatggcgaagaagctgtgctgctgaagagaagctcaaacccgcgcaaccaaagactcaaaggtagcgctgaggatagcatcgacagcagcagccaacagccaccgattatttgtcacatcgcacccgcgaaggtagcctcatctgcattgacatctccgctgaaaaccacttcgcacactgctctcgcccgtcatccgcatgacgaggccgacgacatctgcctggtgccagaaatcgacttcgagggcatgtccacggacgccggcagcgacaaccgggagtcacagccgctcttggggggaggcaatgccagtcacggaagtcgcatcagcgagcttttgggcggactaggacgcgggcacgatcatgtggagtttgtatcgaacacatttggcgccaagtaccaagagccaagcgaaccaagagacgatgagcagcccacgacaagcaaggatgcgctggagagcagctcctcggtgccctccgcctccgccgcctacgcctgcatctgttgcgagcacaagtgcccgctggagaaggatttcttggagtcgcagtcggacaaggagggcgatccgccctttctggtgaactcaccgtcgatggcgcgtgactccaaagacacagtaaccgttcaaatcgcggctccgcgctgcaattgtgccaactgcccgctgaggaacctctatgacccgcttttctcggagatcgtggcgaaggcggagggggccatcgagaatggtgtgctgcccgagcgcatttaccagggtagcagtggttcctactttgtcaaggatgcctcccatcaatgcctggccgtatttaagccaaaggacgaggaaccctatggcagactgaatccgaagtggacgaaatggatgcataagctgtgctgcccgtgttgttttggccgagcttgcttgattcccaatcaggggtacctctccgaatcaggagccagcttggttgatcgaaaactcaatctgaatgtggttccaaagacgcgagtggtcagattggttgccgagagctttaactacgcacgcattgatcgacagaaggccaagctgaagaagactggctcctttcagctcttcgtggagggttacaaggatgcggactattggctgcggcgctttgaaagcgaacccttgccgccttcagtggcgaagtcgttccaactgcagttcgagcgcctcgtcgtgctcgattatatcatacgcaacacggaccgtggcaacgacaactggctgatcaagtacgtgaactcggccttcattcggatcgctgccatcgacaatggtctcgcttttcccttcaagcatccggactcttggcgagcttatccctaccattgggcctggttgccacaggcgaaaattccgtttagcgaagaaatcaaggagcaggtgctgccgcagttgtcagatatgaactttgtagaggagatctgcacggagttgttgtacctcttccagcaggatcgcggctttgacaagcgtctcttcgagcgccagatgtcggtgatgcggggccagattctaaatctcacacaggcactgagggatggcaagtcgccggtgcaactggtccagatgccagcggtgattgtcgagcggtaa

SEQ ID NO: 3963 - protein, 672 aa, DROSOPHILA
MSGARDQTDPPLLQLEDEVDLIGDFAKDQPPPRNQLSPLLNGFESTSNQLTTKVEINTVGMGKRKTRRRGKKAREPMLLSVDDEDDEEEAQEERNHTNGLPPGEESAGGDAVIQKPQLDNLVMHYDDQIDDEDGEEAVLLKRSSNPRNQRLKGSAEDSIDSSSQQPPIICHIAPAKVASSALTSPLKTTSHTALARHPHDEADDICLVPEIDFEGMSTDAGSDNRESQPLLGGGNASHGSRISELLGGLGRGHDHVEFVSNTFGAKYQEPSEPRDDEQPTTSKDALESSSSVPSASAAYACICCEHKCPLEKDFLESQSDKEGDPPFLVNSPSMARDSKDTVTVQIAAPRCNCANCPLRNLYDPLFSEIVAKAEGAIENGVLPERIYQGSSGSYFVKDASHQCLAVFKPKDEEPYGRLNPKWTKWMHKLCCPCCFGRACLIPNQGYLSESGASLVDRKLNLNVVPKTRVVRLVAESFNYARIDRQKAKLKKTGSFQLFVEGYKDADYWLRRFESEPLPPSVAKSFQLQFERLVVLDYIIRNTDRGNDNWLIKYVNSAFIRIAAIDNGLAFPFKHPDSWRAYPYHWAWLPQAKIPFSEEIKEQVLPQLSDMNFVEEICTELLYLFQQDRGFDKRLFERQMSVMRGQILNLTQALRDGKSPVQLVQMPAVIVER

SEQ ID NO: 3964 - DNA, 3398 bp, DROSOPHILA
catttttttttttaattatatatatatataaagtaagtagttgctgcaaatgacgtacagctgcaaaactctattttttattgccaaattgtaccactgccatatggcagcactgtaaattacatcagctgagagcaacgagaatgagtccgaaaaggttggtgaaaaggctaagataacaaaagcctgttttggcgctctacctacggtcacactgtagttcagcaatcacgaaattcgtttaaacttgaccacgaaattaagcgataaatgacgatgtggattggccaaaacacccagattcgtttggtgccactaaaggatccgccaaagaccatccgatacagtttcctggcgaccaagttcgggcagatgatgatgggagtgataaacccaatatccggcgattcgaaagaccaagtcgcaattggtgtgcttcacttcgtgattaaggacaatgtgagtacctacaatgaagtccaggagcggtggccaaaatccgaactctggaaggacgatgatgcggtcaagttggtggcggataaactgttcgaaagcgacaaggaaaactcgcaggcgattcccattgccatctatggaaccgacttccagctgtccgtatggcgagctctggtgcatatgaaacgaggggagacctgcacttactcccaactggccgagcggatgggtcgtccaacggcggtcagagcagtggccagtgctgtggccaaaaatgagcttgctatcctcattccgtgccaccgagttgtgtcccaaaacggagcttcgaagtaccactggggcgcagccctcaagcaactgcttctggccgatgaaaagtcaaagaactattaaaaatcgttactcgtatctttattgaaactcaactccgcacaatggtcttactgttggggtggtaaggaatttgaaaatgcagacaggctcgagattgtgcacttcctacttataaactgtacctacaaaataagagcgatcccatctactcccgatgcagcagcacgaaaatggccaaaatagagagaatggcccactgaaaagttgcaaattcgggcttagtggcgaaaaaaaaacacaaacgtccttcaacttaccttaaccttgggatattcgttcatgaagatcgtgatgatgcccacgtaaggcaggaagcccctggcccggcccacaatgtcctttttggtcagccacagctggttgggtgcatacaggccccggtcgtccacgttgttattgtcgcccttggtcaggaacttgacggatccgtcctctctgcagaaaagattgattgggattatatgggaccaaaccaaaccaaaaggaaatcatacagaatacaataaaaaggaatcttggcccgtgactaaatataaaacaacaatgttttaagacaacgaaacacaagcttaacttaatgacgtgtcctaaaactacaaattgtatctaaaataaaaaatgatctattccatacggcatgtgagctattttcaatcccttttagaaaatatgtaattcctttttgccttcactgctgtaggaaaacttttactagccactgtgttccatgcaccttctcataaacgagcttaagggaggtccacaaatttacataacatttcatgtgcacaaggatttcaaatagttaaaaaaatagcattacacaaaagtggcactaatttagttccttcccctggcgattagaaactatgatgctcattccacctaaccgatcagagatgttaaaatgcctacttgaacagcaagcacccagtacgacatcatgccccattcatcttaaagacgctttctgggattggtttccatatccgtagccccaggaaactcacttttcgtgcagcttgatgacgcggtgtacaatgggtatgtccctgccctccaccttgaagacgacgatctcgccgacgcgcaccggctcctccttgtagttagtgaggaagaggaggtcgccgcggtggaaagccggctccatgctgccactgagcacgacaacgatcggcgactcgctgccggtgaccaccatcaggcccttccagatcatcagcgccgaggagacgatcatggcgaagctcagcacctggtacagcgactgcgggagggaaagggcacgaatcaggatgatatatgggtgcattgcccggagaagcggcgctgctcacctgacgcttgttcattctgttgaagtcgcccagcatctcgtcaatctgcaacatgctggctacgcccatggctgcggctgttattgcggtgcttgtggaggaaatagcctttttaaatgcaattgaaaaggtccttaacaaaacttctcggcttcgtccacgaagacagaaaatttccgacacgtatgtttaggccgagttgccagacggtgtgtgacgggtgcgtgatgatctttgtgcaactattgttcggtcacactattgtttcccaaaaactcccgccttttgtgactttttttttttttgggtataaacattatttaattcccggcgttggttcaagttagtcttttattctggtcttcgtgtttaccttataaatgtttcagaagttctaagattaaaggtcactctgtactataaatcaccatttttattcctataacttaccaattgcgcacattagaggcatcttaacctttattaatacatagtaatattatataatatatatcgtagtggcaaaaattcgaattaatagcgttcgtaatagttcttaaatatattcctgagttaacggtaaaaattaaagagtatcccatacgctacagtgctgccacaccaagcaatcgataagcgagctgccaccacaatttgacagtaacgttttccgcaattggtgtgaccgcaagcgaaaacgtgaagtgagcgccatcggtggtgttttctcgcgaaatataatatcaactaagcggagaaagatgggcgacaagttgctggatccgacgcagatcatcaatgggctggctgtgatgctgtcctttttcgtgggctaccgatacgccctgaagcgaggcgatgccaaggactccgtcaccgagggagcggcgaccccgttctcgcaggaatcttcggtgtctagcggttccgaggcttcagtttcggataaggtgagaaggaaagccctcggtaggcattcaatggccccaatccacctagtactctgaacttgttgtagacccaaatgcatcattgaacgcatacacttggggtcacaataatagcagtgccattttttgttgtacggtagaagttttcaaaagtcctactttacatagtttaaagtatgattttttaacataagtatatagcacatacacattataataatataataccaacgctaattttctaaacattgca

SEQ ID NO: 3965 - DNA, 692 bp, DROSOPHILA
gcaactcggcctaaacatacgtgtcggaaattttctgtcttcgtggacgaagccgagaagttttgttaaggaccttttcaattgcatttaaaaaggctatttcctccacaagcaccgcaataacagccgcagccatgggcgtagccagcatgttgcagattgacgagatgctgggcgacttcaacagaatgaacaagcgtcagtcgctgtaccaggtgctgagcttcgccatgatcgtctcctcggcgctgatgatctggaagggcctgatggtggtcaccggcagcgagtcgccgatcgttgtcgtgctcagtggcagcatggagccggctttccaccgcggcgacctcctcttcctcactaactacaaggaggagccggtgcgcgtcggcgagatcgtcgtcttcaaggtggagggcagggacatacccattgtacaccgcgtcatcaagctgcacgaaaaagaggacggatccgtcaagttcctgaccaagggcgacaataacaacgtggacgaccggggcctgtatgcacccaaccagctgtggctgaccaaaaaggacattgtgggccgggccaggggcttcctgccttacgtgggcatcatcacgatcttcatgaacgaatatcccaaggttaagtgggccattctctctattttggccattttcgtgctgctgcatcgggagtag

SEQ ID NO: 3966 - protein, 185 aa, DROSOPHILA
MGVASMLQIDEMLGDFNRMNKRQSLYQVLSFAMIVSSALMIWKGLMVVTGSESPIVVVLSGSMEPAFHRGDLLFLTNYKEEPVRVGEIVVFKVEGRDIPIVHRVIKLHEKEDGSVKFLTKGDNNNVDDRGLYAPNQLWLTKKDIVGRARGFLPYVGIITIFMNEYPKVKWAILSILAIFVLLHRE

SEQ ID NO: 3967 - DNA, 2851 bp, DROSOPHILA
ttacaagactaatataaatatatactaaatttcaacacatttttcaaaagtatataagtgtgggcgtggcaggtttgtgcaagccactggcactctaagtgcacccgctaaaatatggatgtctaggcaccagggtgttttttaaaataaaataaataaaaaatatccgagagttttgccaccctggtgttttgtggtacgagcaaaaaagggtctcattcgagtgatcaatttggaaatataacaaacaatatcctgaatcgcacttctgacagcggaacctaaatttttacaaaaatagatttttctatgagttattttcggtctaatcgatagaaatttacaagactaataaaataatgaaaagaaatcaaatcatttttaaaaggtgtgtaggccggacggacaaacatggccaaatctacactgcaattgattcaaataaggaaatgcttcctatattatatacttttcaatgagtaaccggctataagactacacaaagcaagtgcacagtaaaaattgaaataatataaaatacataacgccttctgttctgttaaatacaatctttattgtacactaaaaacttgtaattataatttatttacgaagtagtataacaaggtgataagataaataaaatgttataattttctgtggtacttacatacatagtttactcctcatcggtgacatttgtagattcatgacctttgtgcaaggctatttgggaatcggatatcagattatagcgttctttcttgcttttataatttgtttgcaattttgaaatatattgctagcacaccaactagctgaaaaatggatagtcgagtaaatcgacaataatattttgtgaaagcaaagctgacaaaataatatttattaaaataagaaagtctttaattaatagtttcagaatatataatatttattttgcagtaattaactttttatggcacaacaggaagaaaaatacatgcaggtatgtaggtctttaatagttctcagtggtgcggacgtagtttactccagagggcatggataccttatcaaatcccttggggaagagtttatgagcctcctcatcggtgacagtgggcaggatcatgaccttagtgccaggctgtttatgaaacagaattaattagttcggaacagttcgcattaagtgggtagaaaaacttacggtccagttggcgggagtggccaccaccttgaggcgatcagtcagctgcagggagtcaatggtcctcagaatctcgctgtaagattacaggatcgtcagttgagattaacaatagttgtagccagaaagaggtacttactcaacgttgcgaccagtggacatggggtaaaacatggagaggcgcaccttatggtccggactgatgatgaacagggcgcggatggtcttacccacctcgggatccttcttctgctcctcgtcgagcatgcccagggtgacggccaggtcgcgagtagggtcggcgatgatcgggtaggggaagtccccgggaatgtccaggcaatagctcttgatgtcgttcacccagtccacgtgcgagttcaatgcgtcaacggaatgcgccaggcacttggtgttccgcttggcaaactccggctggtgcaccgcaatcctgcccagctcagtggtgcagacgggagtgaagtcggcggggtgagagaagagcaccacccagctggcgatccgaaggagaattggtaagattcgatcagagaaaaagggtttgatggcacttacgagttgccctgccactcgtggaatttaatgggccccttggttgtgtcggcctcgaagttaggtacggtctgtcccaaacgcatcttgctgtttgatttttagtttcacttggaaaaaaacttgttagttgctcagctggtagctgttattagctcgcacacttgttgcttactgaatactgactgggagagctcgctgtcttttatacccgactggatcaatttgatgagagggagcgatagagacagagaacgggagctggcttatcgtatcatatacatttgtatacgtactataacgtggtgatgcgtgtagactaacaaacaactcagtgattattgggggacattgtgaggggaatgaagaggcctcgccatatttgtgcgacactcgacaggggcctctaaataaccagactggggccttacccaaatgtatactctgtgaggaaaacattctagaagcatcgtaaaataaagtacagtcttgcataattattttgcattaaacttgatcaaataacccaatcagcccagaacaaattccttcaggatcttgtataaaaacagctgatttgatgcagttgacggttttgccggctccaaacataaacagagagcgagagcgcatttaaatgttaaatggtgttggtaaacagaggcgaagcaccaacacctgcaaacatacagccacaccgataggcgaatagtaagagcgagagagcggcgagcaacgtgatggtatttgtgagtgcctgcaaaaatcgcacacttccatagatcgcacggctctcccgttcacgtacacaaaacaagcctccaattgaaagtgaagagcgagtgaaatcatgagactgtgtgcgtaggtctatcgaaaattagcacaccagcataggttttttctcagtaatcacacgtatagatcgaatgggtttcggaaagtcggatgggcagatcgcttattcagaaggcaaaagacagtaagcatgaaagcaacccaaatgagaatcagattacagtaataattacaaatatcgtatatgcagtgtgttacaattcaattgctaaaagtacagtccgtaca

SEQ ID NO: 3968 - DNA, 663 bp, DROSOPHILA
atgcgtttgggacagaccgtacctaacttcgaggccgacacaaccaaggggcccattaaattccacgagtggcagggcaactcctgggtggtgctcttctctcaccccgccgacttcactcccgtctgcaccactgagctgggcaggattgcggtgcaccagccggagtttgccaagcggaacaccaagtgcctggcgcattccgttgacgcattgaactcgcacgtggactgggtgaacgacatcaagagctattgcctggacattcccggggacttcccctacccgatcatcgccgaccctactcgcgacctggccgtcaccctgggcatgctcgacgaggagcagaagaaggatcccgaggtgggtaagaccatccgcgccctgttcatcatcagtccggaccataaggtgcgcctctccatgttttaccccatgtccactggtcgcaacgttgacgagattctgaggaccattgactccctgcagctgactgatcgcctcaaggtggtggccactcccgccaactggacccctggcactaaggtcatgatcctgcccactgtcaccgatgaggaggctcataaactcttccccaagggatttgataaggtatccatgccctctggagtaaactacgtccgcaccactgagaactattaa

SEQ ID NO: 3969 - protein, 220 aa, DROSOPHILA
MRLGQTVPNFEADTTKGPIKFHEWQGNSWVVLFSHPADFTPVCTTELGRIAVHQPEFAKRNTKCLAHSVDALNSHVDWVNDIKSYCLDIPGDFPYPIIADPTRDLAVTLGMLDEEQKKDPEVGKTIRALFIISPDHKVRLSMFYPMSTGRNVDEILRTIDSLQLTDRLKVVATPANWTPGTKVMILPTVTDEEAHKLFPKGFDKVSMPSGVNYVRTTENY

SEQ ID NO: 3970 - DNA, 5606 bp, DROSOPHILA
ataggaagcagattgtctacttattcgaaaacgttgcatcagatatttcagatatttgttagcccatcgataggcgatagtactgcgtacattcggacaaacaatcattcgacggcccacaggtttttgataatgttttgggtttgggttaacccccaacgcatggattgattaggcataataatggactgattattcataataaaaacacttaaaacagtaactataagtgcaaatagcatctgtacttaatacaaaatcaacgaatttactgaatggataatgttgtttaaggttgtttttttttaacgtttcaaagatatgcatgcagccctacttgaatttccccaaaacaaacatatttccagattgtaccatccaaatgaatactaatagcaagtgctcttgagaagataacgttcccatatcttcctcagacaatcagacaattgatattggaatttggcagagcatagtgggaggggaaagaatcatctttccccgttccacaattttttgtcaagatataacatttcgatattattgtatacgtagtgaaaagatattcaatcaagtcgaaaaagttaaaaacagattgaagacacatacccgtcattccagttcttccgattgttgtttcctcctcctcctcctccaccaccacctccgcctggatttccaaagcggttgccaaagtttctgggtcctctcggtggtcctgcgcccagatcatcgttgccaaagcccggacccggtgggccgccttggcgtcggaagggattatcactgattggtccaccgttaaagccgcgcatattgtgacctggtccattgggtcccatgtggggtcgtggaccgccaaacggcggaccgccaaagtcatcacgtcccggaccgaaaggaccatcgggtccgcgaggcccgaagttgcgggaacccggacgcggtccgaaattgggcccaaagtttggtccaaagttggggccatttggtctgaagtgtggtccgaaattcggacccggacccggtaacggtccatttggtctaatgaacggcccgcccggacctctaggtccaaagttgtgcccgaagttgggtccaaagtttccacgcggtcctggaccgttgggtccaaagttcctgcccggtggtccaaagccaggtggaccattgttatctaagtcaatgaaattatttccagacacttgatttggtccaaagacatcgaaacgtgatccatcgttttgacctggaccagaacctggacctccgcctggtccgtttccgggaccaaagccaccaggtgggccattattgtccggtttctcaccgttattggtgctcaccgagtcgccggcatcctgcgacttgttttcgttgccgctgttcttcttgcgctgccactcggcgaaggacaatggacgtccatccgtacccgattcctgatcatcgcgttgctcgtgacgatcgcgctgctcgcgttcctgtacattggccaccgcctgggagagattgttaatgaaatttggatccttgagggcattgcttagagattcgtcgcccttcttgtcggcggacacgtcgcctggctgtttttcagtttcatcagccgctttcttttcgctggaatccttgagcaccacattgaagactgaggacgaattattcttgttactgccatcgtccaccaaatccagaccgggtatgccatcgttcttcttgaaaatgctgcccatgggcgtgttaggtgcgtcctgtaccacctctttctcctcatcatcgtcgtcgtcgtcgtccagggaaatggtgaatatgggctcctcctccttgacttgcttagcgggtatttgtgagggagcagctctttgacggcgcttgccataatttgtggaaaccggaggaggctgcgtgggcggaaccactgtcggatctggcactactggtgcagctggagctttaacttcgggcggcaccacgggtgcaatcggtggagccactggggaagctgtcgtttttgctttctttacatcagatgaattttcatttgatgccgccggcttggttggaatttcctggttggattcatctggctgttcgtccaatatctgctggatggcttcctgggcggtttggtactggttgtgcatccccggtggcggtccttggttgcctctgaatgcaggtactccggcgctttcgaaggggcgattctcttttccaaaatgaccagcatttccggactgtctgttcccgtttccgaagttgggacccgatccgtgatcctggtcaccctgatcggcaaaacggccctggccttcgaagggatccttatttggcttctgctccgcggtcgtggatgcacctgcggctgcttccttccttatgtctgtggtcgagcctcctgccgaaccacccatctgcagttggcgacgtcggcgcatctgctcccttctctcggcgatgcgacggcgctgcttctcgaactcctcctcgtagcgtcgatactcgtcacgatccggatggttggcattggccagcttccattcttcgaactgttgctcccactgatcgaacagcagatcgaaactggcctcgtccaaatcgggtggttgctgttgattgcggttctgctgcgactgcttgtagggcgcattcgactgattgaagctgttgcgctgattgtaattgccacgatttggattgtagccgcctggaccagaatccccaccgcctctctcatcggaaaatccctggttacgattgttatcccgtcgattgttctggcggcgattgttactaaagttattattaatattattgccgggtcctccaccacgtccagcaaaactgtcctggctttgcttgcctccactatcatctccaaagccgccaaagttgcctcctcctgcactaccttgatcttggctattgtaactgttgccataattgccaaaatcggactgtggattcttaatgaatgggttcttgctttggtttccatctccacctccatcaccccaactattgcggctattctggatgctatttggcttgttgttagtcctcattggcggtgtatcgatgtcggaattgattccttgccagcgactcgagcgggcattctggctgctattgttttgctgctgatggtcctgtggcggatcacttatactcggtggtggtccgctcatccaggaattctggttttgatactgctgattgggattcggaaggcttggcggtggttcgctcatccaacgatttagttgctgatccccgccagacggcgcttgatttgaagtcccatcccagcggcgattgccatcattggtgttattgttaaatgacgttccattccagcgattgttgacatcatttgccggcggcgggccattccagcgattgggttggccggtattatcaggcggcggaccactggtatcccaggtaggacgattattattgcccacaccgtgttgattatttccccactggccatggtccatatggtttaaatgcggctgctgctgttgcggtgttggtctctgcaaacttggcggcggctgctggagattcggaaatccctggttgtcttgcccggcaatgttgtagttcatctggttcatttgaccgccaccatatctatttggcggcggctgttgcattggcggtggtcctgaccacatgctttggatgtcattcggatgctgattgtaaccgcctttttgtggtggcggcggcggctggttgtacatctgcggctgggccatgatcttaccgggcagtggcggtgctcccgcgacggctacgggtgtagttgactgcgccggcgaggcgctgacaccttggtaatagttatgtgcgacaggataggcctgtggcccgggaggagcgaccacagggacgggtgctgctgcaggagtcgctaccacaggcgcgggcacgccttgaactgcggtagttgtggccgcggctgcggccatttcacgcttatactaaagatttggaagactactatagcaatatgatcgtcgataactaattgatttgacccacctgctcaccgtactgggcatgccacttggcgtactcctcctggtatgtctgccactgttgccagtggtgctgcagtgcgtactgctgttcgggtgtcatggccgcgtactgggcggccgtatactgttgataggggttgccagcccccgtcgcctggccgctgctataggggttgaatccaggggccgttgtgactgcggctgcagtcgtgactatgggtgcagaggcaccgcttgatgctccggctccggcggtcgcgtccgatggaggcggagggggcggggcgtccggcaacggtggcggaaccgacggttgcggaggtagagcggcagtgggagccactgcggcggcggtttgccattggccccacataccgtgtccactggattgattagcctattagcgaataacacacttgtaccgctcggttgggctttcacaaaatccggcggattggctccgttccgtttaaaatcgtccacctttcactaattcagtttgctatctgaacgaattgataatgaaaacttcgccatatttggcttgaaaactagagatggaactgtcagctaaatgggccgggcagtgtgaccgtgctgcgagtgtgcatccatatatcgcaagcaccctagaatattccattgccaattaataaaataatttgaatgtaatccaatgcacttacaagcctacaaattgaaaaattagcaaagatagcttgcttaagtgattgattcgtagaagttgtattgataatacgaaaatatgttaaaaaaaaaataaacaagaagatcaaactggcagaccttctaatgagctttttgaaaatctgcagcaaattaatagatttctcagaccaggcattttactacattttttcatatctgtaaatatgttaatataagttaagtcaagtgatattttgtttaactgatgttttttgtagtttgttaagtaaatttggtaattttccaacagtccggccgaaagtctaagtagtcaggaccgatatctccctgtgataataatataatatctcatagaaatatattttaacatgaattaattttaacaattttattgagagctagcaataaaattttagggaacgcattcatttagctttgcctaactcttaaaaatgtaaaatttaattaactaatattaaaatcacaaattcataaacactttttggtatttttagcataccctaacgtaacggtcacagctcactacagccacactaatcgcgacacgtgcagaaattgttattttttgccgtcctttgtttttcatgtgaaaattagcactgaaaatggccgaaacgagcgaaaagatcaagttccttgtggcggacaccacagcctttataaacgccgtgcccctgaatgtaagtcacgcacaatttgcccattcgagccatctaaagccgccactaatcccctacaggaatacgcggagcaggtgctcaccgtgccggatgtggtggccgaagtgcgcaacaagcgccagattcgccgcctctgcgttctgcccttcgacctccaggt

SEQ ID NO: 3971 - DNA, 3973 bp, DROSOPHILA
ttttcaagccaaatatggcgaagttttcattatcaattcgttcagatagcaaactgaattagtgaaaggtggacgattttaaacggaacggagccaatccgccggattttgtgaaagcccaaccgagcggtacaagtgtgttattcgctaataggctaatcaatccagtggacacggtatgtggggccaatggcaaaccgccgccgcagtggctcccactgccgctctacctccgcaaccgtcggttccgccaccgttgccggacgccccgccccctccgcctccatcggacgcgaccgccggagccggagcatcaagcggtgcctctgcacccatagtcacgactgcagccgcagtcacaacggcccctggattcaacccctatagcagcggccaggcgacgggggctggcaacccctatcaacagtatacggccgcccagtacgcggccatgacacccgaacagcagtacgcactgcagcaccactggcaacagtggcagacataccaggaggagtacgccaagtggcatgcccagtacggtgagcagtataagcgtgaaatggccgcagccgcggccacaactaccgcagttcaaggcgtgcccgcgcctgtggtagcgactcctgcagcagcacccgtccctgtggtcgctcctcccgggccacaggcctatcctgtcgcacataactattaccaaggtgtcagcgcctcgccggcgcagtcaactacacccgtagccgtcgcgggagcaccgccactgcccggtaagatcatggcccagccgcagatgtacaaccagccgccgccgccaccacaaaaaggcggttacaatcagcatccgaatgacatccaaagcatgtggtcaggaccaccgccaatgcaacagccgccgccaaatagatatggtggcggtcaaatgaaccagatgaactacaacattgccgggcaagacaaccagggatttccgaatctccagcagccgccgccaagtttgcagagaccaacaccgcaacagcagcagccgcatttaaaccatatggaccatggccagtggggaaataatcaacacggtgtgggcaataataatcgtcctacctgggataccagtggtccgccgcctgataataccggccaacccaatcgctggaatggcccgccgccggcaaatgatgtcaacaatcgctggaatggaacgtcatttaacaataacaccaatgatggcaatcgccgctgggatgggacttcaaatcaagcgccgtctggcggggatcagcaactaaatcgttggatgagcgaaccaccgccaagccttccgaatcccaatcagcagtatcaaaaccagaattcctggatgagcggaccaccaccgagtataagtgatccgccacaggaccatcagcagcaaaacaatagcagccagaatgcccgctcgagtcgctggcaaggaatcaattccgacatcgatacaccgccaatgaggactaacaacaagccaaatagcatccagaatagccgcaatagttggggtgatggaggtggagatggaaaccaaagcaagaacccattcattaagaatccacagtccgattttggcaattatggcaacagttacaatagccaagatcaaggtagtgcaggaggaggcaactttggcggctttggagatgatagtggaggcaagcaaagccaggacagttttgctggacgtggtggaggacccggcaataatattaataataactttagtaacaatcgccgccagaacaatcgacgggataacaatcgtaaccagggattttccgatgagagaggcggtggggattctggtccaggcggctacaatccaaatcgtggcaattacaatcagcgcaacagcttcaatcagtcgaatgcgccctacaagcagtcgcagcagaaccgcaatcaacagcaaccacccgatttggacgaggccagtttcgatctgctgttcgatcagtgggagcaacagttcgaagaatggaagctggccaatgccaaccatccggatcgtgacgagtatcgacgctacgaggaggagttcgagaagcagcgccgtcgcatcgccgagagaagggagcagatgcgccgacgtcgccaactgcagatgggtggttcggcaggaggctcgaccacagacataaggaaggaagcagccgcaggtgcatccacgaccgcggagcagaagccaaataaggatcccttcgaaggccagggccgttttgccgatcagggtgaccaggatcacggatcgggtcccaacttcggaaacgggaacagacagtccggaaatgctggtcattttggaaaagagaatcgccccttcgaaagcgccggagtacctgcattcagaggcaaccaaggaccgccaccggggatgcacaaccagtaccaaaccgcccaggaagccatccagcagatattggacgaacagccagatgaatccaaccaggaaattccaaccaagccggcggcatcaaatgaaaattcatctgatgtaaagaaagcaaaaacgacagcttccccagtggctccaccgattgcacccgtggtgccgcccgaagttaaagctccagctgcaccagtagtgccagatccgacagtggttccgcccacgcagcctcctccggtttccacaaattatggcaagcgccgtcaaagagctgctccctcacaaatacccgctaagcaagtcaaggaggaggagcccatattcaccatttccctggacgacgacgacgacgatgatgaggagaaagaggtggtacaggacgcacctaacacgcccatgggcagcattttcaagaagaacgatggcatacccggtctggatttggtggacgatggcagtaacaagaataattcgtcctcagtcttcaatgtggtgctcaaggattccagcgaaaagaaagcggctgatgaaactgaaaaacagccaggcgacgtgtccgccgacaagaagggcgacgaatctctaagcaatgccctcaaggatccaaatttcattaacaatctctcccaggcggtggccaatgtacaggaacgcgagcagcgcgatcgtcacgagcaacgcgatgatcaggaatcgggtacggatggacgtccattgtccttcgccgagtggcagcgcaagaagaacagcggcaacgaaaacaagtcgcaggatgccggcgactcggtgagcaccaataacggtgagaaaccggacaataatggcccacctggtggctttggtcccggaaacggaccaggcggaggtccaggttctggtccaggtcaaaacgatggatcacgtttcgatgtctttggaccaaatcaagtgtctggaaataatttcattgacttagataacaatggtccacctggctttggaccaccgggcaggaactttggacccaacggtccaggaccgcgtggaaactttggacccaacttcgggcacaactttggacctagaggtccgggcgggccgttcattagaccaaatggaccgttaccgggtccgggtccgaatttcggaccacacttcagaccaaatggccccaactttggaccaaactttgggcccaatttcggaccgcgtccgggttcccgcaacttcgggcctcgcggacccgatggtcctttcggtccgggacgtgatgactttggcggtccgccgtttggcggtccacgaccccacatgggacccaatggaccaggtcacaatatgcgcggctttaacggtggaccaatcagtgataatcccttccgacgccaaggcggcccaccgggtccgggctttggcaacgatgatctgggcgcaggaccaccgagaggacccagaaactttggcaaccgctttggaaatccaggcggaggtggtggtggaggaggaggaggaggaaacaacaatcggaagaactggaatgacgggtatgtgtcttcaatctgtttttaactttttcgactt

SEQ ID NO: 3972 - protein, 1260 aa, DROSOPHILA
MWGQWQTAAAVAPTAALPPQPSVPPPLPDAPPPPPPSDATAGAGASSGASAPIVTTAAAVTTAPGFNPYSSGQATGAGNPYQQYTAAQYAAMTPEQQYALQHHWQQWQTYQEEYAKWHAQYGEQYKREMAAAAATTTAVQGVPAPVVATPAAAPVPVVAPPGPQAYPVAHNYYQGVSASPAQSTTPVAVAGAPPLPGKIMAQPQMYNQPPPPPQKGGYNQHPNDIQSMWSGPPPMQQPPPNRYGGGQMNQMNYNIAGQDNQGFPNLQQPPPSLQRPTPQQQQPHLNHMDHGQWGNNQHGVGNNNRPTWDTSGPPPDNTGQPNRWNGPPPANDVNNRWNGTSFNNNTNDGNRRWDGTSNQAPSGGDQQLNRWMSEPPPSLPNPNQQYQNQNSWMSGPPPSISDPPQDHQQQNNSSQNARSSRWQGINSDIDTPPMRTNNKPNSIQNSRNSWGDGGGDGNQSKNPFIKNPQSDFGNYGNSYNSQDQGSAGGGNFGGFGDDSGGKQSQDSFAGRGGGPGNNINNNFSNNRRQNNRRDNNRNQGFSDERGGGDSGPGGYNPNRGNYNQRNSFNQSNAPYKQSQQNRNQQQPPDLDEASFDLLFDQWEQQFEEWKLANANHPDRDEYRRYEEEFEKQRRRIAERREQMRRRRQLQMGGSAGGSTTDIRKEAAAGASTTAEQKPNKDPFEGQGRFADQGDQDHGSGPNFGNGNRQSGNAGHFGKENRPFESAGVPAFRGNQGPPPGMHNQYQTAQEAIQQILDEQPDESNQEIPTKPAASNENSSDVKKAKTTASPVAPPIAPVVPPEVKAPAAPVVPDPTVVPPTQPPPVSTNYGKRRQRAAPSQIPAKQVKEEEPIFTISLDDDDDDDEEKEVVQDAPNTPMGSIFKKNDGIPGLDLVDDGSNKNNSSSVFNVVLKDSSEKKAADETEKQPGDVSADKKGDESLSNALKDPNFINNLSQAVANVQEREQRDRHEQRDDQESGTDGRPLSFAEWQRKKNSGNENKSQDAGDSVSTNNGEKPDNNGPPGGFGPGNGPGGGPGSGPGQNDGSRFDVFGPNQVSGNNFIDLDNNGPPGFGPPGRNFGPNGPGPRGNFGPNFGHNFGPRGPGGPFIRPNGPLPGPGPNFGPHFRPNGPNFGPNFGPNFGPRPGSRNFGPRGPDGPFGPGRDDFGGPPFGGPRPHMGPNGPGHNMRGFNGGPISDNPFRRQGGPPGPGFGNDDLGAGPPRGPRNFGNRFGNPGGGGGGGGGGGNNNRKNWNDGYVSSICF

SEQ ID NO: 3973 - DNA, 8496 bp, DROSOPHILA
agtgtgttggtaagtacgttttttcagtaaaataaggattgttatttattttgacttccatagatataaatgaatgttcaataaataatcacaactgccttccaactcagagatgtgataacacgatcggatcatatatatgcacggtatattaatctgtatacaacatgttgcttttgttacaacctgtattctatatagcgcctacaaagctgcggaacaggctataccttaaatgcagaaacggggaattgtgacggtaagagaccttgttaaaaaatattatttatacactagtgggcataagtatttgtacaagaaatatattcaatatatttctttataactcattgtatacttaaaccaaaattgtttaataattttagtaaattggtagactatcgttgttaaattagctaacataaacatatggataacttcattgttgatttaacaaaaattactcttttacaaattagcaatggcataagtattttgacaattatttaaatgttataaaatgaaaagaacaaaaagtcaactaaaaattataacaaattaatacaaaatataccctcccttagcgtctatcaccatttgcagacgttttggtatagactgtaccaagctgtggatataatctattgaaatattcttccataaggtttgaatttccaaaatcgtttcttcgcgacttctaaataagtttgcacgcctttttttgttgtatatatgaccagaggttttctattatgttgaggtctggactttgaggtggctaatccaatgtgtttacgcaaacatctttcagaaactgcgtaatcagtttggccttatgacagggagcattatcctgctggagtataaaggactttccaatcaatttatcaccaagtgcatggttattaaggccatctaaatattttctttgattcatggttccatcaacaggaaccaaatctcccaagccagtgaaggctacacatccccaaaatccccagttcctctgttttcaccatgtttaacaaatttataactgaaataaattgtgataccgtagtatcacgttatcaagaaccatttgatctaaaatacataagtcaaaattttatattcttcgaaccagagatcaatgcgaagtaattaaatgtgatgtctaaatacttttgccaccgcccaaatcgttgtctgtctagctttcttataagcagaaggataattgaaaaggtaaacggcaaaacatacctctcgcgtgtaactgtaattgcactctttgtttaattatcaatactttacttctttatttgactgtactatgaacagcatagcccggtagttgcaagctaatggtgtctaaatacttatgaccactagtgtatacatataaaaagtgaaaaaccgctaaaacaacgattttgtgtcgagaacgtattatatttaataatacctattatgaatttaggcatattcgagctcccggtcttaaaaattacttggaaagatttctgttctacaggcaacaattttgaagcataagctcaccacatttgagtcatgaaagccttagcgagggtatagtcctcataatcccaaaagctttaatttgactaaacatttttgtagtatcgagcctacaacttgtaaaggatgcgcaaaaaaagtttaatattgttcactaaaaaactcgtactgaagacgagtaccgagaacgaggttgaacttgccgctgaaaaattaactttaactttatataaaagaattttagaggagggagtaaacaaaaattatacaaatatatcaaatagattacagatatttgtcttgtctagcagaatatttgaatatttaatattttagtaaacgtatatacttataagtttctccaacgttttaaataaattcactttgaatatagaaaggtggcaggaatataccatcttctccaatttttttattatgccctaacttacttctcgactctactctacttcttttgaaaaactgtagtttagctgtaaaaatgttttaagtatctatatttcctacgcttttatattaattacatggggctagagatttatgctatatgtcgttacaaagacatttttaagacatttcttttcgagcgatttgttcgagcgaatgagtaaatttataattaataatgtagtgtaattgtatgcagttaagtacaaattaatttttgttgatatcagaaagttttgttcgttgctttgtcaagcggtttttcgtttggtacttacgtatactgtacactatatttttattgataaggcgataaagttagtattcctgttttgcgtctagcagattcgtgtaactgacagcaattttctttaaagatgatgatgaatgcacccttagtacacataactgtccgtcaaactatgattgtcacaacacgaggggatcattccgatgttatagaaaaatctcaacaatgttaacaacaagaacgacatcaactacagttccgcctttatctttggaaaacgcacgaaggagttttactagccgatacccatacccattagccgtacatccggaatactcacaaaacaacgattccatttctacgaatcggcgtgtagactgctcccctggattttataggaatactcttggtgcctgcataggtaagtggtaaaaatgaatatcgttaccgttagggccgtagatcttaacaactacacagttagttgatacagaaaacatcgaaaacatcggttttattttccgtctttttgaaagatacaaatgaatgcatggaacaaaatccgtgcggaaaccatgaacgatgcattaacacaaatggccatttccgctgcgaaagtctgctccagtgctcgcccggctacaaatcaacagtggacggtaaatcatgcataggtaagtgtccgttttgaattatcgtcgcgttatttataaaaaatacataacattcaaaaatgtgttatttcatgaaaattgtaatcgtttaaaggatctaaatgtgtgggcgtggagaaatcgatagaaatttgcaagactaaaaagattatgaaaatatatcaaaatatttttgggcggggtagttttgggcggttctttggccgtggtcaacgtgaaacaacaaacctgcgctgcgtatatgtttcggtatgttttatctcaaccttctagattttttagttcctgagatctaaaagaaaacaagtaaaattgcaagcatgtaacatttacgctaaataggcaagattgtccaccactttgaacaacacataccagtcccaggagctgaagaggtaacttacctaaaagtataccttgacataagactcacatggcgcaggcatattgaagccattgaactcaacttaaactaagtgacaaaagacagcaatctacattggctcattaacgcgtgctcctcgcttagcctagaccacaagctcatactatacaatactctactaaaaccaatctggacctcagagctatgggggaatgcaacactgacatcgtagcgagcacactcaaagattttgagaatcagcaacatggtaggtttgaaatgaaaacacccaaaaagccttgaacattccaccagtcataaatgtgatctcgaaaatcaaagaaaaataccacagcactgaagatggcaaaaacattatggctacgcacactaccgacaaaagcagtccacacatgatttaaattttttaattttcctttttttttggattttatgacaaaggatattggatatttctccctcgctcttccgctagctaaatcgtttagtccgctagtatcgtttttatgttttaattaagtatttccgtaattctaaaggtattcaatattaatattattcttattgtattgtatgtatactctttttaaatagacattgatgagtgcgatactggtgaacacaattgtggcgaaagacagatttgccgtaatcgaaacggtggctttgtgtgctcctgcccgataggtcatgagctcaaacgatccattggtggtgctagtacatgtgttgacacgaacgaatgcgctctagaacaacgtgtatgtccattgaacgcccagtgctttaacactattggagcttactactgcgaatgcaaagctggctttcaaaagaaatctgatggtaataatagcacacaatgttttgatatcgatgagtgtcaagtgattccgggactttgtcaacaaaaatgtctcaacttttggggaggatatcgatgcacttgtaactctggataccaattgggaccggacaaccggacatgcaatgatataaatgaatgcgaagtacataaggattacaaactatgtatggggtctgtatttactaacgtttttatattacattaatggtattactattataaacattatatttaagattatgcataaacactcctggttcgtatcaatgttcctgtccacgtggatatatattggctgcagatatgaatacgtgtcgtgatgtcgatgaatgcgcaacagattccattaatcaagtttgtactggccgggtaagtatttattgtggtttcatgtatagagagcaaacaaaatacataaacaaatttcttactaggaaattcacttataacaagaaagttagattcggcaagctaatttttcttgcagtaacaaaatatttaaaaactgagcaaatatatttctaataagatcactttatgataaatgcacaaagctattatttctctgaaataaaaaaaaaaattcatagtttcattgttttggataaaaaatatgtcttaatcggtataaactattgtaagtccctttgcagagggtacactgtttccaattaaaagtatatatatatatattatatccttggtcaatatctacatcgttggtttagccagtctgcccatctaacgctgtctgcataaaatttttccaggagtcttttatttattccaggatcgggtaaccggccataggaaaaactcgttcacacccgttactcgtagagtaaaagaatcggtaaaaaatatgtaacagatgaaggaaccgttggcgacccagtaaaaagtatatatttttgggcagggcatcattgccaattcgatctggccatgtccgtctgtataaacgtcgagagatactcgtagtcgcagcgctagtttgtttactgatgtgtttatgcaccttttttgtaagaaaaaataaggtttttgacttttcgaagggaacttgtcttattaaattaaacagtatatatttacactatttgtatatttatttttatgtagaatgacatttgcaccaatatcagaggaagctacaaatgtactaccgttaattgtccacttggatacagcattgacccagaacaaaaaaagtaagtactttcacctttgatgccacaaaagaacaattttacgtatgtttataaaagactttttaggctttaaaaagtttaagaccatacttgataagaaatgttgaggttttcacttattactttagtatttatgataacaatatttttacattttcgttatgtcactatttgcggctctggtccagctgaaaacatgttgatttcgctggccaaattgtctcggtgaaacaggggcgggaaaatagggtcaaccatcaaaatattattccctgtattatcccgaggtcttttagacgaaaatcaaaacttctttcgacaatgcgtgaaccattttattggtattttctttctttagcatttaattggatcagggatagttaccgtgtttactttttaacctatacatacatttttctcaataacaacctctatgcttttttaaagccgtgcttaaagattcctttaagagtttgtaaatttgaaacaaagcgttgcaaatatgttcagtacgtgaattaagaatttgggtatcgttgtttttgcatttttttaatatatagggatatataaaaattacatatgttgaatttattaagatatattggtataatttttgtgttgcaaaattgaagaacaatacaaaattttaaagatttaagttgtttgttgcttttttttgcaaaatgtaggaaaacataaatttccacagtttcaagttattttaattacaacttatcatagggtttccaaaggagcagatatacatttaatagaaaataatagaaaaaaggcataattttattatttatatactcgtgtgacgttaaatgaagtatgttagtgaaagatattaaaggacctgtactggcgggtagactttttagaatctggctctagctcgtcggggtgggggtggtggtcttgcttgtgcagatactttttccgttacaaacattatttttcaatatgagaaattgctcgggatacaaaatgggaagaatcgaataaacatattcaggaaagaagttcgggaaatagaggaaatgttgagaaatgtgtaactaccgagacaattgtgtaaatgttattgacccggaaacctctcactaggtttcgggtttctttctgattttacattattaatatactggcaagtttatctcgtcgtaacgaaagtcgtcttttcgaactattgttaaaacttcacctctttgaaaaggtaaatcatcttaatcctttgataaatagggaaattaaattacaaaaatgaataattgtgtaaatactcaccctgccaatgaaatcgaactttcctattactttttccacccttctacacgcaggacgttttagatggtcaaaagactgatccccaaggcggtaaacgatttgatcctgttgttgaactttgttaatgatgtagttgataacttttgtatcttctctaaataataaaaatctttataagtaaacaattcttttacttaaaaactaaacaaaaatttgtttcaagcttaaatgtgaatatataaatatataaataatttttgatattttaatgcataaacattttatattgataaagaacttttaaaatcaaaaagaatattcttgagacgttaattcatcttattcttcaataaatgccgcttatcgatacatacagtagaaattgagttcctttaattcgttattattttagtttacatcgttaaattcttcaatttatttaccccatcaatacatggtgtacatattactaacatacgaaattacgaaataatttgttgttatttagccttgaagagtgttatataagattttatatcctttttcttgcagccggtgccgccagaatcttaacttttgtgaaggagaagaatgttacacccaaccgtcagctttcacatataattttataacattcgtttctaagctaatgatacctccagatggtcgtaccatatttacattgagaggtccactttggtatgataatatcgaatttgatcttaaaattgttcgcatacaagcaaccaccaatattcaaaaggcaaccgatgggagttttgagtacgtatttaaaaaatatatttagctttaattttacaataaagtgattaaactgttaacagcactttacaaaacaacaaccaagttaacgtgatattaaagaaatcactggagggaccccaggacatcgagttggagttaagtatgacagtgtacacaaacggaatgcctcgtggaaaaagtgtagcaaaattatttctgtttgtttctcaacatacattttaaaaattataatatttcatttgctgcgaacatgtatacctttagattccctacaaacctatacagtagacacaaataaaaattatgcagaaaaagtacacacatacctgctctgctgataaattttacatttttaaatcattttaaataaataaaatcatcataaataatagcttatgttcaaagttgttgaattgttgagtaacaagtttgtgattaatttatttttcaagatacacttaagtaaaagtattttaatgtccaaaaaactcacgggatttgtactgcttgtgaggacttggccgcagaacacacttcacctcgtatattccatgtgcatggattatataaatgcatgtgatattcacacattcatgcggttaaaaaaacttactctgcctcctcaccgacactattggtaataaaaaataacgtaagttattttaacatttaataaagattttaacactaaaaacaagagagaattcttttttgctagttcttcggctatatatacccgatattgaagactactaaagattacaaggccaattgaaagtagaacaaaaaatctaaaaaaattttaaacatgtgggcgttacagcttttggcggattgagtttgcgtggtaacgtgtcgagcatttttatacccgttaaagggtatactagatttgttgaaaagtatgtaacaggcaaaaacgcttccgacctcaaaaagtatatatattcttgatcaggatcaatagccgagtcgatctgactatgtctgtctgtccgtatgaacacctcgaattctggact

SEQ ID NO: 3974 - DNA, 1684 bp, DROSOPHILA
gttcctctgttttcaccatgtttaacaaatttataactgaaataaattgtgataccgtagtatcacgttatcaagaaccatttgatctaaaatacataagtcaaaattttatattcttcgaaccagagatcaatgcgaagtaattaaatgtgatgtctaaatacttttgccaccgcccaaatcgttgtctgtctagctttcttataagcagaaggataattgaaaagcaattttctttaaagatgatgatgaatgcacccttagtacacataactgtccgtcaaactatgattgtcacaacacgaggggatcattccgatgttatagaaaaatctcaacaatgttaacaacaagaacgacatcaactacagttccgcctttatctttggaaaacgcacgaaggagttttactagccgatacccatacccattagccgtacatccggaatactcacaaaacaacgattccatttctacgaatcggcgtgtagactgctcccctggattttataggaatactcttggtgcctgcatagatacaaatgaatgcatggaacaaaatccgtgcggaaaccatgaacgatgcattaacacaaatggccatttccgctgcgaaagtctgctccagtgctcgcccggctacaaatcaacagtggacggtaaatcatgcatagacattgatgagtgcgatactggtgaacacaattgtggcgaaagacagatttgccgtaatcgaaacggtggctttgtgtgctcctgcccgataggtcatgagctcaaacgatccattggtggtgctagtacatgtgttgacacgaacgaatgcgctctagaacaacgtgtatgtccattgaacgcccagtgctttaacactattggagcttactactgcgaatgcaaagctggctttcaaaagaaatctgatggtaataatagcacacaatgttttgatatcgatgagtgtcaagtgattccgggactttgtcaacaaaaatgtctcaacttttggggaggatatcgatgcacttgtaactctggataccaattgggaccggacaaccggacatgcaatgatataaatgaatgcgaagtacataaggattacaaactatgtatgggattatgcataaacactcctggttcgtatcaatgttcctgtccacgtggatatatattggctgcagatatgaatacgtgtcgtgatgtcgatgaatgcgcaacagattccattaatcaagtttgtactggccgggtaagtatttattgtggtttcatgtatagagagcaaacaaaatacataaacaaatttcttactaggaaattcacttataacaagaaaaatgacatttgcaccaatatcagaggaagctacaaatgtactaccgttaattgtccacttggatacagcattgacccagaacaaaaaaaccggtgccgccagaatcttaacttttgtgaaggagaagaatgttacacccaaccgtcagctttcacatataattttataacattcgtttctaagctaatgatacctccagatggtcgtaccatatttacattgagaggtccactttggtatgataatatcgaatttgatcttaaaattgttcgcatacaagcaaccaccaatattcaaaaggcaaccgatgggagttttgagtacgtatttaaaaaatatatttag

SEQ ID NO: 3975 - protein, 447 aa, DROSOPHILA
MLTTRTTSTTVPPLSLENARRSFTSRYPYPLAVHPEYSQNNDSISTNRRVDCSPGFYRNTLGACIDTNECMEQNPCGNHERCINTNGHFRCESLLQCSPGYKSTVDGKSCIDIDECDTGEHNCGERQICRNRNGGFVCSCPIGHELKRSIGGASTCVDTNECALEQRVCPLNAQCFNTIGAYYCECKAGFQKKSDGNNSTQCFDIDECQVIPGLCQQKCLNFWGGYRCTCNSGYQLGPDNRTCNDINECEVHKDYKLCMGLCINTPGSYQCSCPRGYILAADMNTCRDVDECATDSINQVCTGRVSIYCGFMYREQTKYINKFLTRKFTYNKKNDICTNIRGSYKCTTVNCPLGYSIDPEQKNRCRQNLNFCEGEECYTQPSAFTYNFITFVSKLMIPPDGRTIFTLRGPLWYDNIEFDLKIVRIQATTNIQKATDGSFEYVFKKYI

SEQ ID NO: 3976 - DNA, 3636 bp, DROSOPHILA
gtaggctccgctgattgcaacattgtagttgtgcaccggatttgatcaaataaatgcataaaatatagatctaacatgggcattagttggttattatatacaacattttattgattttttttgtttataagtagatttatatttggcacttttcttctgcttaattaaaagtccataattttgcattttcaattcaaggccgatacagttcattgattcctagatgtttgccattgatacgaaaagtatggaatgtttgtagtttccaaggcaagatagtaagattatatttgtttttggactttagaaatgaattgattcaggggaacgtttttcaaggagattctattttaatatccgggattcgttttataatatatgatcttatcgatgctatttcatgtaactcattctacttattaaaaatatatgtatatttcgatagatgtaaatatttatatttataatattataatttataatatatttattttgcatttccctgaaagtgctatctgcttatagaacaatttagacaattcttttggcaaacacttaaatagttgcataaatttcacaaaattgccaaatatttttttcaaacaaaagctttatcttgacctgtgcatgagttcaagtcgtgcccccactgtcaagccccttaatggccagaccaccttttgtttatgttatgaaagtgctggttaaagaagtttcccattacctgttacccgatggatacttaataaccaaaaaaaaaaaaaaaaaaggggaacgaaattttagagctcatcagaagtgttgcaaaatcactgacgctgcgaatcaatgcatttgtgctgatccagaaatcggttgctgaaatcaattgcttccggcgcgtgcattatagtgtgtatagactaccgattccaaggggtataaaatgcattgagtcgcagcagtgggtatgcagtacaatttggtacggtgtctgaaaaagtcgaacttggaagccacaatgaatcctctgcgcaccctttgcgttatggcctgccttctggcggtcgccatgggtaatccccaatctggtaaccgttccggtcgccgatccaactccctggacaatgtggagcagcccagcaactgggtcaatccacgtgaagtcgaggagctgcccaacctgaaggaggttacccttaagaagctgcaggagatgagcctggaggagggcgctacgctgttggacaagctctgtaagttcaaggatctctaaaagttctaccaatcatgttatatttacacgcactatcctatcccgcagaccatctgtcccagttcaaccatgtcttcaagcccgattacaccccggaacccagccagatcaggggctacattgtcggcgagcgcggccagaagatcgagttcaacctgaacactttggtggagaaggttaagcgccagcagaagttcggcgacgatgaggtcaccatcttcatccagggcctgcccgagaccaacacccaagtgcagaaggctaccaggaagctggtgcaggcctaccagcagcgttacaacctccagccctatgagaccaccgactactccaacgaggagcagagccagaggagttccagcgaggagcagcaaacgcagcgcaggaagcagaacggtgaacaggatgataccaagaccggagacctgattgtgattcagctgggcaatgccatcgaggactttgagcagtacgccaccctgaacattgagcgtctgggcgagatcattggcaaccgtctggttgagctgaccaacaccgtgaacgtgccccaagagattatccatctgattggctctggacccgctgcccacgttgccggagtggctggacgccagttcacccgtcagaccggacacaagttgcgccgcatcaccgccctggaccccactaagatctacggcaagcccgaggagaggctgaccggactggcccgtggtgatgctgacttcgttgatgccatccacacctccgcctacggcatgggtaccagccagcgattggccaacgtggacttcttccccaacggaccctcgaccggagtgcccggagccgataatgtcgttgaggccaccatgcgtgccacccgctacttcgccgagtccgtgcgtcctggaaacgagaggaacttcccctccgtggccgccagctcgtaccaggagtacaagcagaacaagggctatggcaagcgcggctacatgggcatcgctaccgatttcgatctgcagggcgattacattctgcaggtgaactcgaagagccccttcggcaggagcactcccgcccagaaacagaccggctaccaccaggtccaccagccctggcgccagtcctcctccaaccagggttcccgccgtcagtagatcatcgcacagtgatccatcgatgacaaccagatcgcacacccctcatgcgagcgaaccactccagcccatcctcatccagcagaaccctctgccagttgcatccactacgattagttagctttgtttttttaactcacaataaaaaacgtttgcatttttaaacattctaaagagttcagttcaatatcagaaaaaaaccccagttcaatttacaataaaaacaattgcttatgtcgaaatatttgagagttctaaatgctcattatataaaaatatccaaaaccaaattatgcaatgccactgaggtcataaaagaagcacacaacaaacatttggattacatgatatgtttatttgataaagaaagcatattatccattatgatatatagcgtacacacacgcacaaccacatatatagatatggcgctatatatatgggacgatgaactacggacaatatttcttgcttactactgtattggcaggcgcaaaaaaattgggttgagatatcactaagcttaaataagaataattaacgtagaatttcaacttgcttcactcatattcatcgtctcgatttcaacaacctcatcagaactaatcacaaattggaaaaatcatatacaacacggggtgcaatgggaatggatggtctttttatcgatgcgaatgggtctccagatgagatgggttaatggatttagaggcttatttagagctgtgtttttgtttttgttttttttttttgatttgtttgtctatcagtctaatcgcggcagggctgatccgagggcgaccaggtgcacatgccgccgacgccgtcgtaggttagtcccttgggacaggtgtactcccatccaacgattccaccggtctcctcgaatcgggcgcaggatataaacttcctgcagttgaggggatgcggaaaatttccctgtgcccggcactcaatgatgccatgaccatgaacgatcaccttgggatcgtttttggtcggaagaatactgccactgcgacgccgttgggcgacctgactgtgaaccaccgggaatccctcgtccagaaattgactacttgacgtggctgagattacggcagtcttggccggcggacgactgtagacctcgatgtatttgtgcggacgacgacgactctgctggcgacgggagagaggaggagccgagtgtccagccgacgtggtcgatctcaaagttgaaccggatgtggttgtagt

SEQ ID NO: 3977 - DNA, 1568 bp, DROSOPHILA
atgaatcctctgcgcaccctttgcgttatggcctgccttctggcggtcgccatgggtaatccccaatctggtaaccgttccggtcgccgatccaactccctggacaatgtggagcagcccagcaactgggtcaatccacgtgaagtcgaggagctgcccaacctgaaggaggttacccttaagaagctgcaggagatgagcctggaggagggcgctacgctgttggacaagctctaccatctgtcccagttcaaccatgtcttcaagcccgattacaccccggaacccagccagatcaggggctacattgtcggcgagcgcggccagaagatcgagttcaacctgaacactttggtggagaaggttaagcgccagcagaagttcggcgacgatgaggtcaccatcttcatccagggcctgcccgagaccaacacccaagtgcagaaggctaccaggaagctggtgcaggcctaccagcagcgttacaacctccagccctatgagaccaccgactactccaacgaggagcagagccagaggagttccagcgaggagcagcaaacgcagcgcaggaagcagaacggtgaacaggatgataccaagaccggagacctgattgtgattcagctgggcaatgccatcgaggactttgagcagtacgccaccctgaacattgagcgtctgggcgagatcattggcaaccgtctggttgagctgaccaacaccgtgaacgtgccccaagagattatccatctgattggctctggacccgctgcccacgttgccggagtggctggacgccagttcacccgtcagaccggacacaagttgcgccgcatcaccgccctggaccccactaagatctacggcaagcccgaggagaggctgaccggactggcccgtggtgatgctgacttcgttgatgccatccacacctccgcctacggcatgggtaccagccagcgattggccaacgtggacttcttccccaacggaccctcgaccggagtgcccggagccgataatgtcgttgaggccaccatgcgtgccacccgctacttcgccgagtccgtgcgtcctggaaacgagaggaacttcccctccgtggccgccagctcgtaccaggagtacaagcagaacaagggctatggcaagcgcggctacatgggcatcgctaccgatttcgatctgcagggcgattacattctgcaggtgaactcgaagagccccttcggcaggagcactcccgcccagaaacagaccggctaccaccaggtccaccagccctggcgccagtcctcctccaaccagggttcccgccgtcagtagatcatcgcacagtgatccatcgatgacaaccagatcgcacacccctcatgcgagcgaaccactccagcccatcctcatccagcagaaccctctgccagttgcatccactacgattagttagctttgtttttttaactcacaataaaaaacgtttgcatttttaaacattctaaagagttcagttcaatatcagaaaaaaaccccagttcaatttacaataaaaacaattgcttatgtcg

SEQ ID NO: 3978 - protein, 442 aa, DROSOPHILA
MNPLRTLCVMACLLAVAMGNPQSGNRSGRRSNSLDNVEQPSNWVNPREVEELPNLKEVTLKKLQEMSLEEGATLLDKLYHLSQFNHVFKPDYTPEPSQIRGYIVGERGQKIEFNLNTLVEKVKRQQKFGDDEVTIFIQGLPETNTQVQKATRKLVQAYQQRYNLQPYETTDYSNEEQSQRSSSEEQQTQRRKQNGEQDDTKTGDLIVIQLGNAIEDFEQYATLNIERLGEIIGNRLVELTNTVNVPQEIIHLIGSGPAAHVAGVAGRQFTRQTGHKLRRITALDPTKIYGKPEERLTGLARGDADFVDAIHTSAYGMGTSQRLANVDFFPNGPSTGVPGADNVVEATMRATRYFAESVRPGNERNFPSVAASSYQEYKQNKGYGKRGYMGIATDFDLQGDYILQVNSKSPFGRSTPAQKQTGYHQVHQPWRQSSSNQGSRRQ

SEQ ID NO: 3979 - DNA, 4413 bp, DROSOPHILA
acgtgcagatgacttctaagaagttggaaaatcatgtatttactcggaaagaagccagaactgaagtagcatacttattagtattatcaaatgatgagttttttcatcatagttttagttctatatttatagaaaaaaaaaactttccttgttacttttagttttttcatttgaaagactgccgttgactttttcattttattcgcgtgcatattaaatatgtgtgttaaatatacataataataaatgatcgctgtgtttatgcacttgctttgttttcactctttatttatttatatttattctttttgattaactatagattgttttaaaaaggtataaacgacgtttaaaatttttatcctggacataaaccaatgattaagcggtgttccacacccatgagtattatgtagtatttttcacagtatatacggtatataaaacggtcagccagaaaacggtctgtctaatcgttaatttctatgttaataaaatttgagtattaaaatacatcgaaagtgcagtttttttttgtccactttttcctttatttctaacttttcactaagaattccaataaattgttttatctttctctcgattccctattccttctttcgctgtccgagcattatttgttataccttattcgcgttttctctttgggtgtacgccaaatttttggcgggctcacgattccgtaagattgcagctactttatttcgctttttcctttattactcacttttgatgatgctcgattttggcgcgctttctcatttatggtgctttagttgtaagcccaactcgtggatgtggtggattttttgctttggtacaaattctttttaacagacttctcagcgataacgcatttgacaattatattttgaatcaaatgcacgttacaaacaataacatgtgtgaccaatgtaacgttatcgataacgtatcccacaagttatacaacactgctaggcagcactttccagccctggaaaaataccaagacatctaccatctctctaaaaacgaaaacatcaaagatttactacaccaaattaaaataaacttataaatctttgcaaccttaagtccgtggcaatttccattttgcatttccatatccggctggccaaataattccacgacatttacggatgtcgcggtaacctaaacacaaaaaaaataaataaatataaataaaataaaataaaatacattaaaacggatcatcagctgtcgttagaaccgaaacggactaagggcggaggaactggcactgaacctatgggccagcatgtatccggtggcgtttgtcttgctgctgctggttgcacctaatgccgacgcgaatttgggacgcgatgacgaacgattccacgaggagctagtggttcgtccattgtccggcgaccatgtcaacacctactttcagttcaccacgcgctggcactacggcgaaaaggataatcgtgagttttttcagcggccgaagtccgcatcattgcgattgcaaaaatggggcgggaatctcacccaccggcatacgaaaatacaggccattgcatgccgaaaggtgttcctacatatatgtatacatatgcgccccattgaagcatcattagaacttctggttaaccgattaaatgcttatattgtgtctaccatttgctctttcagtttaccacacccaattgacgcctcgagtaattgcggagctgttgcagcagtttgcggtaaaggagctgcacattggcctaacccagggactgtggcgctacgagacatggggctatcccattgtggaggccaccagcggtgccgagatgtgggcgtggttcagtggcgcaaatttgaccaaccgggatgtggatcgccagtggaaggagttggccaacgttttctcgggcgtgttgtgcgcctcgttgaatttcgtcgacaatacgaatagcattgcaccgaggcacttgattcgtccacaatttatgccagccaatggccaaagattcgttcgctatgccacattgccgcgtgagatcgtgtgcacggagaatctgacgccgtggaagaaactactgccatgcggtagtgcctcaggctttgcctcacttctcaactcgggacatgtacacaacaccaaataccattcgctgggcctgaaggtgcgcgtgctctgcgaggatcacgatgaggacaattgcattgtggagctgacgcagacggccaacttggtctacgatctccgtctgttcgaattgagcaacaatgatttctcgctgcgccgcctgttcggcatgggactgaatggctattgtgagctggccgagagctccaagatctatgtgcagcgcaacgagctgggcgagcgctatcagctggttccagaacccgtgcacgaagtgaagaccactcgtggtgggcatagtgtcgtctattccgtctacgatatgcacgagcagttcaaagaggccggcgaacggctgtttaatgtcgcctggctggcgccgaagagcgcaaatcgtcgtcgcaatttggcgaagccatcactgccaccggtgacggttcatcgttatctattgggacacggccaggagcgtggcaggatcgttacggaggtgacgaactcgcactacgacgccctgcccataatgctgcaggaggtgataccgtggtatgtgcacgcctatttgcacaccctttccatacgtcgcaagccgcagcgggtcaacgaatacggaggccagcgattgaccttcaagctgctccactatacgcccggcaagcagagggaactgccgtcccatttggaaattggcttcatgctgcccggccagacatcggcgctgataagcatcgatgtggattatttgctgctcaaatggttggagtatccgccggatgcgaatcacggccattacatcggctcggccattgtgtccagccaactgccgatgggcagaaactataccgctctgccgccggaggggcatctctttgagcattcgttcaatgccacacgtccgagttatgttctcagtttgcacacggaagcgctgattgtctcactgcccacgccggactttagcatgccgtacaatgtgatctgtctcgcatgcacagtggttgccctggcctttggacccatacacagtgtggccaccaagatgatcattgtcggtcgtcagacatcggcgccgaagaattttgttaagaagatcttcaatcagcttttccggcgcggcaaggccaccgatgagacagctgccgagggcgaaggattgccagcggcaggagcagcagcaactggagttgcatcggggagagcagcgatatcgccaggcagtccatcgggcgaccagccgctgctggaagatctcgacgaggaggaggaggaggagcaggactaggaggtgatacaaaaaaacagccatcgggagtcgtgataagctcccactgatagtatacccttacaattccaataaagtatattcacaaggataccaaactgggttgcaattctcgatttttaagttatttcaatttatttcgggggttttcaaaaacagtattttcagttattttgctaagaaaaatcaaagaaatcgccatgggatttctatatatattgtagatgaaatatgtataaacaatgtaagaatgagaattgcaaagtatacttttagctttttagaaagctaaccaaatttgtaacgaaataaacaaagtgaaaatgcacgttttgtttttataactttttcgattttgtttttattttgcatttcgaaaatagaaatttctaaatgctatttgataaacatatatcaaaatgtctcgatgtgaatgctgaaataatcggtatatggaatcagattatatcagatcggattagagcagcgcagaaatagccagactcttaattagagcgagaaagattctatgtgcctagtggaacttttggaaatacgtaacgatttcagtttcaatttttttttttgttttttaccttgctagcgagttgcgttaaatgttgtccaaattttttagctcttagatttagattttaactaatcttacataattttgcatatttaataaataatttagatatcaatttgaaactctctaaagtgcaagcaaataattgtaataatcgttaacagcacttacataaagtatttcattttaaatttcaattatagttaaaattaatcttgttttaggattattggcatttatatgtatctgcgttggcatagagagtgttcactgtacactgctcgtcctccgtttgctcaaaatttccaatgcattcgcctttttgtttaactttaaatttaagatttattcatgatttgcgcttgctatttatagtttttagtttaactttaaatagtaaatgtaagctta

SEQ ID NO: 3980 - DNA, 2205 bp, DROSOPHILA
gaaaaataccaagacatctaccatctctctaaaaacgaaaacatcaaagatttactacaccaaattaaaataaacttataaatctttgcaaccttaagtccgtggcaatttccattttgcatttccatatccggctggccaaataattccacgacatttacggatgtcgcggtaacctaaacacaaaaaaaataaataaatataaataaaataaaataaaatacattaaaacggatcatcagctgtcgttagaaccgaaacggactaagggcggaggaactggcactgaacctatgggccagcatgtatccggtggcgtttgtcttgctgctgctggttgcacctaatgccgacgcgaatttgggacgcgatgacgaacgattccacgaggagctagtggttcgtccattgtccggcgaccatgtcaacacctactttcagttcaccacgcgctggcactacggcgaaaaggataatctttaccacacccaattgacgcctcgagtaattgcggagctgttgcagcagtttgcggtaaaggagctgcacattggcctaacccagggactgtggcgctacgagacatggggctatcccattgtggaggccaccagcggtgccgagatgtgggcgtggttcagtggcgcaaatttgaccaaccgggatgtggatcgccagtggaaggagttggccaacgttttctcgggcgtgttgtgcgcctcgttgaatttcgtcgacaatacgaatagcattgcaccgaggcacttgattcgtccacaatttatgccagccaatggccaaagattcgttcgctatgccacattgccgcgtgagatcgtgtgcacggagaatctgacgccgtggaagaaactactgccatgcggtagtgcctcaggctttgcctcacttctcaactcgggacatgtacacaacaccaaataccattcgctgggcctgaaggtgcgcgtgctctgcgaggatcacgatgaggacaattgcattgtggagctgacgcagacggccaacttggtctacgatctccgtctgttcgaattgagcaacaatgatttctcgctgcgccgcctgttcggcatgggactgaatggctattgtgagctggccgagagctccaagatctatgtgcagcgcaacgagctgggcgagcgctatcagctggttccagaacccgtgcacgaagtgaagaccactcgtggtgggcatagtgtcgtctattccgtctacgatatgcacgagcagttcaaagaggccggcgaacggctgtttaatgtcgcctggctggcgccgaagagcgcaaatcgtcgtcgcaatttggcgaagccatcactgccaccggtgacggttcatcgttatctattgggacacggccaggagcgtggcaggatcgttacggaggtgacgaactcgcactacgacgccctgcccataatgctgcaggaggtgataccgtggtatgtgcacgcctatttgcacaccctttccatacgtcgcaagccgcagcgggtcaacgaatacggaggccagcgattgaccttcaagctgctccactatacgcccggcaagcagagggaactgccgtcccatttggaaattggcttcatgctgcccggccagacatcggcgctgataagcatcgatgtggattatttgctgctcaaatggttggagtatccgccggatgcgaatcacggccattacatcggctcggccattgtgtccagccaactgccgatgggcagaaactataccgctctgccgccggaggggcatctctttgagcattcgttcaatgccacacgtccgagttatgttctcagtttgcacacggaagcgctgattgtctcactgcccacgccggactttagcatgccgtacaatgtgatctgtctcgcatgcacagtggttgccctggcctttggacccatacacagtgtggccaccaagatgatcattgtcggtcgtcagacatcggcgccgaagaattttgttaagaagatcttcaatcagcttttccggcgcggcaaggccaccgatgagacagctgccgagggcgaaggattgccagcggcaggagcagcagcaactggagttgcatcggggagagcagcgatatcgccaggcagtccatcgggcgaccagccgctgctggaagatctcgacgaggaggaggaggaggagcaggactag

SEQ ID NO: 3981 - protein, 633 aa, DROSOPHILA
MYPVAFVLLLLVAPNADANLGRDDERFHEELVVRPLSGDHVNTYFQFTTRWHYGEKDNLYHTQLTPRVIAELLQQFAVKELHIGLTQGLWRYETWGYPIVEATSGAEMWAWFSGANLTNRDVDRQWKELANVFSGVLCASLNFVDNTNSIAPRHLIRPQFMPANGQRFVRYATLPREIVCTENLTPWKKLLPCGSASGFASLLNSGHVHNTKYHSLGLKVRVLCEDHDEDNCIVELTQTANLVYDLRLFELSNNDFSLRRLFGMGLNGYCELAESSKIYVQRNELGERYQLVPEPVHEVKTTRGGHSVVYSVYDMHEQFKEAGERLFNVAWLAPKSANRRRNLAKPSLPPVTVHRYLLGHGQERGRIVTEVTNSHYDALPIMLQEVIPWYVHAYLHTLSIRRKPQRVNEYGGQRLTFKLLHYTPGKQRELPSHLEIGFMLPGQTSALISIDVDYLLLKWLEYPPDANHGHYIGSAIVSSQLPMGRNYTALPPEGHLFEHSFNATRPSYVLSLHTEALIVSLPTPDFSMPYNVICLACTVVALAFGPIHSVATKMIIVGRQTSAPKNFVKKIFNQLFRRGKATDETAAEGEGLPAAGAAATGVASGRAAISPGSPSGDQPLLEDLDEEEEEEQD

SEQ ID NO: 3982 - DNA, 16415 bp, DROSOPHILA
ttaatagtgcctttcaagtccgtaagagttattaggctatttaaacatcttactcttacttacatcaaatggaaagtcttttagtttggtaatcacaagtagagtagactttattcacgatcgtgaacgtaggaattttgcaaatacgaagaatatggccaaaaaaccgaatagaaccagtaaaattgggtttcgctcggaactggtttgcttacatccacgtggtttggaaacaagattattaatttataatatctttatcagttaatcattgtaaaaaaagctgatgaattgaatgaagacatttaaacatgatattaggcttcatgtgaagtagataaaatttcataacggataatactgtcatttccaagataaaatggttaattgaaaaggcgatcttgccaattgaaagctatcttatcagccaattaggtcttacatttagtgtgtgtttacctggtaatcacacggcccaaaaaacttataaacgatttacggagtgttattgtgtgcacttcgtaaacttttctacacccacaaaaaaatatgagaactaaaaaaaaacgagatcggttgtgcccagcgtactcagtgtcatcaatcatactcatgagaataaatctcaatctcagagcaaagcaggatcgggtttcagattgtgaaataataaagcgaggggaaggctgaaaaaatgatagagagagagagagagcgaaaaatgagagtaaagacaattgcaaactgagagtgcttcgatctcgatctaaatttgctgagcatgattcgattttggctagattttgagatcgaaattctcaaatcgagatcgtgagaacggttatttcccagaggatatggctttggaaaagaaggtaaacaatgtttaaggaagtttttagaaggtaattttttaataataattaataaagagtgcagacaggcgcacgcacaacgcccagatccaaaacgaattaaaggctccatcactattataattttcttttaaactactagtttgctttaaatatttattttagtcgcataaacggtttacacacgcaaaacatttaaaattcaaattccactaataaatattgtttgttcttgaatttcgtttcttatgcttcacatttatgctgttaactttcacactgaatcctatcaatatgttatgtatacatatgtatatgtatatatataatcttgttgcttaaaaatttcgttcaagcttccttcagttaaatttactttgtctagttaattgctttctgggaattgccctttcttggattctgtatccactttgcaatcgatgaaatttatgttgttcaagcttattttgtataattgtacatttgtatattgtacaggctatcggagctttcagttgaggtaaacttatgcccagatcaaaatcgggtttgagatttttttttagatgagaatagactttggtatacggcttgcaacaatgggtgggttttgtggtgaattgtgtgttgttgaaagtttctggtcatgcatttatcgatctacatatgtatattttttttccatagaagttctattaaaacgctgagaaaatctaaagcggagatatagtagttaggggaaacagtatgcacattgaaagcgtgaactcagattgaaatgaaactacctccagcaccttacataaatccgtcgaaaactacgaaaacgtaatagaccatccaataatacacctagatataagacctctgatataacaggaccaacgacggaacaatgcaaaaatgacataaatgttgtgtgagattacgctaatcgtccttttttctttggtcctggccattccattcagcgataacaatcaatttgctacagttaaattctctttagctggctatcgccatgggctgagcaatgataatacttgattctaagttctagctgctttggcaaaatgttaacttagacgaccagatgcgacacgtcgctggtgtatccgggcgagtagcgaggtggcaggacactctgttggggccgtgtcttgcccagcatgggcatgggcattcccggctggttggcagccatcaccttcggactctggccaggattgcccagttcgtagggccgacggatgcgcagaacgtcggcggcgtctcctggccaggctctctccggtcccagtcgctgaccgaggcgaggataccggcgcttgtccactgccagactgatggtgcccggggcatgggtggagttcagccccacgttgtactgtcgctgcatcgccagcgaggcacgaatagtctttcgtttctggggaaagaagaaagaaattgctcttattgctttattcaagactgcgtggagtacccacctctatggtgccccgccacttgtccgccgcatgtcgggcaatgtccaggcgcttctgcttcttcacctggtgcttcttgtagatgacctcgatgatgatcaggcccacgccgccggcaatgcccacacccaccagtatgaacactcccgccatgtttttaagcccaagagtgttgggcgtcttctcgaacagctcgcagttctgctggacgtgtccgtgaaagatccactgtttgtccaatttttccatgaaaccgcctgtaagaaaagtcattaaatgccgtccaatggtatgcatatgtaactcctactttcgtggaactccaagatggccagcgtgaccgcatccgtccagggcgagcccttttgcagtccaatcccgtacccacttcgtccgaacagctctccggctgtaactagttcgcaatccttggaggcctcgtactccagccgagatgaatcccagatgaaggccataagcttgctgtggacacaatcggacgttattgttattgcttgaccggtttggatttggtggagggggttacaacatgtaggaagaaacgttcaagaaactagaaagatttgcgatcttcgaatgccgaaaattgtcttacccttgcagatgctttaaaggaatgctcctattatccaaaataaaattatacgaaattctcttttactttttctttacagagatgtgtgattatgtttacacttttaaagtttccgtgatcacgacgttcatacgacgttcatacaaagacatttagttaggtatacttcgaacagaccattaaaaataagatacgatattcatacacttaaaacaatctgcaaggacttcagacataaagatgctaagatatggtaatacaagatggtataggggcggatagtacgggggcaagaccaacacgaacacgataccgctaacgattacaaaacatatcatatcatatcatataatatctaatagatcgaaacaaagagagagagagcaagagagatagagaaagatagagacagtggcgttaagtggactgaattgaattgaaggtggcgttttggagggtgagtaatagtagtagtagtagtatagatgtagtctggttctggatctggacagtggtgcgatgacatgcgatgctacgctcatttacgaaaaggatcggcggcctgaagcaatcgttaccccttcttcacatcctggatggcctgctcggcggtggcgtagttgttcgcctccatggtgcgatacatgttggagagctccacctggcgacggaagtacatgtccacggaggagcccttgacggtggcgcaggtcaggttctccatggtgttccgcaagcgggcgtcgttgatgccgctcaacttggtcttgggccgctccagcacgaggaaggcggccaggttggcggtgtacgaggcaacgatgatcatagcaaatccggcccagaccatgcccagcacccgggcggagaagctccggggcgtgccctcgccgatcccgctgttcagcaggactccccaggcgaaccacaccgcggagctgagattgagggccttctcctcgttgctgtccgagtgcgagagcttgaagcgtccgaacggcgagaatctgagttcggaaatttggaattgaaacgtgtggttaataggatccggatctgcaggccactccaggcggggattagctggtcggggtgccattcaaccgtccaatgcagcagccctctgcttcgctacacttttgcttgggtgggtttttgtggtatggtgggggtatgggatgggatggggtggtagccccaggattcactcacctgtccagcaggtagagcacgagcgccacaacatggaccgacaccattaccaagatccatagcgtgttactaaacggctgcaagaaagacacgagagtactcgatcgtgacggtttcttctcgagtattgtaatgccttggtatttgaatggcttcgagaattcaatgtactcggcacgctccggattgatggttagtggtgccacgatcatgctaaatggaagtccggattagtaggtagtaggaggagtcgcatgctggcggatcccgcatcgcttactcggcacgttcgttgaccagctccccgatgaggcccgtccactccttgcgcaacgtcatcgctcccgtgttgttccgaaggatgtagtgcccaaactgaccatccggcgagagggccaggtcgtaggtgaagttgatccgtttggacagttcgatcagcaggtcgatgcagtagccgcggcagcagaactcgttggctgtcgccggaaggggtacatttacataagttaactatgatatttaataaataaattatttaatggagttggaacaccaacccgtggcatccgagttgttgaacagcggacacggacgctcatccggctcacagcggaactcatcgtcgcccatgcgccgcacgtagacgaagggcttctcctcgatggtgagcagcctcaggtgggtgggaatcatgatgccctcgggcttgcggcgctgctttcccggccaaatgatctcgctgtcgttgatcctcatccgcattttggcccgcatctgttcaataggtcattttaaaggattatgttttgatagcttgggaaatagaaaggaagtaacctacgctgtcgtagctgaactttccaaccacgtgcttcttctgctgctcccgaatgttgatcacatcgtagccggcgtagattcggtcaccattgtcatcgaaggccacctgacccgtttcgccggtgatattacggcttttgaggtactgaaacagtcgcttgcctgtcgaatgtttaggggatgacaataactttaaaacactatgatcacttaagagttactcacccgattcccagttaacggccgaatcgccgcaatccttgggagcctcggcaatggtctcgttggaaatcatctccttgatggccgacgccaaaacataaacgctgtcctgtttgttaccaagttaccaaatatatacttaggatctcgggagcaaaagaacttagcacttaccctgatgtgccccttgtcactatgggcgtgctccagctggagacccagtactccgtccggagtgttgttggagaacagcgcctgctccgttacaatccacacgtgaccctcaccggtcatgttgtactccccggcatcgcggaagattacttgagcgtcttccgtgctgcgggtgaatataaggtacacaaaacgccagaataacaattataatgtcgaaatttcaggtttataagctagacgaaattaaaatctacggacttttaaaggagctgtaaaactggaagcaagaaacatctattttctcaacagtctcatatttcatagatcttcctaggaagctatgcttagcaagataaaccatcacacatatgtaaaataatattaataatacacatatgtaaatggatagaacatcgttccctcaattcgatgaaaagcagaaacgaccagttgattagtccaaggcacgcccatgctggaactcaatctcagtaatcttctgtacgccgcttttccattgacaccaatttatggagcacatcataaaatcattttattctgaattgacaacaattgactgacgggcttgtgaattaaaattaaccagtcatccaaagtaagaaatgcatcaagaagctgcaatagtttactgccaggccttacatataattgcacagcaaatattcaaatattaatatttttattgatttaattaataatcttttcttggtaaagcaaaattatcttaggtgaaagtcaccaaatccaacgaggtgatatttgattatttaatctagtgacgatagcagtaagtacgaccacattacctacgcaaatctgaggaactcacctcgcgtacatgaggtagaccctggactgggcggtcttcatgtcgatgaggtgctcggtgaagctctccagcttgggctcgaactcgacaatcagctccacggtggcgcgcacatccacgtcgtcgtagtaagtctgcgatgtcgtctggaagcgacccaggatggcccggccatccgtgtcggagctgtggatgatgattacctgtcgccagcggagcatataacggaacaactcaataagtcaataagtcaaatttgagagcagcatttcggggggcagaagccagagcatctatggatgggtgaccctggaacgtaccttcgtgtaggcaaagtggctgagcatctccagccagacatccgcctggtggtagtacggcggcaccgtccgcaggaaggagacgtggatgttcttgtcggagaaggccgcgtcccgcgaggagatgccaatgacgggaattgaatagaatccgcttgtataactcacggccgccggcgacaaatcacctgaggtttgctcatgcgaaacgactacggcgtacacctgcggatggaaaaggaaaagggtgccggggatcgggagacgggagacgggggatcaggtaacggagaaccaaatcaatggaaataagcaatgatggaaggatgccaagagggaggtctcctggcgatgggtggattcgaatcggaagtgtaaatggcgccgagagggcgttcaaatggcgaagcgaaataagatacgtttcgaattcataaggctgagaatactaatggcaaaaataatgaaggcgtagattgagctacagcatcataagatacttctggactttatacaaatttattttatatgaaaactcatttacaagccctacattttcgaaacgcacctttcagatcctccattcaatggagttaatggcagttgatttgtttcctttgggtaatgaaaggttggcaatggacgcgcattttgggacctgacatgataaattcacccctacattaatgatgacaaacgatgacgccccgaaacaggcatctcattgatttggaccaggtccaatgggcgtgggcttctgcttgggatggcatcccacagcgacagagacgctcatgataaatgtggcataatatgggaaatgtgatggatggaaagcaaagataatcaaaatggcaagccaacaagtttgccggcaaaaagagtttcagctttaagtgacgaagtctcacactgaaaggtgcattgcactttaagtgccgaagtgctcttcgtcattaggattttatggacacctttttgtgcataacagcgataatttattgcacaagaatccagttttgtgatttccttcattgtacatgagtacagtgcgatgaaatcacttatttcatttgaatggttctttacatttgtacccagtttgtaatattatatatttttatttagaataagtgacaaataagtaccgataatactttaatgttgccaaatagtagacaatattgtaaatcacttagctcaactaaagaccatcaataattaaaaagataattatgattataaatcttagctttctaataaccaaacccctacaaactccttctatatatcattctgcaaacctggttcataacaacaaaacgcatttaaagtaatattgtataattatagttcaatttgcacatttaagcactctttcgctctaagagctccagttggttagctcatggatattggattctgctggcgcattaccgcttgtcatcatcccatttccgaatcatttccccttaaattatggaaatgaatcgaaccaggtcgggttaaacacagatacgagtatgtgagcagcttcaagcgatggaggaatggtcggaaatgagcaggtaattgcatttggccaccgacttacccgattctcgatgagcttgtcgcacacattgaagaccgtcttgatgggattcttgtccatgcggatggttttgtcgtagtaggtgaccttccgcggcacatactgctgatcgaagttgaggtgctgcggttggatgggaaagcgtgattatcgcattcggattagtggagcatccagttagtcaatgggcttgcctttattgtggtgctaaagtgctcctcgctgtcggaattgctcagtacgccgccaatgttgtacgtcgagggattatccgaggcagtgtgcctctgggcggcatcaattggcgccaccaggagaacaatggcgagcccaaacaatggccggcaaaaaacaaactcagccatagccatgatgcggaagtctatagtttctgggggaggataaacgaggtgttttgtgcaacgatttcaatggtttctcgagcaaacatccagcattttctgcaagtcgaaaaggggagatgccgcatattaatggcattttccatttcccattgcagcaatgagaatggtcaaagacaagatttcttaaagtttattttgctcatttttgaaaaagcagaactttgaattcgcggtgttttcttacatatgtggtaatgccagatcgcgaaaaaatgaataccaacgcaagatcgttagagtgaccatttcattgtgttaataggcattagaagcaaaatctaagtatgtgagtcgatgagtggaaagattttaatcctcggccaatctatcaacattgatctggaattttcaagcacagatgactaaaaaactatgaatatttgaataagattcaaatctctaccctgtgctgccatgctaactagtatttagagtatgttagtattttatccatgcgctcccatctaatttatcatatggttggttctgcggttttcaaacacttgcttatgtcattccttgtcaatagtaaatgcaattaacgtgttactgtcaataattctatatatgtgtgcataaaacagttaagatgtcaattacaccatttattaacggctaactagtatttttcgcgcggtcacactaatcgatcatatggttcgacggtttttaaacacttgttgctcgaccgcgctttcagtcggacgtgttttcgctggggttttccgcgtcggtccgccttatctgcgctgcgctggcacttcgttggagtgagggagacggaggagctgagcggtacggtacacgaagtcgcgcatgacgcggcgctctggaaaattgcattttcatacgccttgagcgcgtaatttatgcccgaaatgctggccaatttcaatttgttggcctaaacgcgacgtgcgtgtgtgggtgtgtgtgcgtgattgggaaaagtgcgtagaaatcgacaatcgttttgtttgcccgcgctgctgctgcgctgcgactgcgctgcttgtgggtggtcaacgggatcgtggggtcgggagagccgattgttgacgttgtatcgcatgctgcctctctttcccgcagccggaattgtttgtcgcgtgttttaacggttatttcttattgacaaaacctcctctgccgacgtcgctgccccggcattgttattgttattgtgtgtggtttctgggccttcttcttcctcctcaccgtattcccacttattgttattctctcttttccgcggctaagtgcggcccactcaaggtgaaaatatattaagttctttcgagtgcccgcgagtgtttgcatttgaataaaataaatataaagtcaaattcgatttacgatcgtcgtctatcgacggatgattcaataccaatcacaatacagtagcacatctctacaagggatattttacattacatacattctacggtgagtatcccacgacaacgacaacgacaacctgttgccaatcgagcccagttactggtttttctggtttcccgaagggcttgccaccaatttaagtaggtcataaggcaataagcctatcacgaccgaaccgataggctaattaccgcgatagctattatctagcagtcacgccctcgccttttgatcccacttgattttgatttcgttcttgcctcttgctttcgctcaataattgacaataagccaaagcgaaagggccagaaatgcgctgagattcaattacgttgcagtggccactatttgttgcttacacgaatagaaaagctaaggaaaaaacatataaatcccactgattgaagacatttgcttatcgggggtatggttctatgccagctactcaaacaaaatataaataaatccttagggaatcaactccgaagtcaagtgttgatttcaactcaagccactatgtatatgaacgtgatgctttccaaaattgttttgtggtgagagggattgtttgttgttatacaaaaattcttcaaatgggagtgtttaagaattataatgacgaagtaacatagtcataattaaaactcgtatttactcgtagagtgaaagggtataccggatacatatattattgatcagatcgagatttcgggatctataaaatctagatgtgcaagtttaattcacaacgtccgcgcccactctaacgcccacaaaccgttcaaaacagtcacgcccacagtttcgagaaaagtttggatttttttaatcctaatatttctttgtcagttcctaaagttatgcaaatcacttttggaaatttctcacttgacgtcctctgaactgaatgcatctgcgttcgagaaaatcaacttagcgccgatattttctctcagtgcacacatcttgattgcagacagcggaaaagagagagagagcgaaagggagagagagaaagagagatgctgactgggcgacgcgtgcttaattaagcgccacattgttgttggtgttgactgggcaggtggcgagctatagagtaagaggcaagatgagggataccaaaaaagatgggggagggggatgaaaagtggacgtgttgagcctgctgcacgcgatgatttccattacctggggtaaaaaaatggcttttcatcgccaaattcctctctggccaagtttttttgttgcgattgaaagagcgcacttcactacttcttgatttgcatgtaatcatgattgggttaatgggcctatgatcacacaattacgatcaattatattcacattataatgtcgaacaaattactaaattatacaatcaatgggaccaatagatagtatgtgcagtgagtttcatttattgaagataaccagtcaattgagatgtcatttgcgggtactttgatcaaccggctagaaaatgtacatatatattctaatttttaaacgctagttcggtatagtattaaaatttttttgattattatgtttttgtgcaattatatatgtatatttaaaaaaaaaagttggaacttgacaactattttctctttaaccacgattcagatgtcatcaattttaatataaagagttaaaaaattcacaatttgtttttgttattctctcagaatccctcaactgtagttgataattctccaaaagttgtcgtataattgcatttgacatactgataacgtttgtgcatgatttttaatcaataaattttaccaaccagccaaatttgttcagttttgccacttgtcaccatttaaacaaactgaccacaaagatattacattaaataaataaaacacattgaagattctcaggtatgcttatttttttgaccacaatcgtgtgtttgctccaatttatgtgggcttgccatgagcatgtgcataattcgaagctgaattgagcagctggtggggattttgtggaagggggggcggtaaagtggccggggttggcgcctgggagcgccagcaattaacataaacaggcaaattgtgtaagcgacattctggagctgcaaataaaatataagcgcccgccccccgcccatccgatgtgcacagcccacttggctgcaattattaagggtgtgtgtgtgtttgttcggatgcggaggtcgggtgttatcaatgaagcagactggatgagaagcaaagtgttctcatcagcgccagtctggtgtgattgtgtgagtatctgtgtgcttcacgttttttctgctcaggtgggccgaggtctcttggcttttcaattgctttgagccaccagacagggcccagacttttaatgaatggccaaattgttgaaaggcgcgctcagcacatgtgccctgcattactcattactcatgttaaatggttcttaaaggattctcacttcactctcacttcgccgtccgtctgatctcatattctattaatccccataaatatttgatcaacccccacagtttcaaagctcccagcatccagatggacgaacagcgcaccgaatttccccaaggaaagctgttactctcactcactctgttttgttaagggcagcaaaattcccaaatgaaacgtatcgaacaaacattcaatatatactatcaactatactatgtacatataaaaaacgtggtatatatgtcatcagacatgggttatactttcgacaagttttcttatgaatttcacacttcgatttgctcgccattcgaattttcgcatgtccattaatacgccagttaatgaactttgagttgaggggttagggtattcgcgatttgacgtctctatgggaaagcagtataaattctacataaatagtataatgcaagattacttctataaatcaacgaataaaattgggagtaacaagccacttgaaatcgtgccgaactaatgtaaatagaaaatatttagcataatataagcacgcaagatatttcaattctttcaattgaaagggcattccaacgtcggcagagcccttggagaatttccctcgtgagtttttgttcaactatttaacatagcgaacgtgccggccatggcattttattcaattttcgtgttagtgcagcgtatgcggggattgcagattgcgggctccattgaatgtggcgctggtgcatggagctgatgatagaggagcgaaggagggctatggagcagtgggtggaaccgcgggcggtggcttcgccggcttcagcgtaattcgaactgacaggctgacaacaatgagagcatcatgctcaacggcggctcgcatttgatgatgcctcgctgaaatatttgcagtggttttcgaatctgggatccagccgcacaggcacacaggtagcgattccaagcagcaatagttgccaatgaacaaccaatgcaaccgcaagaggggttcagattgtttgactccgccgtaaagcggttagagctcaattggggcaatatcaggtcgccgggcggatgtccggtaatttctcccgctggccaattcaagataatttaatatggcctccgtagacgggaattgttttatgtgcgatccggaaagcaggctagcaggcaggcagaggactctccaaggactcgaccgcagacaaaagctttgacaaaaggacccgaaactttgaaccaaactctgtcgcccttcaaccgactcgttccctcgcactcacgccctgttgctgtgacctttatcccttttgctcctgcccatgccaatcccgtcctgccactttccccattcactgttcattgttgtccagccgtgtgtgtgcggctcagccgggaaagcattctaagccaataaccaagtcgacgatgtccctcctccgcctgactcgcagctccgacattcgtggtgctttgtgggcgattcccattttccattttatattttgtgtacattgccgcatctctccgtaggcaattttcgggggcatttttcacacacgaattgcgaaacagatgtacgtattccgccttgctccactggatcccaatccgtcggctagatgacagtccggacatgaggcgaggtgggagcatggcgggtttgggccattctgtgcatgatttcaagcattgcacattgatgtggctcactgccccgaagtttcccattcggtttattgttgcttaagtgcctaatgcccaaaaattcgatgggcttgaaaaactatttagatttaggtaggtcaaacaaaggaaaggattcgagaattatttttgtttgctcaacggaatattcgtatcctctgaggattagatgtatatcctgtatatccattgtactgattatatatgtacctgtgtttagcatacatatgtatatcgtatgtcttatactagataatcctatggtaaccaattaccatattaaatattaattaggagacacttgcacacgtgtatttataactcatccactaattgacctacacggaaaatagtatatttaaaatgagtacaaagtcaatccttaggcagaatatcttgagaaatcttcaataaaaaactgaacaagtccagggaaagtgttgcctccggctcagccatagtcgtaatcgagaatgggatccctctccgtggtggtcacattgatgtcctctataaggcggagctgcatcttatccacgaggggtgcaaaggcaaacacactgaggatgaaaatgaggaagcccgcgatgatgagcaggacgcaaacgacgacggaacacactatacactgggctgtctggacggaatccatgacaaaatggattggcgcgaccacgcctcaattgacgaacgccacactgaaaactatttggggtcacttgcggactcgggcatgccctgaaactcattgctttacttcaccaccgtggatgtcctttccgcatatccatttcttcagtccttgccttcgtcgagatttcggggcatttaatcaagttattggtgggtggttatcgcgagttaagttatgcaaacactttgtgtgccactccttcgggatgctttgctttctctattctttttgcgcgcacatacactctcacagacccactcgcacacacacacacagagagggaacttttatcacacgcacacggtacgaacttttatccctttgtttccctgttttcactgacaatttttggttgttttaaactgtgtcgaactagcggtatttccgtaatatctgttaattttgattcactgacaattttcgctcagaatgagctttccgtatcggatttcactggcatcacatctcgcatacgcaccgtggcaccaggcagcaggcagctagagctgtattgcctacttttcgacgcccgctcaacgcgacgcctggcttttccgcttttccttccttgcttttccggggctgtgaaggacaacgtggcgctttgcgcgttgctcgtctactaaaaaaatcgtctgggctcctccgaaaattccttaacttttgtgctttaagctccccgaaggagctttccaagctggaccaaagctgagccacgcctgcgctgtgacatgtaaacaacttctgcccggagagcggccctctctctttgcctctcagctgtttggcgtcgcccgcgatttcggtcagctgactgccgccgcacgcagcgcggccgctgcgctgctgccgcgatgccagcgccgacattgacgtctgcgtctgtttgcatgccaaccacttgtggctgtctgccgcgttgttttcgcatttcccacgcatgtgactgagcccaaagcttttcctatggcttgaccgccgaacgctggtttacgcaccggttagtccgataactgatggctttcagagccgtttgcaatcgtctgactaacttaaatcgcccaaattgacaggccgatatcgagcgatccgcgtaagaccataaatgtgactacgaaagtgagctaggtcagtccatgctatatgctgacaatgaaattataatggtaaattggaaaaaagaaacctgtgtgtgtttacatataaagtgatgcaagtggagcattcttacaaatgcaagacatttataatgcgatgatatacataattacttaagacgcatattcatgtttttcattcttcaaaaaacattttattttttacacaaacttccaagagcaagtgtaaacatttaattaaattttacattgcctttttaaacaggaaatatgacatttcgaaattcagagaaaaatttgaaaacaaaacataaacacatacatacacaaaacttagatagatagacatcattaataggcttacaactaaacatttaaaagctaggaaaatgttggttataaatactgctgcatgaac

SEQ ID NO: 3983 - DNA, 4008 bp, DROSOPHILA
tgagcgggcgtcgaaaagtaggcaatacagctctagctgcctgctgcctggtgccacgatggctatggctgagtttgttttttgccggccattgtttgggctcgccattgttctcctggtggcgccaattgatgccgcccagaggcacactgcctcggataatccctcgacgtacaacattggcggcgtactgagcaattccgacagcgaggagcactttagcaccacaataaagcacctcaacttcgatcagcagtatgtgccgcggaaggtcacctactacgacaaaaccatccgcatggacaagaatcccatcaagacggtcttcaatgtgtgcgacaagctcatcgagaatcgggtgtacgccgtagtcgtttcgcatgagcaaacctcaggtgatttgtcgccggcggccgtgagttatacaagcggattctattcaattcccgtcattggcatctcctcgcgggacgcggccttctccgacaagaacatccacgtctccttcctgcggacggtgccgccgtactaccaccaggcggatgtctggctggagatgctcagccactttgcctacacgaaggtaatcatcatccacagctccgacacggatggccgggccatcctgggtcgcttccagacgacatcgcagacttactacgacgacgtggatgtgcgcgccaccgtggagctgattgtcgagttcgagcccaagctggagagcttcaccgagcacctcatcgacatgaagaccgcccagtccagggtctacctcatgtacgcgagcacggaagacgctcaagtaatcttccgcgatgccggggagtacaacatgaccggtgagggtcacgtgtggattgtaacggagcaggcgctgttctccaacaacactccggacggagtactgggtctccagctggagcacgcccatagtgacaaggggcacatcagggacagcgtttatgttttggcgtcggccatcaaggagatgatttccaacgagaccattgccgaggctcccaaggattgcggcgattcggccgttaactgggaatcgggcaagcgactgtttcagtacctcaaaagccgtaatatcaccggcgaaacgggtcaggtggccttcgatgacaatggtgaccgaatctacgccggctacgatgtgatcaacattcgggagcagcagaagaagcacgtggttggaaagttcagctacgacagcatgcgggccaaaatgcggatgaggatcaacgacagcgagatcatttggccgggaaagcagcgccgcaagcccgagggcatcatgattcccacccacctgaggctgctcaccatcgaggagaagcccttcgtctacgtgcggcgcatgggcgacgatgagttccgctgtgagccggatgagcgtccgtgtccgctgttcaacaactcggatgccacggccaacgagttctgctgccgcggctactgcatcgacctgctgatcgaactgtccaaacggatcaacttcacctacgacctggccctctcgccggatggtcagtttgggcactacatccttcggaacaacacgggagcgatgacgttgcgcaaggagtggacgggcctcatcggggagctggtcaacgaacgtgccgacatgatcgtggcaccactaaccatcaatccggagcgtgccgagtacattgaattctcgaagccattcaaataccaaggcattacaatactcgagaagaaaccgtcacgatcgagtactctcgtgtctttcttgcagccgtttagtaacacgctatggatcttggtaatggtgtcggtccatgttgtggcgctcgtgctctacctgctggacagattctcgccgttcggacgcttcaagctctcgcactcggacagcaacgaggagaaggccctcaatctcagctccgcggtgtggttcgcctggggagtcctgctgaacagcgggatcggcgagggcacgccccggagcttctccgcccgggtgctgggcatggtctgggccggatttgctatgatcatcgttgcctcgtacaccgccaacctggccgccttcctcgtgctggagcggcccaagaccaagttgagcggcatcaacgacgcccgcttgcggaacaccatggagaacctgacctgcgccaccgtcaagggctcctccgtggacatgtacttccgtcgccaggtggagctctccaacatgtatcgcaccatggaggcgaacaactacgccaccgccgagcaggccatccaggatgtgaagaagggcaagcttatggccttcatctgggattcatctcggctggagtacgaggcctccaaggattgcgaactagttacagccggagagctgttcggacgaagtgggtacgggattggactgcaaaagggctcgccctggacggatgcggtcacgctggccatcttggagttccacgaaagcggtttcatggaaaaattggacaaacagtggatctttcacggacacgtccagcagaactgcgagctgttcgagaagacgcccaacactcttgggcttaaaaacatggcgggagtgttcatactggtgggtgtgggcattgccggcggcgtgggcctgatcatcatcgaggtcatctacaagaagcaccaggtgaagaagcagaagcgcctggacattgcccgacatgcggcggacaagtggcggggcaccatagagaaacgaaagactattcgtgcctcgctggcgatgcagcgacagtacaacgtggggctgaactccacccatgccccgggcaccatcagtctggcagtggacaagcgccggtatcctcgcctcggtcagcgactgggaccggagagagcctggccaggagacgccgccgacgttctgcgcatccgtcggccctacgaactgggcaatcctggccagagtccgaaggtgatggctgccaaccagccgggaatgcccatgcccatgctgggcaagacacggccccaacagagtgtcctgccacctcgctactcgcccggatacaccagcgacgtgtcgcatctggtcgtctaagttaacattttgccaaagcagctagaacttagaatcaagtattatcattgctcagcccatggcgatagccagctaaagagaatttaactgtagcaaattgattgttatcgctgaatggaatggccaggaccaaagaaaaaaggacgattagcgtaatctcacacaacatttatgtcatttttgcattgttccgtcgttggtcctgttatatcagaggtcttatatctaggtgtattattggatggtctattacgttttcgtagttttcgacggatttatgtaaggtgctggaggtagtttcatttcaatctgagttcacgctttcaatgtgcatactgtttcccctaactactatatctccgctttagattttctcagcgttttaatagaacttctatggaaaaaaaatatacatatgtagatcgataaatgcatgaccagaaactttcaacaacacacaattcaccacaaaacccacccattgttgcaagccgtataccaaagtctattctcatctaaaaaaaaatctcaaacccgattttgatctgggcataagtttacctcaactgaaagctccgatagcctgtacaatatacaaatgtacaattatacaaaataagcttgaacaacataaatttcatcgattgcaaagtggatacagaatccaagaaagggcaattcccagaaagcaattaactagacaaagtaaatttaactgaaggaagcttgaacgaaatttttaagcaacaagattatatatatacatatacatatgtatacataacatattgataggattcagtgtgaaagttaacagcataaatgtgaagcataagaaacgaaattcaagaacaaacaatatttattagtggaatttgaattttaaatgttttgcgtgtgtaaaccgtttatgcgactaaaataaatatttaaagcaaactagtagtttaaaagaa

SEQ ID NO: 3984 - protein, 997 aa, DROSOPHILA
MAMAEFVFCRPLFGLAIVLLVAPIDAAQRHTASDNPSTYNIGGVLSNSDSEEHFSTTIKHLNFDQQYVPRKVTYYDKTIRMDKNPIKTVFNVCDKLIENRVYAVVVSHEQTSGDLSPAAVSYTSGFYSIPVIGISSRDAAFSDKNIHVSFLRTVPPYYHQADVWLEMLSHFAYTKVIIIHSSDTDGRAILGRFQTTSQTYYDDVDVRATVELIVEFEPKLESFTEHLIDMKTAQSRVYLMYASTEDAQVIFRDAGEYNMTGEGHVWIVTEQALFSNNTPDGVLGLQLEHAHSDKGHIRDSVYVLASAIKEMISNETIAEAPKDCGDSAVNWESGKRLFQYLKSRNITGETGQVAFDDNGDRIYAGYDVINIREQQKKHVVGKFSYDSMRAKMRMRINDSEIIWPGKQRRKPEGIMIPTHLRLLTIEEKPFVYVRRMGDDEFRCEPDERPCPLFNNSDATANEFCCRGYCIDLLIELSKRINFTYDLALSPDGQFGHYILRNNTGAMTLRKEWTGLIGELVNERADMIVAPLTINPERAEYIEFSKPFKYQGITILEKKPSRSSTLVSFLQPFSNTLWILVMVSVHVVALVLYLLDRFSPFGRFKLSHSDSNEEKALNLSSAVWFAWGVLLNSGIGEGTPRSFSARVLGMVWAGFAMIIVASYTANLAAFLVLERPKTKLSGINDARLRNTMENLTCATVKGSSVDMYFRRQVELSNMYRTMEANNYATAEQAIQDVKKGKLMAFIWDSSRLEYEASKDCELVTAGELFGRSGYGIGLQKGSPWTDAVTLAILEFHESGFMEKLDKQWIFHGHVQQNCELFEKTPNTLGLKNMAGVFILVGVGIAGGVGLIIIEVIYKKHQVKKQKRLDIARHAADKWRGTIEKRKTIRASLAMQRQYNVGLNSTHAPGTISLAVDKRRYPRLGQRLGPERAWPGDAADVLRIRRPYELGNPGQSPKVMAANQPGMPMPMLGKTRPQQSVLPPRYSPGYTSDVSHLVV

SEQ ID NO: 3985 - DNA, 18352 bp, DROSOPHILA
gcaaaactaattgtaaatcgcaatagataacgttaggtggctgtgtttaacgatttaatccgcttgtgttaccattaataagtccagtgtcgtggcatcggaattgggtcgccgaatgtttcttatccggcagttataaatcatcgtgttcatgagtagtaagaaatctagtccaacacgtggcgaatcatgatcaatgtcctttcctggcttagattcctcggattcgggcgaggaatcaagccttgtgcactgttgctgtaacaatgtgtatgcgctttggggggactgtacttttacagtctagtgtcgtgacatttgcagctggatgatcctccggaattgggccgccgtctggtgctcatccggcagttatggagcatcgtgttcatgagttgtgagtattattgtcgaatcattatcaaagtcgtttcctggtttggattcctcggatttggttgaggaaccaagccatgtgccgacatttcgtcggcaatgtagctgtaacgatgtgtacgcgctttgaggtgactgtacttttagtgtatttccttcatactcactttttttaagtgtaaaaattttgctacatttttgtaacttgagaaaatgcgactagcttgtagcccgactcgaaggcaaatgaaatttctctagcctgaacgacgaaatacaacttttgttcaaaaaagaaaaatgacagttaatttctcggccaactagatgtagtttttcatattacgggttatttcttgttaaattcatctagtcacctttgaaaatggattttacatttaggtatacagtacccaaacacaattttatttggcatgactgcgaaaaggagacgccagtcacaatgtaagaacattcaatatgatccattgagaatgtgagaagttatcctttatttagatgtatttattgcaatagaaatgatttaattgtaggaattttaagcttcttaatacagattgcggctgaagaagaaatcaagcggttaagaaccgcccaacaggtgtctgggtatctgatggtcggagtagacaccggcaaagcggatcacccaaccgataccatcgtagttgacggtcttgtgaaagcggacgagcacctggctgcgccggctcttgtagtactttgggttatcctcgccacagaagcgtctcatttcgcgctcctcaccggttgcgtcctgttccaggatttgcaggtagtccgtgtgacaggtggtcttcgagcccagattgaagactaaacaaagaatggttaattattaaatgccatcgttgtacaattgctttcaactcaccttcaaatgtaaggaacacaacattgttgctcggcacgcggacaatccactgacactctgagttattgcgcacattgttcggatagaagggatttgagaatatgccctcggtattgtagaattgaccaccgcaaccaggacccttctccaccggactggccaaataggtgagatccagcgaggtcaagtacgagccagtcttcatctgtagccgcagttcattcgcattgctgaacaggctcttgcccatgtccacaaaggagcagacgcgctgcagcgatcgattcgtcctgtcgaacacctccaaattctccatttcgcagtcgtaggtgccgaatatcaattcggtgtagtacaaacttaaggtgtaatttggtggcgcccgaataatgatgttacaatcggccgactgtgataaatgcactctgccctgcagtccatcgtagtggcgctctcggttggagttcagagcgacctgtaactgaaatccaccatgctgctccaatccctttgaccggaacttcagatacacctcgctggaccggccataatagatgtccggcttcacattgccgcagtacacatgctccgtggcaaagccgaaaccgttcttactggaggtctggccattgaataccaggtcggtgcccaatccctgctccaacagcggtgcatcctagataggagaaaagttgagattaattaaattaaagatacaaatttaaaaaaaacatttttcaattcacctcactattgtagattttcaaatagtcatccacgcagctaccattttgattcggtccgtggagatcaaagttgacgaactgcaccctcagcagggaatcgcccttaattttccagaagcacgacactccattgggataattgccacctggcgtccttgccggagaattaatggtgacctccttggtgccatccgcactcaacgtaatctctgaactgccgcatagtcggggaatagcattgatggtcacctggaaacccgtatccgtcaccttattatcggtgacaaagcgcatatagagcgtatgcctggttgttctcaaggtgggcggttgattctggccacaaaaacgtccgataatgtcggcaaaggttccgccaccatcgcgcaactccacataatcactgcggcatccgtccgtgtcttggacatggaaattactgaactccacgcttatctgctgatcaggattcacccggaatactatttgacagtccaaatcgttttgataaccgccagcgttgttaaatttgctatagacataacgcgacgatccgttcagcgagatcttctcatcgcaatttggcattacgcgcaccaaggcacggaatcccctcgatggatcccgatcatccgagaagctgtgtatgatgccccgctcttggggaatactgatcagtggcagatcctcgttaatgcgaccgcagaagcgtccccatcggtatcgctcgtccgggatgggtccggagaatacctcgacgccatcgtaggcacaattgctattcgcctcaaagtcaatgaataggaacttaatgttgaacttgtaaccagccggggcggttagattccaatagcaatcactgccaggtggcagggtgttatccgtatgctgtacgggtgattccaccattgatgttcgcgagataattccaccgcaaaggcggctggtatagagtaatgtgaatccgcgaccggaataactgccatccgttcggagcagtagattaacatattccttgccccgatactcgtggttatgctttacgccgcagagagtggtctgttgcggatccttgcccttgtcctttgtggtcaccgtgagattgtcgtagaggcaaacggatatgggtccctgttccagatcgaaattgacaaagctgaccaggacaccgcccatcgatggactcctgggcactatcgtccaattacattgcaagtacttttcatagccattcggaaagcccggactggccagctcctgttccgtgctgtcggcgtacagcaggccaccgcaattcctttcgaatttggccaaaaaaccatcggccaccacatcgccatcggatcggaagattagccggagatacggtgaagttgtgtttatcatctccggcgcaacacgaccgcaaatcctctgcaggtcggtccaattgccagtggtctcgttgcgctgctggacgagcaggtaatcctttgtgcaaccggggctatcctcgatataaaagcgtccttggaatgttagaccgatgtggtagcccattgtcgcctcgacctcccagatgcactccacattgttcttgtattgctcggcaaagtcgatggctctatagggatataccaacttgccaccgcatccagatccatacttgatggacacattgaaggtggcattggctgagaaactatcggagtgatattccaggaagagacctcgctccaccaccatgttcacagctgtggcctgattgcaaaacagtcccaacgatggtgagttctgatcgggtccattgtatacctaattcaaaatcaatgcattgtatatcatatcatatattgtgtccaaaaaagataccataccttaagatagtgatgcaggcatggggcttccggagattgtgcggacgggctcggtgctggcaggttgacgttatataccgacacctccagctgaatgtcctgcggcaccaggacctcgtcctcgccactggcatccgtatagggtccaatggcccaggcacagtcaatggcgcccgccgccgacaccattcccgatggctggtgcaccgtcatattatcacccggttccaggataatgactccgccgcacgactgtgtgctatagctcaggacgagattggtcattgcgttgcgggcggatgccgagacgaccagttgaatggggaaaggcaaccggatggagggcaggggcttgccaggagcgggtgactggtaatcgcagagaatgcgctccatgagctcctcctcctgctccaagcggttaaacttaagcggcgagagcaatgcgcacatatgtgtattccacatcattacggacgtggtgttgtactctttcacctgaaaaaggagcaaaattcatttgttcatccctaaaatgaacagttcatttgcgatgaataacctacccgaatcaggagggtactattggacggtggaacgactttatagctgcagtgaagcggacggctgatattgaaccgctggaactgaatatctgcgacctcattcatcattaccgtgaatcccggacagctactggagccataggcactgaaccgcagcttgattccatgattctgaacaatgggcagtaggaaggcatcgatgcccattgtattgtccgaggaaagcacctccgcaggaggatcgacgttgtagcgacccaggatggattgcattttgaaatcgttggccacggtaaggcggccacggaatccaagccttcctctgagatccatattcgtgccggtgttaaagtcgagaatctccagacgcacccttctgcccttgggcacttgcacctgccacttgcagtgcatgggatggggtacgcctaagggataaccgggtgtttggagaactcccacggatgcgtagatggtctcgccgcatcgtgagcccagcgaggtgtactttaaacggaagccctgattctccgccggaatgccatccaggaagcgatatcggaacacgatcttgttcgtctcacttatcaggtgcttggcttccataccgcagagcattagggtgtccacgatcttctcctcaccgtccaatccaaaggcatccatctcttcgagcatcaagtgatttcgctgcgagcagctaccattccgcaacgtgggtatctgcagatattcgctagtcagatcgatggtgctgcccttctccagttcgatggtgtaaacgcattcctgcagctgcttgccttcctcgtgaatcaacaggaggtccctcgacggcgaggctatcacgccctcgggactatggaaggagcctccgcatcgggccacactcaaactggcattgaagcccatatgtggctccgagacatcggtgaagtagcgaatcctcatctggttaccggtggagtagatcgtatccggcttacgattgccacaatagcgaccgatctccggtcttagctccgtactgccatcgttgatcaaaacaaattcccgttggcactcctccggttccccggtggcgtccaacatatcgaatgcgccttgaaagtgcagcattatgcggtgttctggtggtgcttcaacgatccaaatgcactcggaatggggatgcggaagatgtgggtaatacggtgagctaatgaactgctcatctccggaggcggacaatcggatacggccagagtcggtgtaacgcagttcctcgaagcggaaggacaccaggaagcggggtggactcgcaaagtggaactttatataggccttattcgaggaggtgttcaggacctcgtgcacgacatcctcacagtacttgccacgtcccaagaagggcgaatcttcatcgtttccattgcggagtagaagataatttcggcaatcactcgatccggaggccatgttgttctgcaactggaagtcggggaagtcgatcttgattctacggccctggcgcacttttatggtccacacacaatcgtggtttggccgcggaaggaccttcaggatctccgtaatgttaaccagtcccttggaggcagtgatttccgaaccgcaggccgtgcgcacaatgccattgaatcccgtcttattcacacttggatccgtcacgaattccaccctgagatagggccttccatgaaagactcggtcactcgactccgtgggcagggagcacaacgttcttagctccgaccagttctgcagatcgctcccactaaaaatcttaacatagtcagcaatgcaatcttcgctaaatatctccagatcgatttgggacagtgtgagtacggcatgcatagccggattcgagggcaccaaagtccagaagcaattgagatcctgctcgtagccattgggatagccaggcgaatgaaatccgatcaccgatcgatcgattgtaatcaactgattgccacactggcgtgtccgctcctctgccgtacgattcgaacgtagcgcctccttggataatcgattccaatttaacttgaaaggacctcgattgctcgtgaagtaaaccacattcgtgctggagatgatggtttcgtcgggatcagtcacctcgatacgagctccaatgtccgaatagccgtcgtagaaatttaaatgcggttggtccagatccctcagatagagcagggatatcgccaccacgtactccttgtccaccgtaatgcgccagctgtacggcaccggatcctggaatttgcttggaaagtgcggcgattcaatggtgccttcagtgccattcagctcgttgtggtgctctatgtagggaggactattacgtaaatgaaaatcccaaaaatgagaatatgacactcaccgtagttataggaggccatgaatccctcgcccacattgtcgtcgtcactcttgaacttcatccagatggcaccgcgcgagtgaatcacgccgggcacttcgttgccacagtaaacgccgatcagttggccgctctccgattcctcgcgcacttccagataatcccgattgcaactctctgacttctccaagtccatcgactccagcgtgagactgagggagttacccatgctggcttccagcagccacaggcattcaatgtttggcggatacgaggcggggtaatagggtgaagtgaactttccggacagagcattgtaaatactgccgcaggacgtgtccatggtcatgtagtgtccttggaactcctccaccagctggagcggcacactgacggtcagagcctggccattggaaatcaaggccggcggatgcgagcgacagaacttgagacgcggtgttccctgcggctctgtaccctcgtagatcttaactcccacattgaggcaatcaccctccgtgggatattgctggttggcatcctcgcgcagcttcacatgggtgggcgtaaagatgatgcgtttgttgggctccacggcttggaatacccataagcagctctcgtttcgggccgcctgcctggacatttggatgtaatcaaacattgtttcatcaacgattatctggggaatagaaaattgagaatttattacatgatcttggatctttggagatggcggagtgtttcaccgtttggccacaggactcgtggaagtgcagccggaagccctttttcgaaacggaatcatcgctgataaatcgcaccacagccatattggatgaggaagaaagcagcttgtcatcttccgtctcgtcgccgcagaccttgaacaatctttcaccctccgtgtcgtcctccgtcagatcgtaggcctccagataatcccagttgcagtcgtagcccgactcaagattaagatccgccatctcgaaaacgatctggtggtgctgggagacctccacctgccactcgcatcgactgtgagctggataattgagcggataatttggcgattcgatcactccgtttcgcgccgtcaatttgccaccacaagctgtggatggaaaggtaaggaaagtatgcaacactttattttcagccgctaatttcaatagagaaatacaatatatatatgaaatgtatatattacttacttgctttcacagttctataggtggcttcaaaaccgagtccattgtgcgaattgtccgagatgaaacgcacgtgcagcctgtgacccgaactggtgatcaccaatttggtcgtggaaccgcaatgtcgttcgtggacttccaccgaattcttatgattggaaacctaaaaaaacatgcgattagtatttcataatttgagaaccttatgtggaggaagacccaagctcaccgtcagcgcatccttggtacaattgggactgtcctcgagatctatgttgttgatcgtaagctcgatggcgctatcctgctcgacggtgatcagccaatagcactccaggttgttcggatacatttttggataattgggcgattgaaagaatccgaacgtgccgcgcagctcctccatgcagccatcgatgcgatagtccagctgaaagttcacattgctggcattgtggacgacggtcagcacttcgccgctgatgttcatcgcttgtggtgtgactatttcctggacattcctgccgtccacaatgtacaatccgccgggcatggtggcagtcgggacgtgctgttcgtgccgtgccaaatgtgagacttccactagaacgcgattgcccttgggcgcacgaatagtccaactacaattgatgggtatggtctcccagaatggttccatgtagttcagactctcaatggttcccgtcgtggccgtaaggtttcgaatgcaattcgccttgtaggatattcgaaagccacggaatgtgttggacgcatcagaatcgaagacaatggtgcccttattgttctccagctgaatgagcggattatgcagatcatcgtccttgcagagtactttgcaggggctctgattgggcagcttaatgcccgtgtagatcttcacgctgtcgtagtaacaattgctcaaaccctccagttccaagtcctcgatgagaagcgaaatacccgatcccggatgcaagctaattcgccactcacagtgcgccatgttgggatacgagttcggatatctgggcgacgaaatggcgcccatattcgaacgcaaacttccgccgcatccgaaggcaaagattcgccagcgcagccggaatccacgaccattgatcgccgaatccgtatgaaggatcaacctcatctcgtggctaaagcctggtatccgagcgggtatatcccgtccgcagaagcgcccaatcagtggggaatcagtgccgcctccatttctcacttccagataatcggctgaacagttcggcgattgctccagttcaaagttctccacctgaatctccagcagatgatcaatcgtaccggtcagatgccaatcgcagtccaagccggccgaatagttggccggatattccggtgaggttagctcaccgctggacgcatgaatgtgaccgccgcacttggctcgatcctcgaaggtgtaggttaaatcaaagcctccatccgattcgctgtagtccgacacgaacttgaggacaagctgacgcgaatggctgagcagatcctctggcacactattaccacagtatttggccaacggcttgctcctctcgtcatttacctgggcacccagactatcatagatctccaaatagtcatagatgcagtccaccgcattttccaaactgaagctgttccagtggaggcggatggccttgtttgccggcgccattatcacccagtaacaggtggcttcgccggcatatgagtcgtcgtgcaccggcaagcggatatgatcgccggaacgggtatgaacgccaccgcacttatcgttgccggtggccagggctcgatactcgaacttaaagccacgccccatgctgtccacatcggtggacaggtgcaactgcaggtagttggtttcgctgacaaagttctcctccggctgattcttgccgcaataggggcccaggatctttcggtttaatccatcgttgatctgtgcaggaagaaaaatggaagtatggtaatatggaataagtacgtatacgtttgattcggaactcactctcaagttggttgtcagacattcatcgttatcatcatcgtcgctctcgccattggtcaactgaaagtcgatcctcttcagactaatcaccgtattggtggccgtactaatcgtataggtgcagatacgatccgatcttgttagattgggataaccgggtgaggtaatggtgccctgctcattattcagtttataatcgcaggccatccggtagttcaactggaagctgccggcacgggcataaaacttaatcttcagccgattgaattccgaagtgaaggtaggaggattcaaacgcgacgcatccgatccgcaaatcttctcctgcaaaatgctaccaccctcgtccgtgatatccagcacctccaggcagtcaagtggatccagctccagacgcgcaaactgaatgacaacctgctcgcccacggccaaatggatttcgtattcgcaggagacaccacctggttcggtattggctgtggatgattcagaaatggtgccctccttggcggtgtagacaccaccgcagccgggcacacgctcctccacggaatagtgcagctggaagccagtatcgctgccctcggcatccgaatggaagtggatctcggccaggtgggtgggcaagagcagcggtgctggcgctcccgtggtgcaatatttggccagctcacgtccggaaatgctgtccttgatcttcatgaagtattgtgcttaaggattagcaagggagataatcttttaaattgcaaaaaaactcaccaggacataatcgaaattgcaatttgcgtgctgctccagctgcaaactgaagaaggtcagcttgatgcgtttggtggtgggcgccaccagttgccaccggcagtcccgattcttcggataatttccgggcgatcccggcgacgcaagtgtgccatgtgtctcgaaattcaagcgaccgccacactgcggctccatcgagttccatgtgagatcgaatccctctttagccgtcgagttatcggatcggaaccatagatagagttgattgccggatgatacgatattcccgccatgcggtaaatggttaccacaatagcgtccaattatctgggcagccgccgaacggccatcgttgatctgcagccaatcgaagcggcattccgtggaatcctccacatcgaagctattgaacgtgacatttaccaccagcgattcgttggtgcgaataacccaagcgcactgggcattgtgctcgtatccagtgccctccggcggatacctaagcctgccactctgggcactcagcattccattgcagctgctgaagcgcgtctcgcaaagtcgtccccggtagccaggtaaacactggcagacgaatagatccccactggtggtgggacggcaacgtcctccattcttgcatggatgctgatcgcaaggactcggctgtggctcacagatgggcggacggaagccaattggacacaggcaggtataattcgagggtccggcgaacaggcaaatgccaccattctaatggagcattcaaaatgtgcgttataatgtgtgctcaagagaatacctagacagcaactcaccaggcagggattttccttgcagtttgtggtcgtgccattgacacagccattcggaccgtatcctgttcccaccatgcccattggacatctgcaggatgtggtgccggagatcaaaaagcagctcgccgtcggatagcagggattgttgcccgccggacaagttcttggcgtctgtccagctgggatgtcaatgtcctgggggcttctctcgcacttccgcccatcgccggtccagccaacgggacactcgccgcaatgatatgaaccataggtatttatgcaatctaccttgggactaagactgcatccaccgttgttcgtctggcattcgtccaagtcccggcaactgaccccattcccggtcaagccggctggacagggagcacaggtgaagctgccaggcagattaatgcagctggtggagcagggcttgtgggcggccgaatcgctgcattcgtccacatcctcgccacaaatgggtgtcaagccattcgtcttccaacccggttcgcagatgcatcgatagccggcatcgtctgcactgggcacacaagatccatggccacacagctcccatgcactggactgtgagcaatccgccttgcgctgggtgcagtgcatcccatgccaacccggctggcaaaggcaactgtatgtgccgaaatgattctggcattgtccaccattttggcaacccagatcggtgccctcgtacagtgcgcactcgttgacatccatctcgcacttggtaccctgcagtatatattaaatattaaagcaattgggggatacattttaaagaaaattaaaaaattcactccatttgcagtttttaaattacttttcaaatagcttatttttttccaaagaattcgcgttctttattaaaatataatagtcatttgttctgttaccaccttagacgcccattaatactcccctttttttttactcgactatcatggggattcaatgaacgcatattcgtgtatacccacctcgaatgccgatcgacattggcaacggaatccggtgtatgtgttgtagcaggtgcctccattctcgcagggtccacttgcacagctgtttgcctccaaatcggtcttcattcgatccacccgattctccagcgctctgagtcgtgtctgaaaacgccgcaacagagccatcgatcctcgggtcctgtcccaaatgaaaaaaaggaaattaacctcatacatattgtattacatgaaatatatatatagttattgagcttttatagtctgagaccttttattttattgttattttttacccatacgctctagcatacataataagataggaacattaagctgcattccaatatttgatgatcccacttctatagtttcagagatcgaaatagattatatacccttgttgtaatgctcacctattttgctgcactcgcagcattgcactcaagccattcgctccaaaggcgcgcctattgaaatcagccaactgatccgccagctcgcgcgcatctacgaaatcatcatccttgccaccggaacgctttttggagccactggtggccagcaagagctccataacatccaattcctcgttgatggtaagccgcgaatttccgctcaatcgaaagcttatattgcgatttgcaccggattcaaaaatcaaattgccatctttgcttataatttttggcctaaaagcaattgtgttattagccagaatacactatattccatttatatcgagtcgagtccttacgagttgacaaaaccctcggcaatgggccaagtatctgtgatgatggcaaggagtgtccaacacaataggagtctgctcctcgcagctccttccattttgtcactttttttgtttttttacagaagagcacttccactgaacattaagaccaccagaaaaaaaaaaataagatccgttccgctggatattcgaagtccaactgtgctgctcccgccgatcttcacgttccaaatcaactcacaatgaagcgcgggggcgttttcggaaaaacgcccatcaaaccccttcgaaaccatcatcaaatagataagccgactggatttaaaatcgtacacacatatatatatatatatttttttttgagcagatttctcggccgatttggatttgctctcggtgctggcttaggacgctaataatatctattacaatagcacataaattagatcgtttagcttagggttagtttctttcaaaatgtaaaaactacagacaaacatctcctgtctgccatctcgaaaccacaaacatttcgaaagagcacttttcctattgcacatattctttacaattacgcaattacaggtgcttctcagtgtgtgtgtgtgtgttacttattattattgttatttttttgttgcaatttataacatatttagaacagactgtgtgagaggttggggtgtgcccaagatggcttgacttaagtacaggctgtgctctgtcgtttagatctctgctctcccgtgccaggtgctggtctgaagtctagttaagttagccatctgtgtgggttacaaatgcacaagaaatgttcgataaacaaatggcataccatttgctttgaggaaccatagatctgaggttgtgaggactaacaacaacagatcggagatccttaaattcaaattcagcaatattaaaataaagaagatatttgaaagtattacaatcgtcctgttaaatagtttaagcaaatacaatcaatttgttaaaaggttgcaagtgagtttagttgagtttaggtcattttacaaagcaattacctgcgctgttctctattatcgtgtttatatcgagaaatttgatcaattatcgaatacagctggtttaacaatagtttttcttttcgtgtgcttcagtggtggttcagttttacttggttagtggtgtttatgatcggttgcgatcgcagttccattgttctgttttggtcttggtggtgtttggtgagtgggatcgaaggagagcttcgttggttggatcttttgctatttcttatacctagggcttgccatacaattctttgtggtttctctttttggccgtggaaataggaaagattcatgggctagatgtttgatttgcctgcctctaaatgagatacatacatgtttatatatcctctaagtttttgttgtgtatatataacatagttgtgtataataagaatcacaaagatgaaatgacttgcgtttggagtccgagtataaataataacatagctgggcgcaatcagatccggatctatgtgctgtgagcatttgttcacatgaaactatggtaataataataatagaaattatattaattacaatatataatataattaaaatatatatatatatatatagaggggtgccaggacacgcgtacacgatataaataaatattaaaaataaacactcgacagttgaacattctgcttaggttgggtatttctcttggttacaactccacgtcctccagcttgactccatttcctgtgaacacgcaaaaacgtgccccagatcttcagttctcggccgttgtgacgactgccttcggtcgccgtatgtgctccgatttgtgatagaggaatttatagctcgatttctgcttctccgtaagctcgacaaaggaatctgttgtttcatttagatcgattagattcatttggatttaggctcaatgatgaaatgaaatacccaccgaaggagacgtagcccaggttgtcggtatccagagcatagaagagcgcctgggccttttgttcattcagcttgccgccagcgtgtctcatcaatcgcacaaagctttccctgtctatttgctgactggattcgctgtagagctattgaattgaaaataaattaattaaaatcaatgcacagtattgtacggcatatatatatatatatattatattacatggatgagggcacgcaggaaggtcaaaagatccgaattcttcagtttgcagaagagggagcaaagcaggaagctctttaaactcactgtgcccgatcgtcgctaaaatgagtgaaatagataatagaccaatttgaaagagacagcacaagagatattccatccataagcttacgtgatcgagcagggcaaacagtttgtgcagatccgtgttctttagatccacctggagcagctcaccgaacgtgatgatgtccaacctatccgtgttggacaaccgaaggaagcccttgcacagctccgcatcacgttgactctcgttcaggcccagcttctcgatggtccgctcgatttccacgatgtcgccagggaagggaatcttcatgtcgcgggcacgactcatcacaatcacatcctcaaacgaataatccgaggtgggcacacccaaggccctagaaaagttgcatacttagtagatatattcgatcgaactcgctatcttgaaagcaattaagcgcctttagaacttattctaggcaacaacatttgtttacctctcaaccgaactaaatgcgttgatatagagtataaactagaattttgaatactataaatagtaggaatggctaaggaaatggcccatttcatttgtacaaattatgtttttgcacaatttccaatttccacattccatttccggccattcaatgggctattgccccacttacttggccatcacctcgcgcacattgttggcatacagattggcatcggccacctcgtcctccgatggtgtgtacacaggcagatattcgatctcgcagcggttatagaactgcgtcatcgtcagccagagaaggcgtaatctaaattaagcacgaaattcgaataacattagtatttagcctgaaatccagttgattgcccctgtttagttactcacactccaggtccatcccaggtccatgtgaaagtgtcatatttattcggatacttgagaagcaccggctggacgggcacacccggatagaatgcgcccggtttgaacttaatcagagccgtgcgattggtgcaggtgccctcggcgaagatgaccacctgtggccagtcgtctgtggatcgggcacggtcgacaatgtcacgtatggtgttctggcgcgaattgggatcctcgcgctgcacatagatgggctgggcatagttaatgatctttccgagcaacggtatgtccgccgtctcccgcttggccactatcgagggcgggccactggccacgaccaggatggagtccacgtaggaggagtgcggtgccaccactagaatgggtgcctccttcgccgttgccgctcgacccttcatggtcacatagtggaacgatccgaaggtgtacaccatgcgcatcccacaggccgtcatgtattgcatttgtctgaaaggtgtgaagagtaattatgataattagccagtggcttgcaattgaatgccatatttgctcacttccgccagccggtgaggggtttcgctttgagatcatccagggtcataccgtagagtccaatgcaggcgaacatccacgcggagattagggagaggacgcagcccaccacacggatgggcagaagcagaactgtcagcacatagatctggaaaatgcaattaatcggaatttggaggcatacatttgaaactggataaatgaaaaaagtaaagacctcttagtttgggtactgtcgtctattgtttattgtttatttgatttagattgggcaaaacagatcatagcaatatacatatatcttaaaagtgtcttccatcggctgcccagcccggctagacttcacttttaggactgactatatttactatatgctaatgccagcaaagtaagtggaatgagatccatatggacaaggtgacttctacagcaccaacgatagccaggcggccatcaggcagaatcctcccattgtggcatacggctgcatccatttctcacccgttagggcgcgatagtacatggagccgctgaaggcgagggtcccggtgatcatcagcgtgcctgtaaggaatggataatgggccaggggcatggccatcagggcaaaggagtgcagaaagtggatgcgattggccacatcggcgaatgcctgcgagtccagttgctccctgatgctctcgatgtcccgcagcacatacttgcagtaggcactcataaaaatggccgatgcgccgccgatcccggctagccgcataaaatggtagtgacatccggcgaggcagtacagtgagctatgcgaatgcacatacgattgcgccgaaggaggcagtgacacgatggaatcatccactggaattttccaattctccagtccgatgctctccaagacggcgttcgccgacgcaatgacaatctgactggatggattgcgtaggatgagatagtgtagtaggctgctccttctaccctcttcctttactcttagtcatacatacctaattatacatagccaatctagtcataagcttatacactcatacacccatccttaacatacaaatattatcgagaaacttatcgactaatcgactcgccactctgcagagagcgcggcagtcagtcgctgttgaaccaagctaaaggacagatcaaaaataaaagagacacgtgaaattgtattagaatattaacttctgtaaacggcggctaaa

SEQ ID NO: 3986 - DNA, 12811 bp, DROSOPHILA
tcagattgtcattgcgtcggcgaacgccgtcttggagagcatcggactggagaattggaaaattccagtggatgattccatcgtgtcactgcctccttcggcgcaatcgtatgtgcattcgcatagctcactgtactgcctcgccggatgtcactaccattttatgcggctagccgggatcggcggcgcatcggccatttttatgagtgcctactgcaagtatgtgctgcgggacatcgagagcatcagggagcaactggactcgcaggcattcgccgatgtggccaatcgcatccactttctgcactcctttgccctgatggccatgcccctggcccattatccattccttacaggcacgctgatgatcaccgggaccctcgccttcagcggctccatgtactatcgcgccctaacggtttcaaatgtatgcctccaaattccgattaattgcattttccagatctatgtgctgacagttctgcttctgcccatccgtgtggtgggctgcgtcctctccctaatctccgcgtggatgttcgcctgcattggactctacggtatgaccctggatgatctcaaagcgaaacccctcaccggctggcggaaacaaatgcaatacatgacggcctgtgggatgcgcatggtgtacaccttcggatcgttccactatgtgaccatgaagggtcgagcggcaacggcgaaggaggcacccattctagtggtggcaccgcactcctcctacgtggactccatcctggtcgtggccagtggcccgccctcgatagtggccaagcgggagacggcggacataccgttgctcggaaagatcattaactatgcccagcccatctatgtgcagcgcgaggatcccaattcgcgccagaacaccatacgtgacattgtcgaccgtgcccgatccacagacgactggccacaggtggtcatcttcgccgagggcacctgcaccaatcgcacggctctgattaagttcaaaccgggcgcattctatccgggtgtgcccgtccagccggtgcttctcaagtatccgaataaatatgacactttcacatggacctgggatggacctggagtattacgccttctctggctgacgatgacgcagttctataaccgctgcgagatcgaatatctgcctgtgtacacaccatcggaggacgaggtggccgatgccaatctgtatgccaacaatgtgcgcgaggtgatggccaaggccttgggtgtgcccacctcggattattcgtttgaggatgtgattgtgatgagtcgtgcccgcgacatgaagattcccttccctggcgacatcgtggaaatcgagcggaccatcgagaagctgggcctgaacgagagtcaacgtgatgcggagctgtgcaagggcttccttcggttgtccaacacggataggttggacatcatcacgttcggtgagctgctccaggtggatctaaagaacacggatctgcacaaactgtttgccctgctcgatcacctctacagcgaatccagtcagcaaatagacagggaaagctttgtgcgattgatgagacacgctggcggcaagctgaatgaacaaaaggcccaggcgctcttctatgctctggataccgacaacctgggctacgtctccttcgatacttggcccattgccgagggttttgtcaactcgccaaaaattataagcaaagatggcaatttgatttttgaatccggtgcaaatcgcaatataagctttcgattgagcggaaattcgcggcttaccatcaacgaggaattggatgttatggagctcttgctggccaccagtggctccaaaaagcgttccggtggcaaggatgatgatttcgtagatgcgcgcgagctggcggatcagttggctgatttcaataggcgcgcctttggagcgaatggcttgagtgcaatgctgcgagtgcagcaaaataggacccgaggatcgatggctctgttgcggcgttttcagacacgactcagagcgctggagaatcgggtggatcgaatgaagaccgatttggaggcaaacagctgtgcaagtggaccctgcgagaatggaggcacctgctacaacacatacaccggattccgttgccaatgtcgatcggcattcgagggtaccaagtgcgagatggatgtcaacgagtgcgcactgtacgagggcaccgatctgggttgccaaaatggtggacaatgccagaatcatttcggcacatacagttgcctttgccagccgggttggcatgggatgcactgcacccagcgcaaggcggattgctcacagtccagtgcatgggagctgtgtggccatggatcttgtgtgcccagtgcagacgatgccggctatcgatgcatctgcgaaccgggttggaagacgaatggcttgacacccatttgtggcgaggatgtggacgaatgcagcgattcggccgcccacaagccctgctccaccagctgcattaatctgcctggcagcttcacctgtgctccctgtccagccggcttgaccgggaatggggtcagttgccgggacttggacgaatgccagacgaacaacggtggatgcagtcttagtcccaaggtagattgcataaatacctatggttcatatcattgcggcgagtgtcccgttggctggaccggcgatgggcggaagtgcgagagaagcccccaggacattgacatcccagctggacagacgccaagaacttgtccggcgggcaacaatccctgctatccgacggcgagctgctttttgatctccggcaccacatcctgcagatgtccaatgggcatggtgggaacaggatacggtccgaatggctgtgtcaatggcacgaccacaaactgcaaggaaaatccctgcctgaatggtggcatttgcctgttcgccggaccctcgaattatacctgcctgtgtccaattggcttccgtccgcccatctgtgagccacagccgagtccttgcgatcagcatccatgcaagaatggaggacgttgccgtcccaccaccagtggggatctattcgtctgccagtgtttacctggctaccggggacgactttgcgagacgcgcttcagcagctgcaatggaatgctgagtgcccagagtggcaggcttaggtatccgccggagggcactggatacgagcacaatgcccagtgcgcttgggttattcgcaccaacgaatcgctggtggtaaatgtcacgttcaatagcttcgatgtggaggattccacggaatgccgcttcgattggctgcagatcaacgatggccgttcggcggctgcccagataattggacgctattgtggtaaccatttaccgcatggcgggaatatcgtatcatccggcaatcaactctatctatggttccgatccgataactcgacggctaaagagggattcgatctcacatggaactcgatggagccgcagtgtggcggtcgcttgaatttcgagacacatggcacacttgcgtcgccgggatcgcccggaaattatccgaagaatcgggactgccggtggcaactggtggcgcccaccaccaaacgcatcaagctgaccttcttcagtttgcagctggagcagcacgcaaattgcaatttcgattatgtcctgatcaaggacagcatttccggacgtgagctggccaaatattgcaccacgggagcgccagcaccgctgctcttgcccacccacctggccgagatccacttccattcggatgccgagggcagcgatactggcttccagctgcactattccgtggaggagcgtgtgcccggctgcggtggtgtctacaccgccaaggagggcaccatttctgaatcatccacagccaataccgaaccaggtggtgtctcctgcgaatacgaaatccatttggccgtgggcgagcaggttgtcattcagtttgcgcgtctggagctggatccacttgactgcctggaggtgctggatatcacggacgagggtggtagcattttgcaggagaagatttgcggatcggatgcgtcgcgtttgaatcctcctaccttcacttcggaattcaatcggctgaagattaagttttatgcccgtgccggcagcttccagttgaactaccggatggcctgcgattataaactgaataatgagcagggcaccattacctcacccggttatcccaatctaacaagatcggatcgtatctgcacctatacgattagtacggccaccaatacggtgattagtctgaagaggatcgactttcagttgaccaatggcgagagcgacgatgatgataacgatgaatgtctgacaaccaacttgagagtgagttccgaatcaaacgtatacgtacttattccatattaccatacttccatttttcttcctgcacagatcaacgatggattaaaccgaaagatcctgggcccctattgcggcaagaatcagccggaggagaactttgtcagcgaaaccaactacctgcagttgcacctgtccaccgatgtggacagcatggggcgtggctttaagttcgagtatcgagccctggccaccggcaacgataagtgcggtggcgttcatacccgttccggcgatcatatccgcttgccggtgcacgacgactcatatgccggcgaagccacctgttactgggtgataatggcgccggcaaacaaggccatccgcctccactggaacagcttcagtttggaaaatgcggtggactgcatctatgactatttggagatctatgatagtctgggtgcccaggtaaatgacgagaggagcaagccgttggccaaatactgtggtaatagtgtgccagaggatctgctcagccattcgcgtcagcttgtcctcaagttcgtgtcggactacagcgaatcggatggaggctttgatttaacctacaccttcgaggatcgagccaagtgcggcggtcacattcatgcgtccagcggtgagctaacctcaccggaatatccggccaactattcggccggcttggactgcgattggcatctgaccggtacgattgatcatctgctggagattcaggtggagaactttgaactggagcaatcgccgaactgttcagccgattatctggaagtgagaaatggaggcggcactgattccccactgattgggcgcttctgcggacgggatatacccgctcggataccaggctttagccacgagatgaggttgatccttcatacggattcggcgatcaatggtcgtggattccggctgcgctggcgaatctttgccttcggatgcggcggaagtttgcgttcgaatatgggcgccatttcgtcgcccagatatccgaactcgtatcccaacatggcgcactgtgagtggcgaattagcttgcatccgggatcgggtatttcgcttctcatcgaggacttggaactggagggtttgagcaattgttactacgacagcgtgaagatctacacgggcattaagctgcccaatcagagcccctgcaaagtactctgcaaggacgatgatctgcataatccgctcattcagctggagaacaataagggcaccattgtcttcgattctgatgcgtccaacacattccgtggctttcgaatatcctacaaggcgaattgcattcgaaaccttacggccacgacgggaaccattgagagtctgaactacatggaaccattctgggagaccatacccatcaattgtagttggactattcgtgcgcccaagggcaatcgcgttctagtggaagtctcacatttggcacggcacgaacagcacgtcccgactgccaccatgcccggcggattgtacattgtggacggcaggaatgtccaggaaatagtcacaccacaagcgatgaacatcagcggcgaagtgctgaccgtcgtccacaatgccagcaatgtgaactttcagctggactatcgcatcgatggctgcatggaggagctgcgcggcacgttcggattctttcaatcgcccaattatccaaaaatgtatccgaacaacctggagtgctattggctgatcaccgtcgagcaggatagcgccatcgagcttacgatcaacaacatagatctcgaggacagtcccaattgtaccaaggatgcgctgacggtttccaatcataagaattcggtggaagtccacgaacgacattgcggttccacgaccaaattggtgatcaccagttcgggtcacaggctgcacgtgcgtttcatctcggacaattcgcacaatggactcggttttgaagccacctatagaactgtgaaagcaacttgtggtggcaaattgacggcgcgaaacggagtgatcgaatcgccaaattatccgctcaattatccagctcacagtcgatgcgagtggcaggtggaggtctcccagcaccaccagatcgttttcgagatggcggatcttaatcttgagtcgggctacgactgcaactgggattatctggaggcctacgatctgacggaggacgacacggagggtgaaagattgttcaaggtctgcggcgacgagacggaagatgacaagctgctttcttcctcatccaatatggctgtggtgcgatttatcagcgatgattccgtttcgaaaaagggcttccggctgcacttccacgagtcctgtggccaaacggcggcccgaaacgagagctgcttatgggtattccaagccgtggagcccaacaaacgcatcatctttacgcccacccatgtgaagctgcgcgaggatgccaaccagcaatatcccacggagggtgattgcctcaatgtgggagttaagatctacgagggtacagagccgcagggaacaccgcgtctcaagttctgtcgctcgcatccgccggccttgatttccaatggccaggctctgaccgtcagtgtgccgctccagctggtggaggagttccaaggacactacatgaccatggacacgtcctgcggcagtatttacaatgctctgtccggaaagttcacttcaccctattaccccgcctcgtatccgccaaacattgaatgcctgtggctgctggaagccagcatgggtaactccctcagtctcacgctggagtcgatggacttggagaagtcagagagttgcaatcgggattatctggaagtgcgcgaggaatcggagagcggccaactgatcggcgtttactgtggcaacgaagtgcccggcgtgattcactcgcgcggtgccatctggatgaagttcaagagtgacgacgacaatgtgggcgagggattcatggcctcctataactacgagcaccacaacgagctgaatggcactgaaggcaccattgaatcgccgcactttccaagcaaattccaggatccggtgccgtacagctggcgcattacggtggacaaggagtacgtggtggcgatatccctgctctatctgagggatctggaccaaccgcatttaaatttctacgacggctattcggacattggagctcgtatcgaggtgactgatcccgacgaaaccatcatctccagcacgaatgtggtttacttcacgagcaatcgaggtcctttcaagttaaattggaatcgattatccaaggaggcgctacgttcgaatcgtacggcagaggagcggacacgccagtgtggcaatcagttgattacaatcgatcgatcggtgatcggatttcattcgcctggctatcccaatggctacgagcaggatctcaattgcttctggactttggtgccctcgaatccggctatgcatgccgtactcacactgtcccaaatcgatctggagatatttagcgaagattgcattgctgactatgttaagatttttagtgggagcgatctgcagaactggtcggagctaagaacgttgtgctccctgcccacggagtcgagtgaccgagtctttcatggaaggccctatctcagggtggaattcgtgacggatccaagtgtgaataagacgggattcaatggcattgtgcgcacggcctgcggttcggaaatcactgcctccaagggactggttaacattacggagatcctgaaggtccttccgcggccaaaccacgattgtgtgtggaccataaaagtgcgccagggccgtagaatcaagatcgacttccccgacttccagttgcagaacaacatggcctccggatcgagtgattgccgaaattatcttctactccgcaatggaaacgatgaagattcgcccttcttgggacgtggcaagtactgtgaggatgtcgtgcacgaggtcctgaacacctcctcgaataaggcctatataaagttccactttgcgagtccaccccgcttcctggtgtccttccgcttcgaggaactgcgttacaccgactctggccgtatccgattgtccgcctccggagatgagcagttcattagctcaccgtattacccacatcttccgcatccccattccgagtgcatttggatcgttgaagcaccaccagaacaccgcataatgctgcactttcaaggcgcattcgatatgttggacgccaccggggaaccggaggagtgccaacgggaatttgttttgatcaacgatggcagtacggagctaagaccggagatcggtcgctattgtggcaatcgtaagccggatacgatctactccaccggtaaccagatgaggattcgctacttcaccgatgtctcggagccacatatgggcttcaatgccagtttgagtgtggcccgatgcggaggctccttccatagtcccgagggcgtgatagcctcgccgtcgagggacctcctgttgattcacgaggaaggcaagcagctgcaggaatgcgtttacaccatcgaactggagaagggcagcaccatcgatctgactagcgaatatctgcagatacccacgttgcggaatggtagctgctcgcagcgaaatcacttgatgctcgaagagatggatgcctttggattggacggtgaggagaagatcgtggacaccctaatgctctgcggtatggaagccaagcacctgataagtgagacgaacaagatcgtgttccgatatcgcttcctggatggcattccggcggagaatcagggcttccgtttaaagtacacctcgctgggctcacgatgcggcgagaccatctacgcatccgtgggagttctccaaacacccggttatcccttaggcgtaccccatcccatgcactgcaagtggcaggtgcaagtgcccaagggcagaagggtgcgtctggagattctcgactttaacaccggcacgaatatggatctcagaggaaggcttggattccgtggccgccttaccgtggccaacgatttcaaaatgcaatccatcctgggtcgctacaacgtcgatcctcctgcggaggtgctttcctcggacaatacaatgggcatcgatgccttcctactgcccattgttcagaatcatggaatcaagctgcggttcagtgcctatggctccagtagctgtccgggattcacggtaatgatgaatgaggtcgcagatattcagttccagcggttcaatatcagccgtccgcttcactgcagctataaagtcgttccaccgtccaatagtaccctcctgattcgggtgaaagagtacaacaccacgtccgtaatgatgtggaatacacatatgtgcgcattgctctcgccgcttaagtttaaccgcttggagcaggaggaggagctcatggagcgcattctctgcgattaccagtcacccgctcctggcaagcccctgccctccatccggttgcctttccccattcaactggtcgtctcggcatccgcccgcaacgcaatgaccaatctcgtcctgagctatagcacacagtcgtgcggcggagtcattatcctggaaccgggtgataatatgacggtgcaccagccatcgggaatggtgtcggcggcgggcgccattgactgtgcctgggccattggaccctatacggatgccagtggcgaggacgaggtcctggtgccgcaggacattcagctggaggtgtcggtatataacgtcaacctgccagcaccgagcccgtccgcacaatctccggaagccccatgcctgcatcactatcttaaggccacagctgtgaacatggtggtggagcgaggtctcttcctggaatatcactccgatagtttctcagccaatgccaccttcaatgtgtccatcaagtatggatctggatgcggtggcaagttggtatatccctatagagccatcgactttgccgagcaatacaagaacaatgtggagtgcatctgggaggtcgaggcgacaatgggctaccacatcggtctaacattccaaggacgcttttatatcgaggatagccccggttgcacaaaggattacctgctcgtccagcagcgcaacgagaccactggcaattggaccgacctgcagaggatttgcggtcgtgttgcgccggagatgataaacacaacttcaccgtatctccggctaatcttccgatccgatggcgatgtggtggccgatggttttttggccaaattcgaaaggaattgcggtggcctgctgtacgccgacagcacggaacaggagctggccagtccgggctttccgaatggctatgaaaagtacttgcaatgtaattggacgatagtgcccaggagtccatcgatgggcggtgtcctggtcagctttgtcaatttcgatctggaacagggacccatatccgtttgcctctacgacaatctcacggtgaccacaaaggacaagggcaaggatccgcaacagaccactctctgcggcgtaaagcataaccacgagtatcggggcaaggaatatgttaatctactgctccgaacggatggcagttattccggtcgcggattcacattactctataccagccgcctttgcggtggaattatctcgcgaacatcaatggtggaatcacccgtacagcatacggataacaccctgccacctggcagtgattgctattggaatctaaccgccccggctggttacaagttcaacattaagttcctattcattgactttgaggcgaatagcaattgtgcctacgatggcgtcgaggtattctccggacccatcccggacgagcgataccgatggggacgcttctgcggtcgcattaacgaggatctgccactgatcagtattccccaagagcggggcatcatacacagcttctcggatgatcgggatccatcgaggggattccgtgccttggtgcgcgtaatgccaaattgcgatgagaagatctcgctgaacggatcgtcgcgttatgtctatagcaaatttaacaacgctggcggttatcaaaacgatttggactgtcaaatagtattccgggtgaatcctgatcagcagataagcgtggagttcagtaatttccatgtccaagacacggacggatgccgcagtgattatgtggagttgcgcgatggtggcggaacctttgccgacattatcggacgtttttgtggccagaatcaaccgcccaccttgagaacaaccaggcatacgctctatatgcgctttgtcaccgataataaggtgacggatacgggtttccaggtgaccatcaatgctattccccgactatgcggcagttcagagattacgttgagtgcggatggcaccaaggaggtcaccattaattctccggcaaggacgccaggtggcaattatcccaatggagtgtcgtgcttctggaaaattaagggcgattccctgctgagggtgcagttcgtcaactttgatctccacggaccgaatcaaaatggtagctgcgtggatgactatttgaaaatctacaatagtgaggatgcaccgctgttggagcagggattgggcaccgacctggtattcaatggccagacctccagtaagaacggtttcggctttgccacggagcatgtgtactgcggcaatgtgaagccggacatctattatggccggtccagcgaggtgtatctgaagttccggtcaaagggattggagcagcatggtggatttcagttacaggtcgctctgaactccaaccgagagcgccactacgatggactgcagggcagagtgcatttatcacagtcggccgattgtaacatcattattcgggcgccaccaaattacaccttaagtttgtactacaccgaattgatattcggcacctacgactgcgaaatggagaatttggaggtgttcgacaggacgaatcgatcgctgcagcgcgtctgctcctttgtggacatgggcaagagcctgttcagcaatgcgaatgaactgcggctacagatgaagactggctcgtacttgacctcgctggatctcacctatttggccagtccggtggagaagggtcctggttgcggtggtcaattctacaataccgagggcatattctcaaatcccttctatccgaacaatgtgcgcaataactcagagtgtcagtggattgtccgcgtgccgagcaacaatgttgtgttccttacatttgaagtcttcaatctgggctcgaagaccacctgtcacacggactacctgcaaatcctggaacaggacgcaaccggtgaggagcgcgaaatgagacgcttctgtggcgaggataacccaaagtactacaagagccggcgcagccaggtgctcgtccgctttcacaagaccgtcaactacgatggtatcggttgggtgatccgctttgccggtgtctactccgaccatcagatacccagacacctgttgggcggttcttaa

SEQ ID NO: 3987 - protein, 4215 aa, DROSOPHILA
MRLAGIGGASAIFMSAYCKYVLRDIESIREQLDSQAFADVANRIHFLHSFALMAMPLAHYPFLTGTLMITGTLAFSGSMYYRALTVSNVCLQIPINCIFQIYVLTVLLLPIRVVGCVLSLISAWMFACIGLYGMTLDDLKAKPLTGWRKQMQYMTACGMRMVYTFGSFHYVTMKGRAATAKEAPILVVAPHSSYVDSILVVASGPPSIVAKRETADIPLLGKIINYAQPIYVQREDPNSRQNTIRDIVDRARSTDDWPQVVIFAEGTCTNRTALIKFKPGAFYPGVPVQPVLLKYPNKYDTFTWTWDGPGVLRLLWLTMTQFYNRCEIEYLPVYTPSEDEVADANLYANNVREVMAKALGVPTSDYSFEDVIVMSRARDMKIPFPGDIVEIERTIEKLGLNESQRDAELCKGFLRLSNTDRLDIITFGELLQVDLKNTDLHKLFALLDHLYSESSQQIDRESFVRLMRHAGGKLNEQKAQALFYALDTDNLGYVSFDTWPIAEGFVNSPKIISKDGNLIFESGANRNISFRLSGNSRLTINEELDVMELLLATSGSKKRSGGKDDDFVDARELADQLADFNRRAFGANGLSAMLRVQQNRTRGSMALLRRFQTRLRALENRVDRMKTDLEANSCASGPCENGGTCYNTYTGFRCQCRSAFEGTKCEMDVNECALYEGTDLGCQNGGQCQNHFGTYSCLCQPGWHGMHCTQRKADCSQSSAWELCGHGSCVPSADDAGYRCICEPGWKTNGLTPICGEDVDECSDSAAHKPCSTSCINLPGSFTCAPCPAGLTGNGVSCRDLDECQTNNGGCSLSPKVDCINTYGSYHCGECPVGWTGDGRKCERSPQDIDIPAGQTPRTCPAGNNPCYPTASCFLISGTTSCRCPMGMVGTGYGPNGCVNGTTTNCKENPCLNGGICLFAGPSNYTCLCPIGFRPPICEPQPSPCDQHPCKNGGRCRPTTSGDLFVCQCLPGYRGRLCETRFSSCNGMLSAQSGRLRYPPEGTGYEHNAQCAWVIRTNESLVVNVTFNSFDVEDSTECRFDWLQINDGRSAAAQIIGRYCGNHLPHGGNIVSSGNQLYLWFRSDNSTAKEGFDLTWNSMEPQCGGRLNFETHGTLASPGSPGNYPKNRDCRWQLVAPTTKRIKLTFFSLQLEQHANCNFDYVLIKDSISGRELAKYCTTGAPAPLLLPTHLAEIHFHSDAEGSDTGFQLHYSVEERVPGCGGVYTAKEGTISESSTANTEPGGVSCEYEIHLAVGEQVVIQFARLELDPLDCLEVLDITDEGGSILQEKICGSDASRLNPPTFTSEFNRLKIKFYARAGSFQLNYRMACDYKLNNEQGTITSPGYPNLTRSDRICTYTISTATNTVISLKRIDFQLTNGESDDDDNDECLTTNLRVSSESNVYVLIPYYHTSIFLPAQINDGLNRKILGPYCGKNQPEENFVSETNYLQLHLSTDVDSMGRGFKFEYRALATGNDKCGGVHTRSGDHIRLPVHDDSYAGEATCYWVIMAPANKAIRLHWNSFSLENAVDCIYDYLEIYDSLGAQVNDERSKPLAKYCGNSVPEDLLSHSRQLVLKFVSDYSESDGGFDLTYTFEDRAKCGGHIHASSGELTSPEYPANYSAGLDCDWHLTGTIDHLLEIQVENFELEQSPNCSADYLEVRNGGGTDSPLIGRFCGRDIPARIPGFSHEMRLILHTDSAINGRGFRLRWRIFAFGCGGSLRSNMGAISSPRYPNSYPNMAHCEWRISLHPGSGISLLIEDLELEGLSNCYYDSVKIYTGIKLPNQSPCKVLCKDDDLHNPLIQLENNKGTIVFDSDASNTFRGFRISYKANCIRNLTATTGTIESLNYMEPFWETIPINCSWTIRAPKGNRVLVEVSHLARHEQHVPTATMPGGLYIVDGRNVQEIVTPQAMNISGEVLTVVHNASNVNFQLDYRIDGCMEELRGTFGFFQSPNYPKMYPNNLECYWLITVEQDSAIELTINNIDLEDSPNCTKDALTVSNHKNSVEVHERHCGSTTKLVITSSGHRLHVRFISDNSHNGLGFEATYRTVKATCGGKLTARNGVIESPNYPLNYPAHSRCEWQVEVSQHHQIVFEMADLNLESGYDCNWDYLEAYDLTEDDTEGERLFKVCGDETEDDKLLSSSSNMAVVRFISDDSVSKKGFRLHFHESCGQTAARNESCLWVFQAVEPNKRIIFTPTHVKLREDANQQYPTEGDCLNVGVKIYEGTEPQGTPRLKFCRSHPPALISNGQALTVSVPLQLVEEFQGHYMTMDTSCGSIYNALSGKFTSPYYPASYPPNIECLWLLEASMGNSLSLTLESMDLEKSESCNRDYLEVREESESGQLIGVYCGNEVPGVIHSRGAIWMKFKSDDDNVGEGFMASYNYEHHNELNGTEGTIESPHFPSKFQDPVPYSWRITVDKEYVVAISLLYLRDLDQPHLNFYDGYSDIGARIEVTDPDETIISSTNVVYFTSNRGPFKLNWNRLSKEALRSNRTAEERTRQCGNQLITIDRSVIGFHSPGYPNGYEQDLNCFWTLVPSNPAMHAVLTLSQIDLEIFSEDCIADYVKIFSGSDLQNWSELRTLCSLPTESSDRVFHGRPYLRVEFVTDPSVNKTGFNGIVRTACGSEITASKGLVNITEILKVLPRPNHDCVWTIKVRQGRRIKIDFPDFQLQNNMASGSSDCRNYLLLRNGNDEDSPFLGRGKYCEDVVHEVLNTSSNKAYIKFHFASPPRFLVSFRFEELRYTDSGRIRLSASGDEQFISSPYYPHLPHPHSECIWIVEAPPEHRIMLHFQGAFDMLDATGEPEECQREFVLINDGSTELRPEIGRYCGNRKPDTIYSTGNQMRIRYFTDVSEPHMGFNASLSVARCGGSFHSPEGVIASPSRDLLLIHEEGKQLQECVYTIELEKGSTIDLTSEYLQIPTLRNGSCSQRNHLMLEEMDAFGLDGEEKIVDTLMLCGMEAKHLISETNKIVFRYRFLDGIPAENQGFRLKYTSLGSRCGETIYASVGVLQTPGYPLGVPHPMHCKWQVQVPKGRRVRLEILDFNTGTNMDLRGRLGFRGRLTVANDFKMQSILGRYNVDPPAEVLSSDNTMGIDAFLLPIVQNHGIKLRFSAYGSSSCPGFTVMMNEVADIQFQRFNISRPLHCSYKVVPPSNSTLLIRVKEYNTTSVMMWNTHMCALLSPLKFNRLEQEEELMERILCDYQSPAPGKPLPSIRLPFPIQLVVSASARNAMTNLVLSYSTQSCGGVIILEPGDNMTVHQPSGMVSAAGAIDCAWAIGPYTDASGEDEVLVPQDIQLEVSVYNVNLPAPSPSAQSPEAPCLHHYLKATAVNMVVERGLFLEYHSDSFSANATFNVSIKYGSGCGGKLVYPYRAIDFAEQYKNNVECIWEVEATMGYHIGLTFQGRFYIEDSPGCTKDYLLVQQRNETTGNWTDLQRICGRVAPEMINTTSPYLRLIFRSDGDVVADGFLAKFERNCGGLLYADSTEQELASPGFPNGYEKYLQCNWTIVPRSPSMGGVLVSFVNFDLEQGPISVCLYDNLTVTTKDKGKDPQQTTLCGVKHNHEYRGKEYVNLLLRTDGSYSGRGFTLLYTSRLCGGIISRTSMVESPVQHTDNTLPPGSDCYWNLTAPAGYKFNIKFLFIDFEANSNCAYDGVEVFSGPIPDERYRWGRFCGRINEDLPLISIPQERGIIHSFSDDRDPSRGFRALVRVMPNCDEKISLNGSSRYVYSKFNNAGGYQNDLDCQIVFRVNPDQQISVEFSNFHVQDTDGCRSDYVELRDGGGTFADIIGRFCGQNQPPTLRTTRHTLYMRFVTDNKVTDTGFQVTINAIPRLCGSSEITLSADGTKEVTINSPARTPGGNYPNGVSCFWKIKGDSLLRVQFVNFDLHGPNQNGSCVDDYLKIYNSEDAPLLEQGLGTDLVFNGQTSSKNGFGFATEHVYCGNVKPDIYYGRSSEVYLKFRSKGLEQHGGFQLQVALNSNRERHYDGLQGRVHLSQSADCNIIIRAPPNYTLSLYYTELIFGTYDCEMENLEVFDRTNRSLQRVCSFVDMGKSLFSNANELRLQMKTGSYLTSLDLTYLASPVEKGPGCGGQFYNTEGIFSNPFYPNNVRNNSECQWIVRVPSNNVVFLTFEVFNLGSKTTCHTDYLQILEQDATGEEREMRRFCGEDNPKYYKSRRSQVLVRFHKTVNYDGIGWVIRFAGVYSDHQIPRHLLGGS

SEQ ID NO: 3988 - DNA, 5247 bp, DROSOPHILA
tataagtcgaattagaaggagccacacgacgggcatggaacaagagtgaattaattacgaattcaagcccgaagaggtaattaattcacttcattttcttcccctgcaaagttggctgaaaaccaaaccaaaccaaaccaaactcgacttgactcgattcaagtcaaccattttgttgacagacaaacaaatggtgggccaaataagcaaacatgtgcacataggcacctgctaggacattcatgaattcattgctaacattacgccaaggatatttcaaatatttcttttaagatttcatccaaagtcgtaattgcttagaaatttggctggagctctaatgtgctacaaggagcagtgcttcgttaatttggaaaattatttacatttcccaaggacttttaggtaatttaatcaatgccattaattcgtcacgtttacgattaccgctataataaaacagttcatttaggcacgtttttccgcaatgcaattcattaggagttttgacaagttgttttcttttgttaactacagtttcataagtgcctatttaagtagtccaattatagtgattgaaggtatattttaaaatcaactttaaatgtatctacaattttatgatttcggttcattcattcattattcatttcttctttctttcatttgtacaattttctaattaatttcatttcattcattcatcttccttttcttcatatctattcttcattctttcatttctacaattttcctattcattctactcatcattcatttcttatttctttattttttccataaaaatctttaatttcaatattccactgaatccgaatgttcgaaagcccatttttcgtatctatcaaaaccgtgctgcccgattcattccgtttggttttggcaaacatagccccaattccggacttgcaaatgggactcccggtcggaatttgagtccttgtcacaatggaactgaccatatttacatttgtcaagcacttcactcacctttgactgcggtgtgttctctgtgtctcaagctttctccgccaaatcctcctccgaatcggaacgcgaatgggatttaaatatttgccacacacactctttcacttcggctcggtcgtttgtattcgaattgaaaaatggtatttcggaacgctattgcactttatgtgtatatttatgtatatatactcaatttcttagattagcacaaaaaccaaaaaaaaaaaaattatgtatgttcagcactttcgaatatctttcgaaaatcgaaaaccgggcaaaggcagtaactgcgtgactgtgaactgtgaccagtgaccagtgacttgcgactgtgatgtgagtatgctgaattcaaaggctgaggctgagaaccgaaccgcacgagagtctgttgacgaatgagttacaaatggacgatgcgaaacgctaacagcgggaagacaacaagttgccgtgtccttaacagcgatgctaacgagcactgtggagtgggtacatcttaacagcgctgaaagctctgctcaactgaaagcttagccgatgcaatttcaagaaaactactagtcgtcgccaacagatggcgccgcagagcaagtttatgctttcgatgcactttagttaattttaaaatatttttccaatttacccaacacacatacatacataaaaacatcgcagttttatcttttttttttttaattttattttcgtttttttttttctcattttgttttgttgtaagaaaatctattcattattcatcagtcgactgactttctgcgacttctctagctaaaaaaaaaactcacttcaacatattttggtcttaacagaaaaagaatgatacactccaaatcagaatgggtgtgtgtgggtgggggaggggaggggagagacgaaacataaacacgaggggcaatcaattgtaatagtaggactaatttaaacatatcgtacaattggaaggctttcttgtcttacaacgcaatcgatcggtctgccttctatttaagttcgatattccattcagttagaagactcgactcattctgctgctactcctctttctataatgtgtcttcaacaaacgaagacactttcgcaaggggatttctttaggtttcattttttgttggtttcattttcatttgttttgtttgtttgtggttgttgttgttgttgttgagtttggagtatgtgcagttgtgggcatttcaaagttcaaatttctaaaacaaatctgtgaaaacgttggttcggtattcgtttatagactaacaatctcgatagacgaaaaaaaaattatgatagtatgatctttagaaatgatcgaacatgatgtacataactaattaattacgaaactttttgcttttctccctacaggatgaaaatgacgggagggagtgggatcttgctgttactgctccttcggcagccgatgttatggctaccgctttcgatggtgtttgggatatgtgcagtcttgagcggatttgaacttaatcatcgccagcggaacgcttgaccttgcgctgcttgggactctgctggctggccgccttgggactggccggcttggtgggcttgggcgaggtcttgggcgttttggacttgggcggcgacttctgcagcgcacgcagcgtctcctgtggcacccaatcgtagtcgatggtgctgtcgttggccgtgccggtttcgatcaccttcttggcagcggcacgcttcctcttgccagagctgccgagcagatattgctgtccgatgaccagtagcaggaccacaatgcccgccagcaggacgtacaggaagaaagtctcgccatccagaccctcatcgacctccgaaatcagaacggtctcattgaacacggcctcgttgtactgaataccattggcatcgcggtaggccagtgcaatgttcagtccaaatggacggccggcaaactgatccgagggcaggaaggtgtacgacacggtcgactcaaagccgggcttcacctcacgattgtaggccaccgccgagaagttctggatgaagtagttgaagtccatgggatagcggaaggaggcctccaccgtctcgatcacgaattcctcggctcccttgttggtgaatccaatcaggaactcgacgggtttgccgccgggcagatccagctgctggccaggtgtgtacaggggtttcgtgaataacagataggtgtccgcattcggcgaactgctgctgcccgtgtcgctatcctcgtccgcttctgcatcctcgccagtaacggcaccctcctcgccctccacgtccaccaggtcgtcctccacggcctcggcggcataggctccaaacttgttggctgtaaattaaagagagagttttgttatggtgagtgctgaagaattgaagacatattaagtccttgggttcaagtacacggaactaccttcgcatactactctttgaaactaatcagagatatgatatatttagattggttttcttcgcaggttatagttacagttacacctattttaatagctattgtaacggggtcatttggcttgcatttgggtactttatacttgatttatagttcacaacctagcaaactagctctgcgcctgtctgcaaatttgggatatggccagccgatcaatgtgaaactaggatatatatcgagtatccttaaaaaaaaaacacccttgtgctcagtttgaagctttgatcttggtaactaaacgaattcatagacatctcagacgagccaactcacgagtcagagcgagaggtcgataggcctcatgccaactcaacagttttgaccgtatgataaaaattcgaccaccaaagatgaatgaaaatcactgaattacgatgttagtatacggtgtgcattgattggcagtcccataaagcataatccacgtagcagatgcgtcggcaaaatgccacgtatacggatgggaacacccccgcccaccgagcgattgttatttatcggcgagggtaagagactctacttacgcgccgagaaggtgcagatgacgatgggcaggaccatcagcattaggaacatcagatgcctcatcttgttggctgttttataatgtcgtcggggctccaaatgcaatcgaatgcgcggcgcacacacggaaatttggctgggaaatcggctgagggaaaaacgcacgcacacacaaccttcccgatcgagtgaaaatgaagaagtgacgggcttcggtggtatagcggcgaaaacagaagccgacaatgcacgaagtgggcacgaagccgagacacgactttcactgacaaatgtctacgtggtgccacgtctagggttgcaagggcctctcgatccgtaggtcaattactcagtttttagctatttagcttactcaggataggcattctgcctagtcatacataaaacattcatttgattatagttaaaaacattttctcatatctaaaataatcaataatattagatcttggcttattttgttgacatttgagtgcaccgacaactctagcgagacaagtagtgatgccaaacgccgcaactgtcattcctcgtgttttttcatgtttatcatttaaaagcaatattttggtcaacataatattttatgcaattataaaattcaaaatatatttattttttataccaaatatcattttttgacggaggtaaaaatgctacaaatattttacagcactgttcggccatcgtgctgccaacttggctattacaccgctattatctggctattttttctgctagaaaatattatgttgacattattaatataacattgtctgtataccagaaatattataaaacaaaattgaatggtcaaatttaaatgtagcaatacaaattggaaaaatttttaaaaaatcaataatagatatatgaacacaattttctattgttattgtgtgaacaataaaagttcgcttaaagatttaggaaaaatgcaattaaatataaatactaatttttggaacacgaaccatttaaaaaaacaaggcatacggagggtaaaaactactttttcgagtagtaaaataatttttttcgctattttctagccactcaagcgcaatcgatagtgagcggggccgttaatcgcagctatcgattggcctgcgcaacgcagccaacttcacgtcgctgtgccgataaccgctcaacttcctttttgcttgcggctgtcaattgaagcgcatcttgca

SEQ ID NO: 3989 - DNA, 1635 bp, DROSOPHILA
accgaagcccgtcacttcttcattttcactcgatcgggaaggttgtgtgtgcgtgcgtttttccctcagccgatttcccagccaaatttccgtgtgtgcgccgcgcattcgattgcatttggagccccgacgacattataaaacagccaacaagatgaggcatctgatgttcctaatgctgatggtcctgcccatcgtcatctgcaccttctcggcgcccaacaagtttggagcctatgccgccgaggccgtggaggacgacctggtggacgtggagggcgaggagggtgccgttactggcgaggatgcagaagcggacgaggatagcgacacgggcagcagcagttcgccgaatgcggacacctatctgttattcacgaaacccctgtacacacctggccagcagctggatctgcccggcggcaaacccgtcgagttcctgattggattcaccaacaagggagccgaggaattcgtgatcgagacggtggaggcctccttccgctatcccatggacttcaactacttcatccagaacttctcggcggtggcctacaatcgtgaggtgaagcccggctttgagtcgaccgtgtcgtacaccttcctgccctcggatcagtttgccggccgtccatttggactgaacattgcactggcctaccgcgatgccaatggtattcagtacaacgaggccgtgttcaatgagaccgttctgatttcggaggtcgatgagggtctggatggcgagactttcttcctgtacgtcctgctggcgggcattgtggtcctgctactggtcatcggacagcaatatctgctcggcagctctggcaagaggaagcgtgccgctgccaagaaggtgatcgaaaccggcacggccaacgacagcaccatcgactacgattgggtgccacaggagacgctgcgtgcgctgcagaagtcgccgcccaagtccaaaacgcccaagacctcgcccaagcccaccaagccggccagtcccaaggcggccagccagcagagtcccaagcagcgcaaggtcaagcgttccgctggcgatgattaagttcaaatccgctcaagactgcacatatcccaaacaccatcgaaagcggtagccataacatcggctgccgaaggagcagtaacagcaagatcccactccctcccgtcattttcatcctgtagggagaaaagcaaaaagtttcgtaattaattagttatgtacatcatgttcgatcatttctaaagatcatactatcataatttttttttcgtctatcgagattgttagtctataaacgaataccgaaccaacgttttcacagatttgttttagaaatttgaactttgaaatgcccacaactgcacatactccaaactcaacaacaacaacaatttttttttttttggtttttgtgctaatctaagaaattgagtatatatacataaatatacacataaagtgcaatagcgttccgaaataccatttttcaattcgaatacaaacgaccgagccgaagtgaaagagtgtgtgtggcaaatatttaaatcccattcgcgttccgattcggaggaggatttggcggagaaagcttgagacacagagaacacaccgcagtcaaaggtgagtgaagt

SEQ ID NO: 3990 - protein, 302 aa, DROSOPHILA
MRHLMFLMLMVLPIVICTFSAPNKFGAYAAEAVEDDLVDVEGEEGAVTGEDAEADEDSDTGSSSSPNADTYLLFTKPLYTPGQQLDLPGGKPVEFLIGFTNKGAEEFVIETVEASFRYPMDFNYFIQNFSAVAYNREVKPGFESTVSYTFLPSDQFAGRPFGLNIALAYRDANGIQYNEAVFNETVLISEVDEGLDGETFFLYVLLAGIVVLLLVIGQQYLLGSSGKRKRAAAKKVIETGTANDSTIDYDWVPQETLRALQKSPPKSKTPKTSPKPTKPASPKAASQQSPKQRKVKRSAGDD

SEQ ID NO: 3991 - DNA, 13711 bp, DROSOPHILA
gaaacgtgattgccggcaagttaatccggatagtcagtataagttactcaaggagctactgttaatcttatgtcagagttgagtggtatttgttaagtttaatgttatttcttgaaaccataaaatttgcccaaatactaattggagatatatagattttatatatgaaattaatagggcacctttgcttgtatctgtatatgcttgtgatatttgcatttgcatcatttacaagttatttgtatgatccaacccaaaaacccaataaaaatataaaataatccattttgttttttagtttcttctttatttactaattacgcttgcaacagtgtctgtgtaataaacgatttttgtatagattttttaaaatggtttctgttggttcggacacgacaatatcataaataatattcataattatcaatagtaattatccactctgccgactcaacaagggcacttgaatcttagcactttgaaacattttatatcgttttagtcatttaaatttcaactttaaggcactttagttcaacggtctcttctttttttcgcaattgatattctttttggaaattagctgtgactagttaaaattagtaggtaaacgacaaagtacatatgtatgtatgtatgatcttaattaaggtccttcgatatttggtgtgtgtgtgtgttggagtgggggaggtggaggggacaacttttggttaatatttggatgtcataaataaacgtaattccaacattgataaaattaatgctctgtttaaaaataaataaatagctttaaaatacggcaaaacgaaagcagcagaattagcgggataagaattattcaacaacaacataaaataatccagtaaaaccaaatcagagttaatcatagaactgcctttgccccggccacgctgattcctcctcgtattagactacaaattcattaagattaggcacgatcgccgctccgggggctggatcattggatcgatctcctctaggcccgttccacgtagttgccggggaatgtgccgaagcagccggtcctctgcgaggtgcccacgaaccatccgtcgtcgcacttctccagcacatggaccacatctccctcgagcagttccagttcgtcggagttctggggccggtacttgtacagtgcgcggtacctaaagaagatctcatgttaataatggtattgttttgatctaaccaaagtaatacacttagaaagatgtctagaagaatgcatctgtcttatcccctattttcagtctgttatagtctcaaaacaggatgcattcttttggacagtttcattgatatttgataggattactcacgccaatggttcggaactggtgtccacatggagggcgtccgtcttgtgaagtgtccgcgtttccttgaggattccgttcggtggctgtgctccattttgcgtcagcgtattgaactcattgttgatgtttgtgcgcagcacgtcgagattgggccgcagattcgtggtgctctggctggtgatcacggtggttgtcctggccgcaatgtcctcagcaccaatatcagtaagtaccttaaggttaaaatgggattagctaactacagagattggttgctagttataaaacaaacctccacgtaggagcacgggaagatgcccttcctgttggcaatcttgccctcgaaccagttgccatccactcggcgtgtcaaagtgaccaattcgcccttgttcaaggagagttcaatgcccgactgggcctggaagttgtatttggcacgggcctgaccctccgatggccgtttggatggggtacgggctccatctcgactgacaatctagaattttaaaatgagttgaattcattatcaataaatatccttttcttcagttttttaagaactgcaatcacacagtaaatatatatatatatttgtccctaagcattaataatcttttgatctttagtcaaaagaaattaagtttagtttgattccattgtctttgttctatataaaaaagtaagattaagattaggaacgatctccgtgggcttgttcattggatcgatctccaatgatttatataaatatttatatataattatataaatttaaaaaaaaaggaactttacggttccgagcttatcgctggactgcattctaacagatgaagatagaatcgctggtgtcaagaattccactcacctcaacatagctggctggaagcagtccaatcatggcattgtgctcgccctcataccagttggcatcaatctgccgcctgatgtagattgtgtcgcccttgcggaaggatagctccctgaaatgaatatggatatagtgctgcttggaagactcctccttacgggctacatacttcgaggtctgtccctggaagttaaagagagcccgggccaccgtcttggggcccaccagcgacttgagggtcacgtccgtggggaagtcatcgtagcgattgagggcgatgggcgacttctgcgacggggtgaagttgtccgtgtggcggcgcgaattcatgtcctgcagctcctgtagatacttgcgacggcgctcctcgtggtagagcttctgcatgtgctccgcttggcgaatggctagttcctcttccgacaagttctgacgctgctcatgcctgatgggggtcttgaagtggatgttcacgtctgtggcatagtaatgattgggagactctgttcagatgagaggcacaaagtggcaagatgcggtttcaggctaaagctcaagcgatgcgtcttcgccttcgttggttccccaggcaaccatataatctatatgcatgttctaaaacccagagctctattaccgatggggttctcaatgagatctagtcacccgccgctcctaaacaagttggttgagcgacgaacccattttcgccgagtgtacgcgttgtttaccctacaaacaacaatctcttctcgccatcgtagttgtctgagtcgtaagacgatctaaccgcaaatcgtcgtaactgccgccgcttctgttacgaaacaatggcttatctggggagtcgggtgcggcgtacatatcagtctgccaattggtaggcaaataaacagccagctcatagcccccacttggtaccccgaccagtaaaagtggcattccacaatatcaaattgaataaagcagctcttttaaatggagaattagctgcaattgaagttaatgttcgttagcttaacaatctgatgcttgcgctgtgaaggggggaactgaactctcagagtcatggagctttcctaagccaactaagatgcattcgagtccagcgaagttactcatcgcctaaagtagcccagatccattccttctcaattgatactacaagtgaattgcgcagcagacggtcaactgattaagaaagaatttagcttcagcatctattgacctgaatcggaaaatctcaaggggaaagccttgagagaatgatgagggaagggtggcgggggaggcggaattgttggggcagctgcacaaatattttcacggcaaatgaaccatgagccacaaagctttgtcttcgaacaacaacaattaacaacagctttgtacgtgctgtttacgccaagtgaagaaatggaaagagaggcttaattgacactcgggggattgggattttcactttcactgattcgctgcggcatattttgccagcgtttgaaagtgattgcacggagaaaaatcacagtgctatcaatgtgatagtgttatcttcttttataaacaggtttaactatcaaggtagctctatttgtagcacattctaggcagcctgtgttatattaatacgttatcattggatattttagttaataaagcgattgaactgctttaaattggacaaaagtgcacaattaagaacactttggctattatagcatgccctgtatggaaagctttgcatatttccatccattctggagacacaaacaagcacacacagaaacacaaggggctttcaaggcttttcctcgcatttcacgctcaattaagttttaaacgcttttctttactgttttcttcgttgagcgctcattagtcacaactatcaatcagaatctagaattggaatcgaagcctgagcaccaattctctgataaagctggggtgaatcggcgggcaacaacaaacaagcttcgcgcttcactggagccggagaaagagccggtgagagagggggcggaaagagagggagaatagtgttcgactttaccgtagcacgcgcagcgctcaactgaaaccgaaatcgaaattgaatggggaccccaaggcagctaagcaatatagggaaacagagcgagagagggatagctggagaagacgagacagagagggaagaccagaagacgaagcttcgcgtcgacgtcaaagagatttcgatttcgactctctgccgggtgagtaattcccagagatagcggcgttcgtattactacaagttccgttttttggcggcgccgcctcacgtttaattgttgttgctgttggtggtgcagtggggtgtgtgaattgcttgttggtggaacagtgggtcagagcggtcgaatattggtaactttatcacgcaacaaaaaattaaagattaaaacaatttctgtactgtctttcctttaaataaatcttaagaaatgggcaaaagtgtaaaagtgttttttgccacattaatggtctctacggctctattggataaccattttcgctcagtgtacttcccattatgcttcttcatcttgatcatagtaaaaagcttttcctgctaactacttttcaagcttttatcaaagactttggcattgaaacgtgtagagcgcggccaaaagctggcctctcttttggccacctctcttcgccaatcttaggcggtccaggtgataacgagtttttacttttttgcaaaagaaaaaccgtgagaaagtgcaaaacaggaaggtcgcttagtcaaatgagaaagtgcaaagcgaatataacggtgggagctgcaaaggggttcaatcgatcgcttgactttcttttatctcactggggggtctatcatagagaaataattgggaaaaatttgagccacttgagaaagtattttaaagtatttttaagttatttgcgaaatgtacgtgtgcctttatatgaaataatcaggagagctagttaataacaatggcaaagaagtctcggttgataacctatctgacatcctaatacgattatataatttagtgcagactttaagctatatactaactgcttggccaccgatgttgcatgttctgatatttccgatgctgcagctgttgcagattctgctgatgttgccgctgttgctgcagcaactgctgttgctgctgccacaggagcagtggcatggtagccccaatggcatgttggttggccagataggcctgtcgttggttaggctgcggtgttaggggcagtcccaccacgtggtagcccacggcgctcggaacaccatggtagttcgaaggggaaggtggccttagaggggcggatctattgtaatcgtattcccggcgatgtatccacaggattttgccacagttgggtatgtcgcagacgttgttgttgctgctgccgtcagccccactgctctgtggcctttgccagggattttcattaatctcctgactgtgccacatgccttgcggctccgggaatggctcatcctccagctccaagtcgttgcagctgctgtgcaacttctgtcgccagtggacagccttgctcttggaataactggaggatttgctgcggtgcggcgccagcgtttgatggatcatattgccgcggttgcataagacatttaactgacaattattgcgagcgcagcccgaaagacacgtttttttggcacggaaaagtgaaactgactaacggccgcgaccggtatgtgttcccgagtttgttttgttgacggcatcgtcttggccatggcaacgccaacgaactgcaggttcgcaccggcaaggtgagccaccccctgcgaagcagcaacaacaagggcagagccaccacccgaacaggcggacaggtgggtggtggcttgctggtttggtggcttggtggttcggccgggtgagctaagcaggtcaggcctgtccgcgtggccggcattctcattggagatatcgattaatttggtcaactgaggcacggcgcgccttcaaagcgaaattgcaccaattgcggaaattgcccgtcgttgcggtagtaaaaatgcttttagcaaaggtcatcgaatgacactggcttagtgcggaatagaatggatacattaagtgtcctgaccaggataagctaactaaaattaatccgctaactagtgtatatggacattgagctgggtcaatttcctttcatgtagttagtggattggtaaatatataagtataggtaaaatatttttcaagattgaaatgtgaacttgaagaatacgcttgttaaacatatgcacgatttggatataaatagtcccgataataatcaaatgaatagttatgaaattcaatcttaaattttgttcatatatagagagggggtaagactttccagcacatttaactcccattttcactgccttacttttttgctcgacttttaagcagcggatacttcgtgcactagaaatgccagggatcagctgcatcatcgtcactcacctgatccgtcgacggtgtcggtgctgtacgggaaatcgtaggaggagagacccttgactggtggctgtgggggaatggggggcgcgttcgggtcgagatctgcgccaacgattacagataaagagacgagtaaagggataatttcgaatagttaagaccaaatgggggaatacccaacaagcagcagctagctctacgagatctacgagatcaggcgaccaacgaagcgtaaggaaggtgaaaggttgccctggctcattccctgatcattaccattgagaccccaaccactgctccctgaaagtcgtacgtaataatcacctttaaaggtcaccatggctgttttcttgaggcgctctaaagttccattatccttggacttctgattgccattctccgcaccatcgggaacatatcgggccttgggacgatgcttgttgggatcgaacttctggttggcgaatatatccttcatgcagctagttagccgggagctcagctggtggttctgcgaccttgctggtcgtagtggagaagtggagctcgccctcaccactcgttgtggcttcttgggtaggtccttgggtttcgtcggttcggggtgcttgtgagccacccagtcggcactcagatggggtgatatgtcgtggacatcccgcatatccggatgtgaggtggacaaatagctctgggtctgcggctccggtgactcgtagcgcatccttagacgctcgaagcaatggctgttgctgctaacgctcctagtgggactcgatcgaacgggaatgggtagttctcttttcaatgccgctgtcttgctgatgatatcgatgtggggcattaggcggtcctgggcgctacgcagacgctttcttcctcgttccggcgatggcgtggctgcccgcagctcgaatttgtgggttagccgaggcacatcctccttcgacaccgcctccgtaacggtgtccggggcgtctttggatcccgcactcatttcgggatcgctgcgcgccctccgcagcgagctaagcccaaaaaaatcacgccgctcattggatggctcccgggactgttcgccggactgctgaatgctctcgaagtgctgacgcatcttccgcacctcgccggtgtagaccctctgcaagtaggagctggagcaggcggagacctgcgattggggcgacagactccgcgatcggtagtaggagtccgagtagagctcaagactgccgtctccgtgatctggtgatccgttcccaaagctgataagctcggtatcgtcgggcggacgatcgggcgggctgtgcaagtgaaaatttacccgggccgcaggacgctccccaaaaaccccgctcaaatcggtcagtgagttactcagctcctggtggtgatgaagttgcctagctcgctgacgttcctgcatgttttgattgatgagtcgcatgacctcagcttcgtccggcgaggaatcttcgcgagcgtggtagatggtcttgggcggctcatcgaactggcgatcctcgaagtactgtatcttctggcttatgtcttcggccggctcgcgagcttcaacttttggttccgcctttggcggtggcttgctcttgatctcctgacttggtgtgggcttgggtcttggtggcacatcgggcggtttcgtcagggtcaactctgcattcttggctgcaatggcaccacgggtttctcgtgccaccacaaccggagattggctgcgagtggagcgaggcaaagtctgatttgagtgctgttcatctcgcttacgttgaactggtcccagtagctgatccttggagatggtggagttgcaacgtaccttcagaccatttggacgggaacccttctctacggtcacgacatactgctcctcgacggctggagcatggcgattccccgagtagatttcgttcagctgctgggttatcttcttaatctgatccttggacaaagtgctcactaaatcgttgtccaagtgacgctccatttcgggttccgccaaggcctggtgctccagactgcaggccaaatcagccaccgtattgcgtctccaatggcgatgaactggctccgattggagctgctgctgctgcctgaggagattcagctgctcaaagttttcgcgcagatcctccacagacttcttcttggcaatcagtgattggtcggcctcttgacgccatttaatggagtctacatcttttgaacgaaagtgaagatccctttgcttttggtcatctcgtagctttccaactaaatattgcaactctttttcagcacgttcgtgaagtcgtacgcggcgccattcatcaaagtccaggagctcagcatcctttctcaagggatggaaactgctggaggacgtggccctctccagctgacccactcgctccaaagtgctgtagaagcgattcaattcagtgaaacgctcgcaattgttacgataccgacagctgggactatggcgttccaggtgagtcaatgaagtggcactgtgggctagttcaccacattggtagaggccatttgaaggagctggagtagccctcttgcggtcatctgcgctgctgaggctgctggccctggccaaggactgttctttgtccttggaacgcaggctatcgatgcggcgacgagacggagatctgacctcccggctaatttggggcaccctaacctctcgtgtgggcgaaaagcgacgttcctggctcaattgtggcgattggggacgagcgatgtcggtcacggtcacttgtttcggtggacgctgctccttgccctcatacttccatacaaggtcctcgatacatggttgctggatagtatgactttcgaaatcacacacatcctccggacagaatttgtactcctgcggcaacgacatggcctgtttggcgttgtactcgttccaaaagttggtcttctccctcactgattcgctgtaggagtggacagtaactggtggtggtggcttggtggtgcttttgccagactgacgctttcttggcacgtgaccttcgcttcgactgttctggagtggaaccagcgctttagagagtgatcctctggacttcccaacatatgtctttggcggtgctatgggcacaatttcctgacgcaccatagagtcaatggagaaggtggaattacttcttggcaagctgtcattggatccgttcttttcctggccttttcctgttttcgaggacgacttcctcagcgaccgagttccgcaatccaaaagcgtctggggtcgcacttgcgggaagcacatggtctgccttgtggtagtgctcactgtagtatgacgaagtcgtggcaaggacttgctgcgtgacgtcgcatacgaacggactgcctccctcacctcttggggggatttcaaggagggatcccttagtatattggtactggcctcaaagttggtgcgattagctggcagcgtgttctccagtcgctttttctcctcagcgaagcttctttccttcgatatgctcctgccaaaggccacaggacttcggctggaatgacgaagggccagaagacgagcggggcgtctactaggactcgaggacctcaaacgcgattgctgctgctgctgttgaacccgacgcgtgagtcgggtctccttggtggccgtaagcgtttgcaaaagggtagacaccgctcccgccgacttcgatcggcagatgggctcacgacgggaacaactcgaagtggccacctttcgcagggtgatggtagataccccaggggcagttccattcggcggttgaaagcactgctcatgcctggactttgacgcggagctcaggactcgcacagtgctcttcgtgcagctggactttcggtggggcggccttgggggtggatcatcctgttgcgaaacttgctgcttcttgctcaacggaatgaacgagggcagattcttcgatagctgggagaacatctttaccggcttatggtccctactcgtcgccaaagattgatgaggaggaggaggtggtggtggtggcggtgcaggtggcggtgttgctgcttttctcacgggttccacttcttcttccagctccttggtactgacacgaatctttgtgagcgtaggagtaatctgtatgaattcgaactcctccaaaatttcttagggaatgcattaaaacggattttaaattagccagcggcttctgttgtttcggtggtgcctgtgacagtgccattaacggtggtgctattttatttttatttgttgtttttttttctttcggtggagcccgcctctttatgggcagacaaatacaacttcaggtgagcagtgatagtgggtgatggagatacaaccagggcaagaggtggcaaataggttaaagtcctacatagtttggtgtacaaaagattgaccttggaaccaacaccgtttgcaggattagtgagtagatagcccagcgacttatgactatgttaagtattaaatatgattagagctacggcaaaaactaacccaaaacctaaccaaattttggcacttaccacggggtttctcgggcgctggtttacggaagccgagcagaggtggctctccccctgcctggagactcttgtaagcctgcttttgttcaacggggctaaggggactgctcacgggtacctccttcttacggaagaccagattggaatcgctagtatagccggattccttggccaaagctctgaagaggtaagaaatgaatggaggttatacaatataatgacatatattttaagttctagttactttgcttacctggacaagttaccttcagtgtacaatggcgatagtttcgattgttctagattctattgaaggaaaagagaaaatatatgaataagcattatttcatacacaaggataaaactgatcgagaggcttctattagtagttctggtgccttttgcaatgattcctgcctcgcttttatgtatctgacagaccgatggatattctgtccgggaaaacttactccgatgccgtcaaactcgtcgacgaattctatgataatacgcgggatgcgtgtatgctccctaagccactttgagaaggatatggatcaggcaatttggtaggcggtaaatggtaggcagggaaagatataatagtaagcaaatagttgggaacggtttagttcacgttagataacggaaaacggtctcgagtagctcaatcggaaggtgaattaactaagactaaatctagataatatagtagagatcataccccgttaaagatgtccatcacttcgtcccaccactagaattgtgaatagaataattgctgtgagttagaatacttgaggcgatctgaatgacagattatgtatggatggtgaatgtgaatgctgaatgattatggacccaattggggcttggtgggtattatcgtggcattgcaaatgagctggggcaataagctaatattgatcggtgccagtgaagtggttccgttgagcaaatacgactgattgctttgcgtgggttaaaaatgatggtggtgaagtggattttcccaaaatggtgagcatttcggtcacagagatgaaacggtacggtgaatgttatcggaactgatacttacctccttcttttccttttcggaaacagacgaatgacctgtcgtatagttttcgatgcgacctggctgattcttatacgagttttgcgctgattttatgggatttggcatagtaccatacaacctgcaacgtaaaaggcagttgttcgattagtaaggctcattcacgatcatcacgatcaagtatgaattataatgactcacttctcgtcctgattaaggttgcgcacattgacagccgaggagacggactgaacgcggtgcggattctgggtgcggtacctcaccgtcgagtaatccgaatcgtagttgggctcgggctctgagacgtatccgttgctcttgtacgacggacgggctgatcggagacggagaactgattagtcgaggtaagtattcagttgtacaagcacaaagcggttcctcaagctctactttcacataatcattacttcgtcttggtggtgtactggcggacatgatgttagcgttgttttgtggttttgcgttcggtgagttaggccttagattaggttagtcgtgaaatttagtagaagcttccaaattttcaatgatctacacacgggaacatgagagaaatcataggtaaaccaaataatacaacatgcatgtaaacaaaataaaaccaaaatagaatgaagcgctctatttgttagaggttagaggtcactagaccctgtctatatatacaggcgaaagcgagctactaaaggggaggagctactaggggatagcatagtttatagatcaaagaacaaagaatcacctctaggacacttgtagcgaatcacgaaatcatcttggggcgaaagcgaatggggtaatgagaaacgagagtttttttttaaagacaccgaaacgataagtcggagatcagatcaggctgaagcattagaaggattggggaatggacattttcggggagtgggaatgagctgggatgggaatggggtgtggtgtggtgtactaggaaatttgaatgcttcagaccaggggaaaagtgagtgacatttaccgccgttcttctgcttgtgtatcgtctgatacagacgcttgtaccactcatgctgatgcggctccttgacctcctgcatgtggataaggataaggaacaatactcgtatcaattcgtctcacttcgagttcaaaaccccccgttgtgccccagcgagtggggcttcctttaccgatctcaggatgatgggcattccatcgttggtcaccggaccgatgccgtcgtactgccttcgccctaactgtgccattttccggggacgatcgctgcccgtctccggttcgctcatatactcgtgcttgactttgtagactggaaaccgcagatgga

SEQ ID NO: 3992 - DNA, 1678 bp, DROSOPHILA
ccgatcagcccgtccgtcgtacaagagcaacggatacgtctcagagcccgagcccaactacgattcggattactcgacggtgaggtaccgcacccagaatccgcaccgcgttcagtccgtctcctcggctgtcaatgtgcgcaaccttaatcaggacgagaagttgtatggtactatgccaaatcccataaaatcagcgcaaaactcgtataagaatcagccaggtcgcatcgaaaactatacgacaggtcattcgtctgtttccgaaaaggaaaagaaggagtggtgggacgaagtgatggacatctttaacgggaatctagaacaatcgaaactatcgccattgtacactgaaggtaacttgtccagagctttggccaaggaatccggctatactagcgattccaatctggtcttccgtaagaaggaggtacccgtgagcagtccccttagccccgttgaacaaaagcaggcttacaagagtctccaggcagggggagagccacctctgctcggcttccgtaaaccagcgcccgagaaaccccgtgatctcgacccgaacgcgccccccattcccccacagccaccagtcaagggtctctcctcctacgatttcccgtacagcaccgacaccgtcgacggatcagacgtgaacatccacttcaagacccccatcaggcatgagcagcgtcagaacttgtcggaagaggaactagccattcgccaagcggagcacatgcagaagctctaccacgaggagcgccgtcgcaagtatctacaggagctgcaggacatgaattcgcgccgccacacggacaacttcaccccgtcgcagaagtcgcccatcgccctcaatcgctacgatgacttccccacggacgtgaccctcaagtcgctggtgggccccaagacggtggcccgggctctctttaacttccagggacagacctcgaaggagctatccttccgcaagggcgacacaatctacatcaggcggcagattgatgccaactggtatgagggcgagcacaatgccatgattggactgcttccagccagctatgttgagattgtcagtcgagatggagcccgtaccccatccaaacggccatcggagggtcaggcccgtgccaaatacaacttccaggcccagtcgggcattgaactctccttgaacaagggcgaattggtcactttgacacgccgagtggatggcaactggttcgagggcaagattgccaacaggaagggcatcttcccgtgctcctacgtggaggtacttactgatattggtgctgaggacattgcggccaggacaaccaccgtgatcaccagccagagcaccacgaatctgcggcccaatctcgacgtgctgcgcacaaacatcaacaatgagttcaatacgctgacgcaaaatggagcacagccaccgaacggaatcctcaaggaaacgcggacacttcacaagacggacgccctccatgtggacaccagttccgaaccattggcgtaccgcgcactgtacaagtaccggccccagaactccgacgaactggaactgctcgagggagatgtggtccatgtgctggagaagtgcgacgacggatggttcgtgggcacctcgcagaggaccggctgcttcggcacattccccggcaactacgtggaacgggcctag

SEQ ID NO: 3993 - protein, 500 aa, DROSOPHILA
MPNPIKSAQNSYKNQPGRIENYTTGHSSVSEKEKKEWWDEVMDIFNGNLEQSKLSPLYTEGNLSRALAKESGYTSDSNLVFRKKEVPVSSPLSPVEQKQAYKSLQAGGEPPLLGFRKPAPEKPRDLDPNAPPIPPQPPVKGLSSYDFPYSTDTVDGSDVNIHFKTPIRHEQRQNLSEEELAIRQAEHMQKLYHEERRRKYLQELQDMNSRRHTDNFTPSQKSPIALNRYDDFPTDVTLKSLVGPKTVARALFNFQGQTSKELSFRKGDTIYIRRQIDANWYEGEHNAMIGLLPASYVEIVSRDGARTPSKRPSEGQARAKYNFQAQSGIELSLNKGELVTLTRRVDGNWFEGKIANRKGIFPCSYVEVLTDIGAEDIAARTTTVITSQSTTNLRPNLDVLRTNINNEFNTLTQNGAQPPNGILKETRTLHKTDALHVDTSSEPLAYRALYKYRPQNSDELELLEGDVVHVLEKCDDGWFVGTSQRTGCFGTFPGNYVERA

SEQ ID NO: 3994 - DNA, 3131 bp, DROSOPHILA
tggaaaaataaatttaatttgattaaaaaattttactgagtagattccatgtttagtaaaaataatgtattatttaagatgtaataatttagttcatattgaacttaaattcacttttgtttgtatattttgagtaaacaaaactaagagcactctgtatttcgtgcagtgtagtagatcggttgcggtgggtggcactcagataaatgcaggagaaaagtggaagcttgtagagaaggggttttccgaggaagtggggggaggggaggggaggggggttgtagctctgcccagataagaacgaccctgaaagcaattgtgcacatactattactactgctctcccccttcatatttgtgcgttcaatttaaaaaagaaccacttttgtggtcgggctatttcgatgttattttgttttgttgacaaaccgattagcaggtggtaattgtgggtgcagtgtatttcatagctgatggccactggaatttgaacgttagaactttctcgtttcggtagaatagcccatttattgtagcacagttgtttagtaaatagaattatatccaaatgatatataaatctagatatgctcgattttacgcctattcataatcgtgtattttcatttcattcgggtttttacgaaatataaagattaacgggtattagagataggaataaagatttcaaaaatagtctcataatacagttaacttatccgcaaaacagaaacattcacatatcgacacctttcaattgcgagaaatatataaataaatacttccgcctaattaaacccattttatggcaacacatttggaaagatatgataaaatataaacatgaaaatctagataattatactcgtacatcagatacttccgatttcagatgaaattcctttgtatttctatatatattctctattatatcgttcttacaatgataaatctattttagaatcacctgcaaaaactaacaactagtatatcgactcacctgtaattccgattcggtgacgtcgatttcaccacgataaacaaaatcgatgatcgttttcaggtcggtgaagataatgtcggcgggaaggataattgtgggatgtttgcacggattctcgagcagtagtttttggaaatacgtcgaacaggcggacaggacgaccatgcccatgcctaaactagtcatattttttgtatcttttccgtcgcgcgctactacaatttgtgtgacgatggcttggccggtggatgtcacgccgctcacgcccgctgcattgttcgaggcgctggatgaattggacgccggcgaggccaccgagtgctcggtcttgcagatcttgttcggcttatgttcgtgctcgtgatcgtgactgtgctcgtggctatgaccgtgtccgtgcgtatgtcctccgtgcccgtgcccgtgtccgtggttgtgttcgtgctcgtggtcctcggcgtctgaatcgtcgccagaacccgaaactggtatgtaattgccgtcggccgtctgctgaaggctcacaatggaattcggattttggccctggatgagaatggtctgcgggtggtggtggtgcgccggctgcggttgctgctgcgttgagccgctacttgagcctccagagcttcctgctcctccgcccgatgacaaatctggcgatttggagcgctttagtcgagacttgcgcggcgtcggctgcaaaccggatggcgtctgtgatgcctgctgtccgccggctaaacttccgctgctgccgctagccgaggagctcagcaattgcccggaaagagatacacttccgctggacactccgtgttgcgtaagcagggcagcgtttatttgctgctgctgctgctgttgctgctgggcatgcacctgctgttgctggtgctgctcctgcgcctgctgctgttgctgctgttggtggtgttgctgctgctgttccaaggagggcgacggagctccgggaactatggcggcgttcactatattgccaacgaccgcctgctgtatgttctctgaaactgtgatcgttgcagtggccgcgtcgttcaggtcatccgcgttctcggcggtttcgcagagtcccttgatctttagctgctcggcggtgcgcaagaggccctgtaagaaaaaacgaacatcaaattagtaacttaatcaggtttatatttggaatatatttccgaaggggtttaattctaaagtccagctgaacaaactgcgatataatgcgtactatatgcaatcttctgtatgctgttgatgacggctatacactctattttctatcgtatgattaatggattattgccaaatatatgtgaaatagaaatagtcacgttacaaacaagtttcgtaaccaattcaaatctggattcatataataataacggatacaaaggctagttgccacgtttcaaggatataattgtatgcatcaactcagcattttcaaccaaggctgtttgaagaatgcgagaatgcgtttcccttggtaatttacacacactgaatatggaatgcggtgatttgattgaaaaatagcctatatatcggatagttgaaagagtttcaaagagccgcacccattccgacagcgagacgcccgggggaaaacatataacggagcttaggtgatggaaatttgtttccattcgtttttcttttttttccttttttcctttttgggatgttgttgccttggaggcgttgaaggcggaggtggaggtgcttcgtgtttgtccatggagcgctgtgacagtcattatggcgtcgcttgtcttggcatggtcggtcaccagtgtccacaacagtggtgtccgttgcccaacccgtccaacaacactttcccattgcccgttgcccatcgccaattccagcgacaacgcccacatggcccaaaaccctctggccaccctcatctaccaacccccttcttttccaaaacccaatccgctgcagttggcagtcgccgcagcaattggacagacaaatatttacttcagaagtttttcttttaagcagtgcgcaaaagccctcccacacccgctttctttccatttttatacatatatatatttttttccatgcttcgcattttaaattaaaaatacggaaaaaa

SEQ ID NO: 3995 - DNA, 5358 bp, DROSOPHILA
cacgagcactccgatgaacgacgagctgaaaaaataattattattttaaattccgttttgccagcgaaattcggtgcgtgcgcgaaaaagagtgcggaaaagcgcggttgagaaatttaatcggcccattatgaagcggtcaaagtgcggcgccaatgcaaatggttagccaaatggcaagaaatatgtagcgatagcgtgccagcccagtaaaatcaaatagaatcaaatttaagtttcttgctttgcgaattatgaaaaaccaatcgcaatgcgtgtgtgtgtgtgtacgtgtggtgcgtgcgcgcgtgtgttagtgagcgagcgtagaagcagaaggcgtagcgagaaataaaaataaaaaaccatacaataattgatttaaaaaaaagaaaagcaaaaaggccaacaaacgaaaaacagcagaagcaacaaaaacacacgacaagcggcagcaaaaacaacaacacaaaactggcggtaaatacgcatacagtacgatacaaaaaaataaactagaagcaacaacaaatacgcaacgtaacgggaactctttgacgtatttcctctattattatgcaaaaaggcaggcggcaaattgcagcagcagcgaaaatcaaatataaatagcgaaaagtatactggagtatacacacatttccgcagcgtgttgagcacgccacaagcataaacaaaagtgagcaacaggaattcagctaggattcggcgtgaaacgaatacgaaaaaccatacgaaatggcagcggttcgaggacatcagtatttcagtctgcgctggaataactaccagaacacgatgacgtccgtgtttcagcagctgcgcgaggatctctcctttgtggacgtcactctgtcctgcgagcatggatccctcaaggcgcacaaggtcgtcctgtccgcctgttcgacgtatttccaaaaactactgctcgagaatccgtgcaaacatcccacaattatccttcccgccgacattatcttcaccgacctgaaaacgatcatcgattttgtttatcgtggtgaaatcgacgtcaccgaatcggaattacagggcctcttgcgcaccgccgagcagctaaagatcaagggactctgcgaaaccgccgagaacgcggatgacctgaacgacgcggccactgcaacgatcacagtttcagagaacatacagcaggcggtcgttggcaatatagtgaacgccgccatagttcccggagctccgtcgccctccttggaacagcagcagcaacaccaccaacagcagcaacagcagcaggcgcaggagcagcaccagcaacagcaggtgcatgcccagcagcaacagcagcagcagcagcaaataaacgctgccctgcttacgcaacacggagtgtccagcggaagtgtatctctttccgggcaattgctgagctcctcggctagcggcagcagcggaagtttagccggcggacagcaggcatcacagacgccatccggtttgcagccgacgccgcgcaagtctcgactaaagcgctccaaatcgccagatttgtcatcgggcggaggagcaggaagctctggaggctcaagtagcggctcaacgcagcagcaaccgcagccggcgcaccaccaccacccgcagaccattctcatccagggccaaaatccgaattccattgtgagccttcagcagacggccgacggcaattacataccagtttcgggttctggcgacgattcagacgccgaggaccacgagcacgaacacaaccacggacacgggcacgggcacggaggacatacgcacggacacggtcatagccacgagcacagtcacgatcacgagcacgaacataagccgaacaagatctgcaagaccgagcactcggtggcctcgccggcgtccaattcatccagcgcctcgaacaatgcagcgggcgtgagcggcgtgacatccaccggccaagccatcgtcacacaaattgtagtagcgcgcgacggaaaagatacaaaaaatatgactagtttaggcatgggcatgaacggcggcctgttgggcgtgcccatgggattcctggacttcacacccgagccaccagcaccatctgccaccccagtcaccgtcacggagcacgtcgatctgtcctgcaaccctagcacggacacgcgcgatctatcaaataccaccgaaccgctcgatatagacaatcatctggctcagcagatccatcggctggatcagtcccccatgcactcgatatcgcaccatcatacaggcgatgagagcaactcgaatctggtgcagcatatcaagagcgaagtgatcgaggccaagcacctggctgcccagcatcatgcacttagccaggcccaacagcaacatgcccatcatcaggcccaccagcagcatcaacagcatcagcaacagcagcatcaacaacagcagcaacatcttcatgcccagcagctcttggcccagagtcagctgcagcagcaacagcaacagcaacagcagcagcagcaacaccaccagcagcagcaacaacaggcagcagcagccgccgcagcagctggtgtgcatggccagcatgggggacatgtgacgcatgccgacatcggcggtgccactgtcatggagattgatccgagccagattaaacacgagccgggcatgataataacgccagagattgtcaacatgatgtcctccgggcatatggacatgtataactcggatacgagtgaggattcgatgatgatcgccaacggttcgccgcacgatcagaaggaaccgcactatacgaatttggatcagcagcacggtctgggtggcagcgtttgcggcccggggcccggcggtgctggtggcggtgggggcatgagtggtggggctggctctggctctggcgagaaaggtcagtttaatggtcccaaagcttggacacaagatgatatgaattcagctttagatgcattaaagaaccaaaacatgagcctgacgaaagcatccgccatttatggcatcccatcgaccaccctgtggcaacgtgctcatcgcatgggcatcgaaacgcccaagaaggagggcggcaccaagtcgtggaacgaggatgccctgcagaatgccttggaggcgctgcgttcgggtcagatatccgcgaacaaagcgtcaaaggccttcggcatcccatcctcgacgctctacaagattgcacggcgcgaaggcatccgccttgcggcgcccttcaatgccgccccgaccacgtggacgcccgaggatctggagcgcgccttggaggcgatacgggcgggtaatacttcggtgcagaaagccagcgctgagtttggcatacccacaggaacactttacggacgctgcaaacgggagggcattgagctgtcgcgttcgaatccaacaccctggtccgaggatgccatgaacgaggccctgaactcagtgcgcgttggccaaatgtccatcaaccaggcggccattcactataacctgccctacagctcgctctacggccgcttcaagcgcggcaaatacgacgtggtggccaacacgagtggcgtggcgctattgaacacctcgggcaacaccaccggcagcattgagattatcgagcacagtcaggagaattcgttgcatatgttacagcaacagttcccgtatagtccgtcgccgcatccgccaacgccgcagcatcacagcacgccgcagcaccacagctcggcgcagcagggtccgccgacgccgcagcacatgcagcagcacgtggtgcacatgcaacagcagcagcagcagcagcaacagcagtcgccccatccgggccaccatccgcagcatatgcagcaggacgtggttacatcgagcagccaggtggtgcacagccaacagcagcagcagcttcagcagatctatcagcaccacgggacgccggagcgtagttgagaatcactgcatgctgcgacattaatgggcagcaccggcggtggaggaggtggtggggttggtggagtagcagccagcactagcgacggcacggcggccagtagcacgccctttgccagcatttcggcgctggtcagcggaccgtccagtgccccaccaccgccggtaactgccagtggctcgtcggcagtcagtggcggcaccagcaagcgcaagaaagccaataagcaaaagcgttgagagcaggaggatgatcagccacacagggagttggaaacaattgcgggagtggccaggcccgaggacatcaagtttagatttaattgcaagcactggaagcgcaagttgcggcagtttcatttgctattgtccaaacagtagtcagtcagtcagttaggaaggtacacacatatatgaatgacccacagacaaaaaattcccaagggtaggataaagcaatcacaaaaccacttttcaactagatggacattaattacacaaccgagatgtgtataaaatgtaaatatataacgaaatatgctttatttacattatacggaacatagttatataggttttaggttcgcgaaagtcctttgttctagttaggtaaggtaaggtggagaaagaagaaagttaagaaaacataccttgaacgtaagagaatgatgaattttagatttgcctctagactcgaaagttaatggattcgttttgggctcgcagttttaagagcactttgttatcaatggatatagacacgcgtatttattttggtctcgcgaccattctgagaaccttgaatcggcagttgattgtggaatttcgaactagattgttttcccttcaatgtgcttatgtgctttgttataattttcgcttagtgtgagactgaaagtgcgcctaaaactgttgaaaaaccccatgcccaatattatagtgaagacgcataaaacacaacccatacatgaatcaaatgctttataaccatattgtttgaacagatagaacgaagtgggagaataccttaacgtagaattaaaccaaattatcaaggttctagaacttaaatcattagcttgtaacgataaaagaaagcaaaacgagttatttgaattttactggaggcgtcctgaattttggattgtatattgatttgatttcaactgaattaagaatatagccaataaataaatgtagaaatgaagtaattgcaaggaatcaacaaatggaatgtatttttgaaagaaccggaaacagaagcagctgaaattagcgaatcaaactgcaaatgttgttaatactaagctcttaaataatgtcctttgaagtcacattcaaacaaagatttaaaacaagcttgtaagaaaaagaaaccaataaatacacacgtatatatatggatac

SEQ ID NO: 3996 - protein, 1064 aa, DROSOPHILA
MAAVRGHQYFSLRWNNYQNTMTSVFQQLREDLSFVDVTLSCEHGSLKAHKVVLSACSTYFQKLLLENPCKHPTIILPADIIFTDLKTIIDFVYRGEIDVTESELQGLLRTAEQLKIKGLCETAENADDLNDAATATITVSENIQQAVVGNIVNAAIVPGAPSPSLEQQQQHHQQQQQQQAQEQHQQQQVHAQQQQQQQQQINAALLTQHGVSSGSVSLSGQLLSSSASGSSGSLAGGQQASQTPSGLQPTPRKSRLKRSKSPDLSSGGGAGSSGGSSSGSTQQQPQPAHHHHPQTILIQGQNPNSIVSLQQTADGNYIPVSGSGDDSDAEDHEHEHNHGHGHGHGGHTHGHGHSHEHSHDHEHEHKPNKICKTEHSVASPASNSSSASNNAAGVSGVTSTGQAIVTQIVVARDGKDTKNMTSLGMGMNGGLLGVPMGFLDFTPEPPAPSATPVTVTEHVDLSCNPSTDTRDLSNTTEPLDIDNHLAQQIHRLDQSPMHSISHHHTGDESNSNLVQHIKSEVIEAKHLAAQHHALSQAQQQHAHHQAHQQHQQHQQQQHQQQQQHLHAQQLLAQSQLQQQQQQQQQQQQHHQQQQQQAAAAAAAAGVHGQHGGHVTHADIGGATVMEIDPSQIKHEPGMIITPEIVNMMSSGHMDMYNSDTSEDSMMIANGSPHDQKEPHYTNLDQQHGLGGSVCGPGPGGAGGGGGMSGGAGSGSGEKGQFNGPKAWTQDDMNSALDALKNQNMSLTKASAIYGIPSTTLWQRAHRMGIETPKKEGGTKSWNEDALQNALEALRSGQISANKASKAFGIPSSTLYKIARREGIRLAAPFNAAPTTWTPEDLERALEAIRAGNTSVQKASAEFGIPTGTLYGRCKREGIELSRSNPTPWSEDAMNEALNSVRVGQMSINQAAIHYNLPYSSLYGRFKRGKYDVVANTSGVALLNTSGNTTGSIEIIEHSQENSLHMLQQQFPYSPSPHPPTPQHHSTPQHHSSAQQGPPTPQHMQQHVVHMQQQQQQQQQQSPHPGHHPQHMQQDVVTSSSQVVHSQQQQQLQQIYQHHGTPERS

SEQ ID NO: 3997 - DNA, 3170 bp, DROSOPHILA
atcagcagaaagtaatgaaaaacaccgaagttaatgtttaaacataaacacacaatgagaaaagagtcgtgtttccatattcacttgatttaatcggcatgcgatgttactcacagcgaaaggaaattcagcaagcttgaatcgataaaattgttgtatatattaaatagtttaacactgtgtaattttatttatcctagctcgattctaagtgcttgcgtaaatgatcatttaaattttctaacccgaaagaacttatttattggtttatttatacaaaattgaaatgaagtgcatatggaaacacaactcaaaaacagacagcacaaatagaacaacaggaacaaatgaccaacgcatttcgaaaggcgataatcatttacacgaaaaaccaatataattaaacagaatcccacgcaaactgaagactaactaacaaccaagttaagggctagttaatggagccggtgccaaagcaaaaaaggaaaaatgataacaacacctacacacacgacaactaaatgtaacaatagcaatacattttaatgaaaattgtagtccaaataatttgcatacatttgtattttgtccaaacttagttgaaatgattaaccgaactgtgaaagagtgcaatagaaatcgttttgcttctagattagtgaaaaatacaacgaagcccctaatttgaatacgaagcaacccaaaatccccgccctcccgtaataacaataaatacatatgcataattatgcaaaagtttgagaagatgaaactagaaagtctgtataatgcatacataatatacgactccattatacacacacacacgcatactaaggccgatgaataacatatgcatatacaatatagacatatattaaatatatatcattgtaataatttgtaatgtttatcagtagaattatgatccgaggtggagcagacgagtaaaacgcatgcagagatccattaaagtgtactgtaaaatgtgccacacattgttttatctaaatttattaaaggatttattattttgcagagggtaagttctaaaacttaaaaactagtcctgtttggaagatcctaatcattgcaacgttttataaatcaaagccgaactcttactctagtaaaaatttggctacgttcggaaaattagccagaacataggaaaaaccctactgaattaaacaaaaaaaaacgtgtttaacatttggctacgatcgtgttagtattgcatacttttaggtccatctttttgcacagagttttgtgtgaatcaacaataaaattggcactggaattggtcgatggcgtcccactactgattgccaggcgccgttgctcctgtagtcttcatggccagcatggcgtccagttcgccctggatgctctcgaactgattgtacagttccattagttccggttgtgtcatttcgatgttgatatcctcgccgacggccgttttcatttggagcacggccagcggggtcttctcccgctgctggcaatgcgaggagatctccatgttgagcttccaggccacatcttcgatgacatttgattcgtaccgcttgctggccaaattgttcataatgggcgtcgtttcgcgcacccacaaacgcaatatggcatcgatcttggcctcatcctccagctggagtttctcgcgcagctcacgctgcagcaaacttggcttgatgataaacgtggagatgcgacgcaggatgtaggagaaggtcttgatcagcagcaggaagtcctgacgcggtacgcccaccaatcgctccagttcctcgagtgtgtactccggttcggtgttacttgtggggttctcctcggtgctgctgtccacccggccggtggtcgtcacactggtgcccactgtactactggtggcactcgccgatgctacgctgggactcatctgccggtgggtgtagaacagaaccgtcgtaaaggtctcgtagggcaaggcattgatgattttgatgccctcacgggctctaagatataaatgcaagaaattaatctctataagaacattgatattacatacctttccgtgatctttatccagttaatgctcattgtgagatatatttaaaaatttttaaggaacatagagttattaagtctttaccagcacttcttttattatgactttaatattatttgtttatacagaccaacaatatacaaaaaactatcgacttgccacggtgcggtgctgccacacagttactactgccaataataacggtaagtgctgactaaaatacaaaaatattacattttgcgatgtgattttaaacatattctttattaattttttagatttaaatgttttattaaattaatttatttttctgtatttaggcctgaataatttaccttataaaattacaatgttttaaataatatttgctgttatgtttcctgcaaaataaaattcgtgaaaaaaagccgcaccagcaaatatcaataccagattgtcgacggcaccgacgatcgacgattcaatttgtagaagattatcaagtacgaatagttttccaactcattaatataatcgtcctacctggcaactccgctgatgcctatcgatgctccgctcgatagcgccaacaatcgataagcagtatttgtgtattggaaacgcggcttaacttaatgcagatttttccgctgattcggctgcgaaagatgcacttttaaggcgcagcgagtgcacccacgccccgagttcgagtgcagttgcagtcgggaaagcttgacaagtgcgcggagcaaggagagcgacgagttcgttgagctacagcgaaacggaaaagtgtaaaagcggggtaaacaggcgcagcggagcggatgataaacggaactcgggatcggaaaattggaagcaaaaccaaccaccgattataaaaaatagtcagcatcttaaaagtaaggatttcaagctaaggtttcagcgaaagcccgagaaaaacaaaaaccccaactaaactaacggaacagtgcgtcgggatatatgcatgtgtatgtggtatacgtatgtgtgtctttggctgcgtgcgattgtattgttcctgtgtaaataaacaaaacccggctctttagtcttccactagttcgtttcgcgtttctctgcgaggaatttttgttgaaaa

SEQ ID NO: 3998 - DNA, 1117 bp, DROSOPHILA
attaaagtcataataaaagaagtgctggtaaagacttaataactctatgttccttaaaaatttttaaatatatctcacaatgagcattaactggataaagatcacggaaagagcccgtgagggcatcaaaatcatcaatgccttgccctacgagacctttacgacggttctgttctacacccaccggcagatgagtcccagcgtagcatcggcgagtgccaccagtagtacagtgggcaccagtgtgacgaccaccggccgggtggacagcagcaccgaggagaaccccacaagtaacaccgaaccggagtacacactcgaggaactggagcgattggtgggcgtaccgcgtcaggacttcctgctgctgatcaagaccttctcctacatcctgcgtcgcatctccacgtttatcatcaagccaagtttgctgcagcgtgagctgcgcgagaaactccagctggaggatgaggccaagatcgatgccatattgcgtttgtgggtgcgcgaaacgacgcccattatgaacaatttggccagcaagcggtacgaatcaaatgtcatcgaagatgtggcctggaagctcaacatggagatctcctcgcattgccagcagcgggagaagaccccgctggccgtgctccaaatgaaaacggccgtcggcgaggatatcaacatcgaaatgacacaaccggaactaatggaactgtacaatcagttcgagagcatccagggcgaactggacgccatgctggccatgaagactacaggagcaacggcgcctggcaatcagtagtgggacgccatcgaccaattccagtgccaattttattgttgattcacacaaaactctgtgcaaaaagatggacctaaaagtatgcaatactaacacgatcgtagccaaatgttaaacacgtttttttttgtttaattcagtagggtttttcctatgttctggctaattttccgaacgtagccaaatttttactagagtaagagttcggctttgatttataaaacgttgcaatgattaggatcttccaaacaggactagtttttaagttttagaacttaccctctgcaaaataataaatcctttaataaatttagataaaac

SEQ ID NO: 3999 - protein, 238 aa, DROSOPHILA
MSINWIKITERAREGIKIINALPYETFTTVLFYTHRQMSPSVASASATSSTVGTSVTTTGRVDSSTEENPTSNTEPEYTLEELERLVGVPRQDFLLLIKTFSYILRRISTFIIKPSLLQRELREKLQLEDEAKIDAILRLWVRETTPIMNNLASKRYESNVIEDVAWKLNMEISSHCQQREKTPLAVLQMKTAVGEDINIEMTQPELMELYNQFESIQGELDAMLAMKTTGATAPGNQ

SEQ ID NO: 4000 - DNA, 5166 bp, DROSOPHILA
tcttgagcggcgaggaccttatctgtggtctcccactaagggactattttaggaggcggggaacgatctcaagtgactgactcatgtagtgtgcacttaaattacatgtttttgagcaatgcacccatgtcgccttagataacaaaatcctaaatataatttatcgctctcgattcatttacataagatatgaacggagcccaaaattgtaagtctttaaatatattcgtgttcatgtgtgaacagcttcctgaagggcagcaacaaatttataggagtgcaaaggacttacacggtcgtcgtgatcggctgtcagaattaatgtcgatgggtactcctgatttggattcagaggaatatgaacgttgtgaagaggcgagaatttaataagattcgcgaagtgtaccttttcatcgggattgccataatcggaacaccaggcatgaccgatagtaaacttgtggaatcgcaacatatccattacaccaacttgggccacggccgctccgaaaagatcaggacgctgattgatgcaagcacccaccaaaagtccaccattcgaggcgccctgtatagccaatcgatccttggttgtatagttattcttggtcaaaaactcagcggcggcttgaaaatcattaaaaacgttttgtttgctcaacattctacccccattgtgccattccatgccatattctccgcctcctctcaaatttggaaaagccaaaactccatcaaacgtatccatgaacatcagactcagtatgccgaaggatggcattaggctgtagttaaatccaccatatccgtatagtaaacaagggcggggttccgcaatatctctctttcgttgtacaataaacataggtatatcggtgtcatcagtgcttttataaaacacttgttccacgctgtagttatcccggctaaagccctccaaatttagactaatttcgcgcagaactgtcggcttttcggatggtttggcaaagtcatagtaaaatattatacctggtgataagaacgatgagaaaccataaaatatttccgaattactcttctttcctgaaatcccatttattgagccaatatccaggccaaattgacggatgagctttcctgtgctaagatcgcgggcttgaagaatatgctttacatcacagttatagcaaacgactaatttattcccatcaacgcacttggcccactccaaaacatctttcttatgctcgggtattggggtggtccagtgttcctctgctggattattaacatcaatcacaatcacccggtaattaggggcatccttgtttgtgtggaagtacaaattagacccctcgttggtaatgtaatcgaagtcagcctcaaatttatctacaattggcttaagttccagttggaatgcgtttttctcttccgatcctaattcagcatagtacagcatattgtcacgaaccgtgtgacttatcgataagataaggtattttccgcagtcggaaatatcggttttgaatcgccaagacgggtgttcggggaactctgcgatcaatatatcttgatgggggctctctcctagtagatggtaatacagtttctgattctcagccagctttgtttctgatccgtcaaatatcccgtcttgatcggtatatcgaccatagaagaatcccttgctgtctttcgtccaggagacattagagaacttcactttttccagaatttcaggtaagtcgataccttccttggtatttcgtattcggattttattccaatcggaaccactttcgctcagtccataggccatgaacgccccatcttccgagaacttgatatggctaattgcagtggttccatcggaagatatgctattggtgtcaaggaaaatagactctgggctctctaaagtcttttgctgcatcaaaacactctgattttgcaggccagtattcttaaaaaaataatagtagttaccgtgacgcatgggacacccatacttcgggaaattccacagctttgtcagtttggaattgatattctcccgttccgcacttctttcaaggaaggattggctaatgttgttctgcgcattcacaaattgttgagtgtctacagagtctggatcttcaagccaccgataaacgtcttttattttatacccgtgtatcatttcttcgaatcttccatcctttcgtgcctctggatacacaattctaagacttgcttcctcgactgaccgacttaagtccgttggactctggaccaaagcgtccgagcgagacataaatatgcgattaaaaataagtgggaaaagatggaaaataaatttcagtatctgtgtttcctaaataaacggcaaattttaaatgtataatgacataacttagtaagccaactcctaacagttttaatgtttacctctttctagagcagtgcgtcagtttgcacaaatgaatgattaggccctttcggatgcaaacggttaggataatggttatccattagactggaggtctaaattaaagtatttaaattcctatacgatgtgtcgcgcataccatctataccgtctattccgccgtaaggcccccttccacgacacatgacatctctggggcgcctttctgattggtgcacttgctcttattggtgtaatttttgtaagcctaagcatgctgagcatgtcaacaaggggcgatacacagcccgggaaaaagaaagacagaagggcgacggaggccagaaaggcaacaagtcaagagcgctgacagccaacatgagcgcaccagcagcagagatcgttggttacaacagttgcactgtgaaaaatatgtggggccgcgtacctaattatataaaatattgtaggtgcttgcaacgttaagcttacttttttttttctttgtcatctaaagtcaccctcggctaatcaaattggcaccaataagctttctgttacattaacgtctgacattaaatattttgaaattgattaataataatgtttatgataaaacaggttaacaggagagctggtaagatcgctaccattgactaaatttgtttcttctggactttattttataaaacagtgtagttcctccatagcatatgctggtagccaacgatcatactacgttgttgcatcgattggaagctgggctttgtgatcgtcattgcagatttgtggcttgatcaagatcgagaattttaacattggctcgtcttcatctctgaagtgatcagacacacgcaaagcatacacactacaccagagcagacctgaattgggttctgtatctgcatctcgaacggagggtatagagatgaaaacgcttgtgtttttgtcgcaaatcgccgagattgcgatctcattaaagcgaattatttgtgttgctgtcccgttctttcgcgctgctactatcactgccttctccgattccctgaagaattaagatcgacgatcctgcataagtttgattctgttctgtgactctgcagtggtagttaattttagtctgccgtttgcaaaagcttatgcactagcataaataaatatgcttttattttaatcaacgtggacgttagtccaaatagtgacgaaggacaacgaggaaatgagtgggcatggcaaaaaggttgttggcaaatcgatagaaatttacaataccactaaaactatgataaaatatcgaaaagtttttcaaaaacgtgggcgtggcagttatgtgctgtttttggcaacatggatcaacaaactttgtctttgtcagctctctaggttttatagttccttaaatcctgatcatgaatatatgttacaatgaatctagtatacacttttactctacgagtaacgggtataaaatgtttgcttgtctcttgggtttgtatgcaagaaaacagtactctaaaatcgaaataaaatacctgtgttcagttacgaataacagcttatcgtggctaagaagtttgttttatggtctatttgtaaagtcaagtgcaacatttttcgtcacctgacagccttcttggataacccgatgatcagaaaaaggctttaacagaaaagaaggcgaaatgtctctaatgtccaaagcagtaattgattttaaatcaattgttatcaaaattgcttcctctgctgctgttatgtgaggtgaatacataacagcaacagatcttttcccattttttttttttttttgttttaactgaacgtattatagttacgcaaaaacgaggtagaataacgggtgtacaagaatcgagaagttcgactaaatcattctagtttgttgaatatagaaggtatccattttccacagaaataattcatatggtataaaactatactgcgcctttttatttcgatttataaatgtgcctagtgacttgctttagcatataaactgacctccatttatattcctctatttccgtttaagtaaaatcaccgtggacacgtgcccagccatatatttatcacttccacatctcaggttgggctatttagagaaagccacagagctcatcaatctgggcccgccaacccattccatacaatatgtacctcttagtcggccacaactgataagaatgttttggcatcgtgcggatgtcccacgagtctaatcaggttgtaatatgaaggacagcagccagacataaaactggctgagtttcgcccctgacttatttcaggtgactcgtttttacgacttttctgactgcaggtcacccctttccgggtccgaaacttcagatccattcggggttcgttctcctgctggacatttggcaaatgaacggccagtgatttcgttctcggcaaatgaatgaattagttccttggagacgactcaaggtcttcggacacacaacgctcagctgattgatgagctgtggaccactgctaaaaattgccttcattggtagaaattgaattttctcaaaattacccctttaaatgtttatttaaatttggaaatgaagtttggtattgatgcgagcgaagaaagatttaatcatattctttaatcagctcgataaatgggtgaaaatcaaatgggcaaggtattattagaagggtatctgtatataataaacagggtatatatagcaaatggaatagtagaggtttgttatagcattcgttgacttgacctc

SEQ ID NO: 4001 - DNA, 2404 bp, DROSOPHILA
atgtattcacctcacataacagcagcagaggaagcaattttgataacaattgatttaaaatcaattactgctttggacattagagacatttcgccttcttttctgttaaagcctttttctgatcatcgggttatccaagaaggctgtcagagtccaacggacttaagtcggtcagtcgaggaagcaagtcttagaattgtgtatccagaggcacgaaaggatggaagattcgaagaaatgatacacgggtataaaataaaagacgtttatcggtggcttgaagatccagactctgtagacactcaacaatttgtgaatgcgcagaacaacattagccaatccttccttgaaagaagtgcggaacgggagaatatcaattccaaactgacaaagctgtggaatttcccgaagtatgggtgtcccatgcgtcacggtaactactattatttttttaagaatactggcctgcaaaatcagagtgttttgatgcagcaaaagactttagagagcccagagtctattttccttgacaccaatagcatatcttccgatggaaccactgcaattagccatatcaagttctcggaagatggggcgttcatggcctatggactgagcgaaagtggttccgattggaataaaatccgaatacgaaataccaaggaaggtatcgacttacctgaaattctggaaaaagtgaagttctctaatgtctcctggacgaaagacagcaagggattcttctatggtcgatataccgatcaagacgggatatttgacggatcagaaacaaagctggctgagaatcagaaactgtattaccatctactaggagagagcccccatcaagatatattgatcgcagagttccccgaacacccgtcttggcgattcaaaaccgatatttccgactgcggaaaataccttatcttatcgataagtcacacggttcgtgacaatatgctgtactatgctgaattaggatcggaagagaaaaacgcattccaactggaacttaagccaattgtagataaatttgaggctgacttcgattacattaccaacgaggggtctaatttgtacttccacacaaacaaggatgcccctaattaccgggtgattgtgattgatgttaataatccagcagaggaacactggaccaccccaatacccgagcataagaaagatgttttggagtgggccaagtgcgttgatgggaataaattagtcgtttgctataactgtgatgtaaagcatattcttcaagcccgcgatcttagcacaggaaagctcatccgtcaatttggcctggatattggctcaataaatgggatttcaggaaagaagagtaattcggaaatattttatggtttctcatcgttcttatcaccaggtataatattttactatgactttgccaaaccatccgaaaagccgacagttctgcgcgaaattagtctaaatttggagggctttagccgggataactacagcgtggaacaagtgttttataaaagcactgatgacaccgatatacctatgtttattgtacaacgaaagagagatattgcggaaccccgcccttgtttactatacggatatggtggatttaactacagcctaatgccatccttcggcatactgagtctgatgttcatggatacgtttgatggagttttggcttttccaaatttgagaggaggcggagaatatggcatggaatggcacaatgggggtagaatgttgagcaaacaaaacgtttttaatgattttcaagccgccgctgagtttttgaccaagaataactatacaaccaaggatcgattggctatacagggcgcctcgaatggtggacttttggtgggtgcttgcatcaatcagcgtcctgatcttttcggagcggccgtggcccaagttggtgtaatggatatgttgcgattccacaagtttactatcggtcatgcctggtgttccgattatggcaatcccgatgaaaaggtacacttcgcgaatcttattaaattctcgcctcttcacaacgttcatattcctctgaatccaaatcaggagtacccatcgacattaattctgacagccgatcacgacgaccgtgtaagtcctttgcactcctataaatttgttgctgcccttcaggaagctgttcacacatgaacacgaatatatttaaagacttacaattttgggctccgttcatatcttatgtaaatgaatcgagagcgataaattatatttaggattttgttatctaaggcgacatgggtgcattgctcaaaaacatgtaatttaagtgcacactacatgagtcagtcacttgagatcgttccccgcctcctaaaatagtcccttagtgggagaccacagataaggtcctcgccgctcaaga

SEQ ID NO: 4002 - protein, 723 aa, DROSOPHILA
MYSPHITAAEEAILITIDLKSITALDIRDISPSFLLKPFSDHRVIQEGCQSPTDLSRSVEEASLRIVYPEARKDGRFEEMIHGYKIKDVYRWLEDPDSVDTQQFVNAQNNISQSFLERSAERENINSKLTKLWNFPKYGCPMRHGNYYYFFKNTGLQNQSVLMQQKTLESPESIFLDTNSISSDGTTAISHIKFSEDGAFMAYGLSESGSDWNKIRIRNTKEGIDLPEILEKVKFSNVSWTKDSKGFFYGRYTDQDGIFDGSETKLAENQKLYYHLLGESPHQDILIAEFPEHPSWRFKTDISDCGKYLILSISHTVRDNMLYYAELGSEEKNAFQLELKPIVDKFEADFDYITNEGSNLYFHTNKDAPNYRVIVIDVNNPAEEHWTTPIPEHKKDVLEWAKCVDGNKLVVCYNCDVKHILQARDLSTGKLIRQFGLDIGSINGISGKKSNSEIFYGFSSFLSPGIIFYYDFAKPSEKPTVLREISLNLEGFSRDNYSVEQVFYKSTDDTDIPMFIVQRKRDIAEPRPCLLYGYGGFNYSLMPSFGILSLMFMDTFDGVLAFPNLRGGGEYGMEWHNGGRMLSKQNVFNDFQAAAEFLTKNNYTTKDRLAIQGASNGGLLVGACINQRPDLFGAAVAQVGVMDMLRFHKFTIGHAWCSDYGNPDEKVHFANLIKFSPLHNVHIPLNPNQEYPSTLILTADHDDRVSPLHSYKFVAALQEAVHT

SEQ ID NO: 4003 - DNA, 3170 bp, DROSOPHILA; identical to SEQ ID NO: 3997

SEQ ID NO: 4004 - DNA, 1038 bp, DROSOPHILA
attaaagtcataataaaagaagtgctggtaaagacttaataactctatgttccttaaaaatttttaaatatatctcacaatgagcattaactggataaagatcacggaaagatgagtcccagcgtagcatcggcgagtgccaccagtagtacagtgggcaccagtgtgacgaccaccggccgggtggacagcagcaccgaggagaaccccacaagtaacaccgaaccggagtacacactcgaggaactggagcgattggtgggcgtaccgcgtcaggacttcctgctgctgatcaagaccttctcctacatcctgcgtcgcatctccacgtttatcatcaagccaagtttgctgcagcgtgagctgcgcgagaaactccagctggaggatgaggccaagatcgatgccatattgcgtttgtgggtgcgcgaaacgacgcccattatgaacaatttggccagcaagcggtacgaatcaaatgtcatcgaagatgtggcctggaagctcaacatggagatctcctcgcattgccagcagcgggagaagaccccgctggccgtgctccaaatgaaaacggccgtcggcgaggatatcaacatcgaaatgacacaaccggaactaatggaactgtacaatcagttcgagagcatccagggcgaactggacgccatgctggccatgaagactacaggagcaacggcgcctggcaatcagtagtgggacgccatcgaccaattccagtgccaattttattgttgattcacacaaaactctgtgcaaaaagatggacctaaaagtatgcaatactaacacgatcgtagccaaatgttaaacacgtttttttttgtttaattcagtagggtttttcctatgttctggctaattttccgaacgtagccaaatttttactagagtaagagttcggctttgatttataaaacgttgcaatgattaggatcttccaaacaggactagtttttaagttttagaacttaccctctgcaaaataataaatcctttaataaatttagataaaac

SEQ ID NO: 4005 - protein, 201 aa, DROSOPHILA
MSPSVASASATSSTVGTSVTTTGRVDSSTEENPTSNTEPEYTLEELERLVGVPRQDFLLLIKTFSYILRRISTFIIKPSLLQRELREKLQLEDEAKIDAILRLWVRETTPIMNNLASKRYESNVIEDVAWKLNMEISSHCQQREKTPLAVLQMKTAVGEDINIEMTQPELMELYNQFESIQGELDAMLAMKTTGATAPGNQ

SEQ ID NO: 4006 - DNA, 4361 bp, DROSOPHILA
cagtgtggcggtgcggcaatcatgtcccagatccgcacgtgatgatcctcgccggcggtgaacatccaattgccgtcctcttggaagccaagtcgcgtcacattcttttgcacgccatcgaaattgatcaccggtgcggtgcagttggactccaggtcgtacagccggatgcactggtatccgcacgccgccagtcgcgtcttatccggtgtcctgtctagcgcattcacttgctgcaagttaaagcatgttcgttaaccggaaaatgcacgaatcggtttattcctaccgaggtctccacgaatctcatcgtcttaatgcagttgcccgtgtgcgcctgccacaccttaatggtgtggtcataaccaccggtggccaggatcagctgctgttggtcccccatcctgtgattgcacagattaattgacaatttccgcgtttttttgccccaatgttttcatttcaccagacctatcggtccattggtcctcgatacgcgcctatcgcgcttatcgataagtggcgcggtgctggtaagcgcgaaaatatattcttattagaataaaacctaaagcgcagcaacaaaatcgttttcaaaaaacactattaattgatatcagtataattttaggttttattacaaaaatgcgtactgatttacatatcaagtctttcttttatccgcataaataatcattagattagatataacacaaaaattatgtcaaatcaaaaaaattttaactgaaaaattttgataatttacggtacctggtttatataatcgagatattttccatataaagtattatagaattatcttaataatatttattatcccaaaactcggacattagcagaaaataaaaaaaagaaactgacgcagctttggttattgggaaaaatgtttattggttgaataacttagcaactgggattagtccgggaccagcgtaacgtacaaggattgggtctgagtggagtgagcggcgttggccatctactgctgtgcggtgggagcagtttccgctgccgtgcggttggcatcctccggtttcatggcggggaacagcagaacctcctacaaaaaaaaagaagcctcatttagcaacgcttgcaataagttaaagaccaagtgtagacccaccttgatgttgttggagtccgtgaggaacatggccaggcgatcgatgcccatgccaaaaccaccggtgggcggcagtccgtactccagggacgtgcagaagttctcgtcgaccagctgggcctcatcatcgccggccgccttgtcgctggcctgctgctcgaaacgctcgcgctgcacaaccggatcgttcaactcggtatacgcgttgcaaatctccttcttggccacaaacagttcgaagcgctccgtcaggccgggaatactgcgatggtacttggccagcggcgacatgatctgcggatgctcacagatgaacgttggattcacgcaaaactcctcgatgaattcgccgacgagcttgtccagcaggcgggcagtggtgcgcggagctgggcactcgacctggtgcttagcgcacagctgagacaggaactgattcgtctctggcgaattgaaggtgtcggccgcggggaacttcacctgcagcttctcttccagcgttttgatcatggatacgcgcttaaagggcggcgtaaagtcaagttcttgctcaggtccctctggaccctccggatgatagatgaccttgtaggagccacggatcgctttcaccattcccgagaccaactgctcggtgatatccataatgtcagcgtagtcggcatacgccatgtagaactcgcacgtggtgaattcaggattgtgggtgaggtcgatgccctcgttgcggaactgccgtccgatctcgtacacacgatcgagtccacccaccaccagcatcttgtgatacagctccggagcaatgcgcatgaacagatccatcttgaggtcattgtgatgcgtcacgaagggcttggcagtggctccaccggcgatcatgttcatcatgggcgtctcgatctccaggaaacccagacgatccaggaactgacgcacgtacgagatgatctgcgggcaatgggagtagtttttgttatattcagcttaaactccttagttcaattcataccttggcacggatctggaatttctctcgcacattgttgttgagaatgagatcaagatagcgctggcggtagcgcgtctccttgtccttcaacccgaaatgcagatggggcagcatgtgtagacagggcgatagcagcttgatctcgctgggcataacggacagttcacccttcttggttttgccgggatgtccgacaacgccgatgatatcaccacgtcgcaatttggacgtatcgatttcgaaatccgcctccgacttgtaggacttagcgctggccatcacctgcaccttgacgccctcgccgcgcagatcgtagaaaatgagcttggcgcccgactcgcgtatggcatgcacgcgcccagccacgctcagtttgacattctccagggtctcgccctccttgaggctgttctcgtacttggcaatgaagtcttccagcgagctactcacatggaacttgtgtggatagggatccgttgcgggtgaacgtttcagctcctgaacggcggcggagcgcagcttaaagtattcattcggcgagatctcctcctcctcggcggcactgctcttcttcttgccagcagtattttccgccggcgcagcggccgccttctcagccttctccttggccttttgctcggccttcaggcgacgctttagctcactgtggacgaagagaaacagttagggtattagcagacaatggagatgttgccacaaggctgttataaccacgcatggatatatatatatatatatccagcctggccaacggtgcgtattagtaacccacagtttggtctgcttgcttggctccatttgcggagcgctcacgtggaaaccggcggcaagtggctgaattccggtgtatctgcatcggggccatgacccctgcacggttctaagggcgcagcgggcgaacatggttattttaagcagcgtatttcatcagcagaactgcacacatgcaacataaataatgcgaactggaacgttgccgcttcgccctaacctacaagtggggcagctacgttgaccggatttaatgcttgcggtcaaatggatacgctttgaagcctatggcacttacttcttggacagttctccacttgcagcggccatgctgatgcggttacgttgttcgctgtttaatcccggggtctcagaagcgatggaaacccaaaagaaatgcgaatgcgaaagcgccacaaaagtaaaaaaaaaaaagtacacgaccagcgctgccagatgggcataaatcgatgcaactggctttgccgcaccagatggccagtctggcgcgagggcatttttacgccattgacatctggtcacattgcactagacccgaaatatatattttatttagcttttgcaatatccttaaattaacaattgatcaactaaagccacggccttgcgggcagtgagcacagcacagcacggcccagaactggactcaatggctggaggacgcgaaatgctccggtcggaaggcagcaaacatcagaacgccaaagtagagcaactgcagctgtaactgtaactgttaaccctgggttggtcgcgggggcggggtggcagtggtggttgtggaccaggaagaggaagagcaagggtgctgggaaagaggaagagcacatcttgaggccaggaggcaaacgagccaatggagccaccagctgcaccggtacccctacagccactggcagcatcttccgcctgcctggcggacaggagtccagtggatcccattgcagtcagactgcagcaggaggagcaggcagaaggagatgacgaggaggaggaggaggaagaggaggacgatgatgatgatcccaaagaagaggaggccttctacgaggcgcgcaacggcaacgaaagtgacgagctggaacaggccttccagagtgcccttaccctgaccaacgatgtccatgtgagtgtcagcgaagtggaggaacatgaaccgcccttggcatcgagaaatcaggaggtggcagaggtggaggagcagcagcagcagctgggggcctgcgcactgccgcagcccagcgaagcctgtaagtaacttgagactgacgagcgagttcatccactcatccacttggttctcttaaagctcttacaggctcaaaggagaccagggaaccgcgccaccaccagacgctgctttccaccaaatcttgcgagacgccggccaat

SEQ ID NO: 4007 - DNA, 2015 bp, DROSOPHILA
cgctttcgcattcgcatttcttttgggtttccatcgcttctgagaccccgggattaaacagcgaacaacgtaaccgcatcagcatggccgctgcaagtggagaactgtccaagaacggcaacgttccagttcgcattatttatgttgcatgtgtgcagttctgctgatgaaatacgctgcttaaaataaccatgttcgcccgctgcgcccttagaaccgtgcaggggtcatggccccgatgcagatacaccggaattcagccacttgccgccggtttccacgtgagcgctccgcaaatggagccaagcaagcagaccaaacttgagctaaagcgtcgcctgaaggccgagcaaaaggccaaggagaaggctgagaaggcggccgctgcgccggcggaaaatactgctggcaagaagaagagcagtgccgccgaggaggaggagatctcgccgaatgaatactttaagctgcgctccgccgccgttcaggagctgaaacgttcacccgcaacggatccctatccacacaagttccatgtgagtagctcgctggaagacttcattgccaagtacgagaacagcctcaaggagggcgagaccctggagaatgtcaaactgagcgtggctgggcgcgtgcatgccatacgcgagtcgggcgccaagctcattttctacgatctgcgcggcgagggcgtcaaggtgcaggtgatggccagcgctaagtcctacaagtcggaggcggatttcgaaatcgatacgtccaaattgcgacgtggtgatatcatcggcgttgtcggacatcccggcaaaaccaagaagggtgaactgtccgttatgcccagcgagatcaagctgctatcgccctgtctacacatgctgccccatctgcatttcgggttgaaggacaaggagacgcgctaccgccagcgctatcttgatctcattctcaacaacaatgtgcgagagaaattccagatccgtgccaagatcatctcgtacgtgcgtcagttcctggatcgtctgggtttcctggagatcgagacgcccatgatgaacatgatcgccggtggagccactgccaagcccttcgtgacgcatcacaatgacctcaagatggatctgttcatgcgcattgctccggagctgtatcacaagatgctggtggtgggtggactcgatcgtgtgtacgagatcggacggcagttccgcaacgagggcatcgacctcacccacaatcctgaattcaccacgtgcgagttctacatggcgtatgccgactacgctgacattatggatatcaccgagcagttggtctcgggaatggtgaaagcgatccgtggctcctacaaggtcatctatcatccggagggtccagagggacctgagcaagaacttgactttacgccgccctttaagcgcgtatccatgatcaaaacgctggaagagaagctgcaggtgaagttccccgcggccgacaccttcaattcgccagagacgaatcagttcctgtctcagctgtgcgctaagcaccaggtcgagtgcccagctccgcgcaccactgcccgcctgctggacaagctcgtcggcgaattcatcgaggagttttgcgtgaatccaacgttcatctgtgagcatccgcagatcatgtcgccgctggccaagtaccatcgcagtattcccggcctgacggagcgcttcgaactgtttgtggccaagaaggagatttgcaacgcgtataccgagttgaacgatccggttgtgcagcgcgagcgtttcgagcagcaggccagcgacaaggcggccggcgatgatgaggcccagctggtcgacgagaacttctgcacgtccctggagtacggactgccgcccaccggtggttttggcatgggcatcgatcgcctggccatgttcctcacggactccaacaacatcaaggaggttctgctgttccccgccatgaaaccggaggatgccaaccgcacggcagcggaaactgctcccaccgcacagcagtag

SEQ ID NO: 4008 - protein, 572 aa, DROSOPHILA
MEPSKQTKLELKRRLKAEQKAKEKAEKAAAAPAENTAGKKKSSAAEEEEISPNEYFKLRSAAVQELKRSPATDPYPHKFHVSSSLEDFIAKYENSLKEGETLENVKLSVAGRVHAIRESGAKLIFYDLRGEGVKVQVMASAKSYKSEADFEIDTSKLRRGDIIGVVGHPGKTKKGELSVMPSEIKLLSPCLHMLPHLHFGLKDKETRYRQRYLDLILNNNVREKFQIRAKIISYVRQFLDRLGFLEIETPMMNMIAGGATAKPFVTHHNDLKMDLFMRIAPELYHKMLVVGGLDRVYEIGRQFRNEGIDLTHNPEFTTCEFYMAYADYADIMDITEQLVSGMVKAIRGSYKVIYHPEGPEGPEQELDFTPPFKRVSMIKTLEEKLQVKFPAADTFNSPETNQFLSQLCAKHQVECPAPRTTARLLDKLVGEFIEEFCVNPTFICEHPQIMSPLAKYHRSIPGLTERFELFVAKKEICNAYTELNDPVVQRERFEQQASDKAAGDDEAQLVDENFCTSLEYGLPPTGGFGMGIDRLAMFLTDSNNIKEVLLFPAMKPEDANRTAAETAPTAQQ

SEQ ID NO: 4009 - DNA, 4532 bp, DROSOPHILA
ctcacctgattaacgtttacatttatgtttgccacagtgcttgtttgtttgtttgtatatgtatgtctatgccttctctgtttgcctctgctcttaaacatttaagcgttttgtctttttcgagttaacatttgatttgcctttgtttcgtttgctaacaactgcaactggagtgctcccgatacatgcctacacatatgtatgtagtttttaaaatggattgctataatttggtagttacgtttatgtatttacaatcttcgctcggctcgatagaacttcgccttgggagagagtttgtgtagagtggacgagggcacaaagcgagctagcttagttggtagatcgaaattgtactagacagtgacagtggccatgctgcagttccctcagaacacggactcggcggaacgggaaaggttgacggggtgggagggactgcgcgccagacgcttcttgggaagatgctccagcagggagagcaggcgtgcgaactgcggccggtgctccttctcgtaggtccagcacagcatcagcaagtccttgacatcccgtccagactgcaggttggccagcgactgcttcatcccacggccaacctgccagatgatcgattccgccggctgatccttgaatgtgaactcgccgcagattagctcgtaccaaacggttccgaaagagtagacatcggagtatggggtgaactccagacactctccacgcggcttctccggctgcaatgctcggattagctccggcgccaggtagcacaaccagttgtggggcactcctaggcccatatcacagtagagcagcttggtggagctgaacagcccaaagtccgtgataatcaccttgccgttctcgatgaagatgttcttggtgcgcagatctttgtggatgatctcccttgcgtgcaggtagcccatgccctgggcgatctgctgggcaatgaggagagtccggttcatggcaaacttctcccgacgctggtgaatatacgtatacaaggtgttgcccttgcacaatgaagtcacaatggccaaatatggtgggttcatgcaggctcccatgaacagcaccaggttctcgtgtcgagtgttcttgaagttggctacctcgctgcgaaacgtctccagcatgtgttcgtcttgcagatagtcctcgttgagcagcttaaccgccacatctccgtgccaaagggctcgatgcacggtgccgaagcgtccctgccctatccgctcgagcagaagcagatcaccatacgggatgtcccattccttgagtgagatcgagttctggcgccattgtcccgagtctccgtcttccgttgaatccacacgaacgggtgtccggtccgagtccgtgctggcacttccagacaaggagactgtcttgtcgctgtcatttgacttgtgggtatccgtgtactcgctggtgaacggcgtcctcttatccacaccggctgtgctcaattttcgcggaaagaaactgcaggtgctggtggtggttgtgctattgaccagactgcccgtcaaggtggccgcagtagaagcgtttgaagtttggctaccgatgagcgagctcatgtgcccgttggagctgctcaccagactatcaagtcctccgttggctgttgcaggcgccgtggggaattgctctggcactggttcattggagatgagcgatacaccaccgcttccgccactgctcgtcaccgtcacgttgggaaagttgaattgactcggctggtgcttgccaagcgaaggcgtaggtaacagattggcgctagagctgctgcccgcctgatccagctcgcgctccctttgctggaacagcgccggactgctgggcgtggaactagtgcagctggaactcggcgaactgctatcgccgtgctgctgatgcaagggcttacccagggtgctcttttttaccaaaggggatcctttcgccgcgccatgcacatgcggcagactggcgtatcctccctgctcctttatgtgccgaaactcgtccacatattctcgtggaagtccacaggagggcggtacgtgcggtgcgcatgacttgtggcagatgtacttgcagtcggtgcacttcatccagcggtgaaagacctgcttctggcacagggtacaggtggccatgaagcccagggccttggtgaaacgatgcttgattgcatgacccatgcccacgtgacccacgcccggagagcatggcaccataagcacgttcgaggaacttcctccggagctggcattagtatttgggtccacaaagatgtccgagctggtggagctgtggctatcggggctgggatcagtgggcaaacggttgcgggctaattgctccccgtccacttgcacatgactctggctcagcaaggtctggtgctttctagctggcggcggggtaccacgactcctctgtggtgttccattaaggctgctgctcagcccactggaaggcgtgaagggcgaattgggtggcgagggcgtaagggttaaagtcagctgggaaccctgtgtgctgttcagctcttctgtcgctgagggcgattggcggccacttttgaagttggtggagttggccagagcggaattctttcccttgacaccatgctggcgatgatgggttctcggggaggcggttgaattgttacccagtccaatgtttcccacactgccgcgatgaatgtgggtgggcctgtcccaggagtcccagtgccactgctctggatcgttgttgctagccgcagtaccgctctccagcgactccatgcacttccttaagttctgcatggccctggtcaggcgtcgcagttcctcctcctctcgctggctggggctgtcagccaggagttgacggatctcctcgtcgctgagacgcaggctttgctctagagtggtcaggcgagcaaggcaggcggtaagagtcccctggctaaggcccactacgcgcagccattgcctcagttcgttgcccgttgtgtggggcacaagcccgttggccgggatgcgctcatttagccgcatcttcgccagcagcagctcggagaagtatcgcaccagcttcgactccaggcaacgaatctcctgctgcgtcagcgtggagctgatcgcgcactgcgttcgcaggccctccagatggttggccgagagatcaatcatgtcctgaatgataaccaggttgctgtctacggacagcgaaccggagatgggatcgttggcattggtggagcccgtgtctggagccgatgcgggtgcgttgttgttgctgctcatcctgcttattcgcgacggagtggagcccgattgattttttcagacgccccctcggggactcgacgattcgatgggaccaatggctgggactccgccccgcattgtggccctcgccaagcgaccttgacgttcggtgctccggctatcgcgcacgctaacgcccgcaactctaaacggcttaggcaatgcgaaaaagcaataatttgtacaagttcctcggctgttgttgaaatttctctacacccaagtagcgcatcgagagaagtgtgaccatacccgggaggactccttctcactgcacaccaaaatgtactaaaagcacttatccgaaaaacttaggggcactcctctgtatttaaaaaaaatagaacgttaagtattattattcttatgttgtaattatattatgtcttcgagtgtatatagcatatatatttcaattctatttgaaaaattaatccagaaattattttcacatttttattttattagtcgaaataagtcaaatattttaatatttatattttattatttggaaatggaaattaggtagatattattttaatattttaattttataactaaaaataatttttttaagttaatatttgatgttccaatttatattttatgatatgtaatattacggagataggcgagttttacttaatttattcatatcaccttcaggtgctggatatttccattaagtggccgaatgacatttatgcaaatggaaatcagaaaattgggggcctcgtcattaataccacacttcagggatcccaagccatcgtcaatatcggaagtggaattaatttgaacaattcaagaccaacagtttgcatcaatgacttgataagagaatataatacccgtgtcccgaacaacaagttacctatacttaagtacgagctacttattgccatgatattcaatgaaatcgaaagacttttgggagaagtacaaaacggagactttgatagtttttatgcattatactattcgctatggttacacaggtaaatttaaaacatttttaaaatacatttaatttgcatattacatttactaacatgtttttatgtacagcgggcaatctgttaagatttgcctacaaaaagatcaggaaaaagaggccgaaattgtgggaatcgatgactttggatttttggaggtgaaattaccaactggtactatagaaattgtgcagcccgatggaaacagctttgatatgttgaa

SEQ ID NO: 4010 - DNA, 3532 bp, DROSOPHILA
tgtagagaaatttcaacaacagccgaggaacttgtacaaattattgctttttcgcattgcctaagccgtttagagttgcgggcgttagcgtgcgcgatagccggagcaccgaacgtcaaggtcgcttggcgagggccacaatgcggggcggagtcccagccattggtcccatcgaatcgtcgagtccccgagggggcgtctgaaaaaatcaatcgggctccactccgtcgcgaataagcaggatgagcagcaacaacaacgcacccgcatcggctccagacacgggctccaccaatgccaacgatcccatctccggttcgctgtccgtagacagcaacctggttatcattcaggacatgattgatctctcggccaaccatctggagggcctgcgaacgcagtgcgcgatcagctccacgctgacgcagcaggagattcgttgcctggagtcgaagctggtgcgatacttctccgagctgctgctggcgaagatgcggctaaatgagcgcatcccggccaacgggcttgtgccccacacaacgggcaacgaactgaggcaatggctgcgcgtagtgggccttagccaggggactcttaccgcctgccttgctcgcctgaccactctagagcaaagcctgcgtctcagcgacgaggagatccgtcaactcctggctgacagccccagccagcgagaggaggaggaactgcgacgcctgaccagggccatgcagaacttaaggaagtgcatggagtcgctggagagcggtactgcggctagcaacaacgatccagagcagtggcactgggactcctgggacaggcccacccacattcatcgcggcagtgtgggaaacattggactgggtaacaattcaaccgcctccccgagaacccatcatcgccagcatggtgtcaagggaaagaattccgctctggccaactccaccaacttcaaaagtggccgccaatcgccctcagcgacagaagagctgaacagcacacagggttcccagctgactttaacccttacgccctcgccacccaattcgcccttcacgccttccagtgggctgagcagcagccttaatggaacaccacagaggagtcgtggtaccccgccgccagctagaaagcaccagaccttgctgagccagagtcatgtgcaagtggacggggagcaattagcccgcaaccgtttgcccactgatcccagccccgatagccacagctccaccagctcggacatctttgtggacccaaatactaatgccagctccggaggaagttcctcgaacgtgcttatggtgccatgctctccgggcgtgggtcacgtgggcatgggtcatgcaatcaagcatcgtttcaccaaggccctgggcttcatggccacctgtaccctgtgccagaagcaggtctttcaccgctggatgaagtgcaccgactgcaagtacatctgccacaagtcatgcgcaccgcacgtaccgccctcctgtggacttccacgagaatatgtggacgagtttcggcacataaaggagcagggaggatacgccagtctgccgcatgtgcatggcgcggcgaaaggatcccctttggtaaaaaagagcaccctgggtaagcccttgcatcagcagcacggcgatagcagttcgccgagttccagctgcactagttccacgcccagcagtccggcgctgttccagcaaagggagcgcgagctggatcaggcgggcagcagctctagcgccaatctgttacctacgccttcgcttggcaagcaccagccgagtcaattcaactttcccaacgtgacggtgacgagcagtggcggaagcggtggtgtatcgctcatctccaatgaaccagtgccagagcaattccccacggcgcctgcaacagccaacggaggacttgatagtctggtgagcagctccaacgggcacatgagctcgctcatcggtagccaaacttcaaacgcttctactgcggccaccttgacgggcagtctggtcaatagcacaaccaccaccagcacctgcagtttctttccgcgaaaattgagcacagccggtgtggataagaggacgccgttcaccagcgagtacacggatacccacaagtcaaatgacagcgacaagacagtctccttgtctggaagtgccagcacggactcggaccggacacccgttcgtgtggattcaacggaagacggagactcgggacaatggcgccagaactcgatctcactcaaggaatgggacatcccgtatggtgatctgcttctgctcgagcggatagggcagggacgcttcggcaccgtgcatcgagccctttggcacggagatgtggcggttaagctgctcaacgaggactatctgcaagacgaacacatgctggagacgtttcgcagcgaggtagccaacttcaagaacactcgacacgagaacctggtgctgttcatgggagcctgcatgaacccaccatatttggccattgtgacttcattgtgcaagggcaacaccttgtatacgtatattcaccagcgtcgggagaagtttgccatgaaccggactctcctcattgcccagcagatcgcccagggcatgggctacctgcacgcaagggagatcatccacaaagatctgcgcaccaagaacatcttcatcgagaacggcaaggtgattatcacggactttgggctgttcagctccaccaagctgctctactgtgatatgggcctaggagtgccccacaactggttgtgctacctggcgccggagctaatccgagcattgcagccggagaagccgcgtggagagtgtctggagttcaccccatactccgatgtctactctttcggaaccgtttggtacgagctaatctgcggcgagttcacattcaaggatcagccggcggaatcgatcatctggcaggttggccgtgggatgaagcagtcgctggccaacctgcagtctggacgggatgtcaaggacttgctgatgctgtgctggacctacgagaaggagcaccggccgcagttcgcacgcctgctctccctgctggagcatcttcccaagaagcgtctggcgcgcagtccctcccaccccgtcaacctttcccgttccgccgagtccgtgttctgagggaactgcagcatggccactgtcactgtctagtacaatttcgatctaccaactaagctagctcgctttgtgccctcgtccactctacacaaactctctcccaaggcgaagttctatcgagccgagcgaagattgtaaatacataaacgtaactaccaaattatagcaatccattttaaaaactacatacatatgtgtaggcatgtatcgggagcactccagttgcagttgttagcaaacgaaacaaaggcaaatcaaatgttaactcgaaaaagacaaaacgcttaaatgtttaagagcagaggcaaacagagaaggcatagacatacatatacaaacaaacaaacaagcactgtggcaaacataaatgtaaacgttaatcaggtgag

SEQ ID NO: 4011 - protein, 966 aa, DROSOPHILA
MSSNNNAPASAPDTGSTNANDPISGSLSVDSNLVIIQDMIDLSANHLEGLRTQCAISSTLTQQEIRCLESKLVRYFSELLLAKMRLNERIPANGLVPHTTGNELRQWLRVVGLSQGTLTACLARLTTLEQSLRLSDEEIRQLLADSPSQREEEELRRLTRAMQNLRKCMESLESGTAASNNDPEQWHWDSWDRPTHIHRGSVGNIGLGNNSTASPRTHHRQHGVKGKNSALANSTNFKSGRQSPSATEELNSTQGSQLTLTLTPSPPNSPFTPSSGLSSSLNGTPQRSRGTPPPARKHQTLLSQSHVQVDGEQLARNRLPTDPSPDSHSSTSSDIFVDPNTNASSGGSSSNVLMVPCSPGVGHVGMGHAIKHRFTKALGFMATCTLCQKQVFHRWMKCTDCKYICHKSCAPHVPPSCGLPREYVDEFRHIKEQGGYASLPHVHGAAKGSPLVKKSTLGKPLHQQHGDSSSPSSSCTSSTPSSPALFQQRERELDQAGSSSSANLLPTPSLGKHQPSQFNFPNVTVTSSGGSGGVSLISNEPVPEQFPTAPATANGGLDSLVSSSNGHMSSLIGSQTSNASTAATLTGSLVNSTTTTSTCSFFPRKLSTAGVDKRTPFTSEYTDTHKSNDSDKTVSLSGSASTDSDRTPVRVDSTEDGDSGQWRQNSISLKEWDIPYGDLLLLERIGQGRFGTVHRALWHGDVAVKLLNEDYLQDEHMLETFRSEVANFKNTRHENLVLFMGACMNPPYLAIVTSLCKGNTLYTYIHQRREKFAMNRTLLIAQQIAQGMGYLHAREIIHKDLRTKNIFIENGKVIITDFGLFSSTKLLYCDMGLGVPHNWLCYLAPELIRALQPEKPRGECLEFTPYSDVYSFGTVWYELICGEFTFKDQPAESIIWQVGRGMKQSLANLQSGRDVKDLLMLCWTYEKEHRPQFARLLSLLEHLPKKRLARSPSHPVNLSRSAESVF

SEQ ID NO: 4012 - DNA, 4161 bp, DROSOPHILA
ggctttcaggaacgatgtgcggcagtccatgttgccaatcaataatccctataattaaccacgaaggtgcgtttatccttgttcccgcaccaattttccgctgcgcacttgacccgaagcgtcgaccaccggagaagcgaagacccaatgaaatccgccagccctattggcatagaggttgacgtgcgactgagcgcaacgctttccatttgaaatgtggcgcccccgaaagcgccagttagtgggttccgccactagacagaaatcaactattccgcggcggttcgcctcgctacactggaagaaaagagtcgaaggacataatcatataattacatacaatcaccatgctaagcacaatcactggtaaacaatttaaggtaaattttaaaattttcttgaaaaatacacttaaacaatacgatattactcgaaggtaaagcatttcacttagcgatgtatattttgcttgacacatattgcatacatatttacctatcatgcatatcgaattggacagagtccaaaaataaacttagcttatgtcactttatattctactacttacttttctagatccactcatttttattcagtacacaaatttccatcaccaacttttttgctgactgtatttacatcatcattgctgccgatttttgtggtggtatagtggacttctgtgggtggtatgatgtcacagcggctaaagctttcaccgcattttctttatttaggaattgaatggggccaccaaaatccatccaccgcagagcactaacatcatagattacaggacatcattgagatatttctgcgccgcacacttaacggaaccctacagattccaagcatgccattacgcgacgagcaacaagtcatttggcagtcaaagcaaatagagaaatgtttcggccatacaaagctcgtcgggactacgcgtcgtatgcttaatatttccatcgggcagaacacacaaacaaactgacaagcgagcaaatcatgtgaaaacaaacacgcgcacatttattatgatacttataatgggtaattgaactataaatatgtactttaattacaggttacattaaggtaggagtgaataatttatgactgtcctttgcatttggttatgaaatgttgaagagaaaaatatcagcgagaccccgattccgagtttgtactgttggatagctcgagattaccgaaggcctagaactagaactccatccgtcgctgcttgttcttaaaactaatggccagaaacacggccaaggcgaagcagattaactgaaagaaagtcggttaatttaaatatattggtacttaagtcgggctaaggaaaaacccacctcgaaggccactagcacccaggacactatgatgaagcgcagcttgtcgctttcgtagaagctctgcaccttttcgatgcacccgtccagatagaggtggtcgggggtctgctgcagatccgcgtagcagctgggcgggatcagcaggctgaggtggatatagtcctgggcgctgctctggccgcagcactcgtgcttctgctgcaaggaatccatgttgttcgcctgccaggccacctccaccatgtcccggccgctcttcacgtcgaactcgtggaggaacaggcaggtgctcacgatctgcaggatggccaagatcagcaggaagacagcactctaagggatacgtaacagcgttaattcagaaacggtttcctgactatattgcctaccgttgcagtcagcaccaccgattcccggatggccgcgaagatgcccagcagagcaaagaccaggatgagcgagcacgcgatgtaagcggctattacgaattcctccgtctccgtgtccgcattgtaagctatccagccgatggccccagcagcaagaaactgaaatttatgacagtaaaacctctgtgcatcgaatacttatatcgacttttagaacttaggaacattactcacaacttaatctaatgaaacgtttacatttaatgggtgaatcgaatccttaaatcaaataatacatccctcaatttctaataaatacatatataatgttggtcttatagaagatcgcctgtacaatatgatacggttgcagttgcaattacaagggcaattgccattcatttgtgtggcaattaaaagccgcagctgagtgcatcacataatttgtggttcgggaagtttgcctgactgagcgctgtgataatgaaatgaatcctccgcctcactcccatacccgcgcatccgggggttggcaaatcaccctcgttggtggcccagttttggaaactccggcgttcgattgcgatatataggtcagactgcaaactagagtgcgaatactgggcgagggtacgtggacatgacatcatcctgcgggagcggtggtgaaagcaattgaaggctctggcggcagtggggggatgggaacagggcgcaatataaacatggctgtcatggcagcgagtaaccagacgggaggcactgggggttggatatatcggcgctgcaagaggggccaatagccaccttggggccaggtcgtctatctcaggtgggcgcgaagatgacgaacgacggacatcgcttaaaaatacacaaccagcaaaagcagaatattcgaaaattttcaaaaacatttttccgaccgtgtgcttttcaagtttatatggtagagaatattcaaaaataattcacttggggcgcttttgaagtgcgttcacttgtgcacccattccacatgacatcatgctaatttccttgcacggaacatggttatatatgcagaatatatccgacgtggtcgaggtaattagtagtccatgtatgggatgacttacccctaaaacggcattcagaacgatggaggcgatcttcacgctggtcgtggcgcaacccattttattggatctgaaaacatgatccaaacgcattaagtcaaaactctcgatcacttctcgaatctcaagtgtgttaaccttttgacttctctctccgcacacgaataaagttcgttttttgtttatttaaatattcgttgctggactcgaataacaaacaaatatatttccgctgaacgctcgccgggatatccgctctcgaatctgaactttttggtctggcgcgttctgcgttcgctggcgaactgaaagcgggaaaagttttgtttttctctctccccctgaggactgttgttccccaatcaaaataaaccatacagagcgcactcgctctctcaaaagagagcgctgcacttgggtcagcgctcaaagccatgacgtcatgtcgactggcgtttccaccgcggtggtgtttttgaattcttatcgggtctgtcagtagcgtacaaacatatgtgaactgctgaatgattgaatggattcgggcttaagcaattaattagctgaatattaatgtatccagtgatttttatcacggatgcaaggtttcgaattataagtctcaacctagtttctgaaatcctttattctttactctttccccttgctttcgcttatatatgtaaacattggatcaatcctaatataaccaacttaaaatattaacttaacagcactttgttaaattttcattccaattacattattttcgatattaagccagagttgatgcttacccagtaatgactcacacaatcctctgtccagagttgtgacctctccgtcgatactgtctccccttctcaaaaagtaaaagcgctttgtttacaagtttttgtggttgttatgtctgagttgagcaataccaccccccccccccaagacatactaccaaattcctcccactcctacacacacacgcatgtatgtatgtatacggccataaatgacttggaggcgtcatttggagttaattgtgtttgtctctggctttggttttccattcataacagttcgcttgacttttgtttgcgcaattcgtttgaagagccctctagtggtcagttttctccaacgcacaacatcactgaaaaaaactatcgctcaacttcagtaaaatgtttagagaggtggctctaaacacgaagtttatgttgctaaaagaaagaatattttcatattccgatggatgtgcccgctgtaaggaaagtgcatggataggaaaaaaagaaaccgctt

SEQ ID NO: 4013 - DNA, 1006 bp, DROSOPHILA
agcgaacgcagaacgcgccagaccaaaaagttcagattcgagagcggatatcccggcgagcgttcagcggaaatatatttgtttgttattcgagtccagcaacgaatatttaaataaacaaaaaacgaactttattcgtgtgcggagagagaagtcaaaagatgggttgcgccacgaccagcgtgaagatcgcctccatcgttctgaatgccgttttagggtttcttgctgctggggccatcggctggatagcttacaatgcggacacggagacggaggaattcgtaatagccgcttacatcgcgtgctcgctcatcctggtctttgctctgctgggcatcttcgcggccatccgggaatcggtggtgctgactgcaacgagtgctgtcttcctgctgatcttggccatcctgcagatcgtgagcacctgcctgttcctccacgagttcgacgtgaagagcggccgggacatggtggaggtggcctggcaggcgaacaacatggattccttgcagcagaagcacgagtgctgcggccagagcagcgcccaggactatatccacctcagcctgctgatcccgcccagctgctacgcggatctgcagcagacccccgaccacctctatctggacgggtgcatcgaaaaggtgcagagcttctacgaaagcgacaagctgcgcttcatcatagtgtcctgggtgctagtggccttcgagttaatctgcttcgccttggccgtgtttctggccattagttttaagaacaagcagcgacggatggagttctagttctaggccttcggtaatctcgagctatccaacagtacaaactcggaatcggggtctcgctgatatttttctcttcaacatttcataaccaaatgcaaaggacagtcataaattattcactcctaccttaatgtaacctgtaattaaagtacatatttatagttcaattacccattataagtatcataataaatgtgcgcgtgtttgttttcacatga

SEQ ID NO: 4014 - protein, 208 aa, DROSOPHILA
MGCATTSVKIASIVLNAVLGFLAAGAIGWIAYNADTETEEFVIAAYIACSLILVFALLGIFAAIRESVVLTATSAVFLLILAILQIVSTCLFLHEFDVKSGRDMVEVAWQANNMDSLQQKHECCGQSSAQDYIHLSLLIPPSCYADLQQTPDHLYLDGCIEKVQSFYESDKLRFIIVSWVLVAFELICFALAVFLAISFKNKQRRMEF

SEQ ID NO: 4015 - DNA, 4045 bp, DROSOPHILA
taacgcccagttgctgaacgaactgctcggcgatttgctcatcgacggaagcaataaagctgcaactacagccaccacaagcctaccaaatgccgcggctagcggttcgaatccgctggccgatttaagtgacatctttagcagcgctctggccgaaagcgaagcgaagcagcagagtcagccattccagaatgcaaccacgctgctggagccgcaggtcattagtcagggcaccacaaccgaggctttggccaatggcaatggaggcagcgccagcaaagtgccggaaacaatcagaaagatgccgcaaatcgatatgctcagcgaggagctgttccagcagatcctgcccacccaggatcggatgcccagcttcaagcgggatcccgagaagatcacgctaaacgacttggcacgcgaacgaatgcacataaaggcgccagaggagccaacgactgctaatgacccagcttctgatagtgctcctgctattgccactgccacagctactgttgattccatagacgatgttcctttactcagcgatgatgtggaaaagaaggatgaagccgtcgtggctccagtgacagttgtaccgccggccaagccgctaagcgaaatcaatgtggaactggacaatatacaggccaccggggagcagcgcatcgttctcgacgacgacgacatgcagctcagtctgaacttcaccagcgatcggcccggccatcgtgtgtcggtgattgtgatatcggctcagaacaagagtcgccagccagtgcgcgactttcagttcgaggccagcgtgaagaaggtgagcgaatcagagctggagaagattactggtcatcgaggtgaccggactaacaagctatcattctattccgcagccctgcaaggtgcgcctgttgacgccgacggacagccaaatgccgccgcacaagcccttccgcccggccacgcccatcaaccaggtgatgctcctgctaaatccgacaggcaaggccgtggacgtaacatgcattgtgggctacaagctgggcgacgatccggatcccatcaaggaatcgattgtggccaaaggcattgactatgtggactaaaataccccgacatataagtatcacccgctcccgtccactgaaagcgcaggaggaaaatgaaaagaacgaaagacagtcaattttcccgcatctatgttgtgctccccattatcttaaagatacttttggtttttcaatttctgtattgtatgtgtatgtacgctgataagatttttattcaaattgcattttgcatacaaacgatttagtcgtaatataattatgtatcaaaggtttataaattatgaaaaagtcgctacaaaagccaagcgctcattttcagaggtattctcattaatctgttcaattgttgtgtggatgttgttttagttgatgcttcagttcagttcagttgtcgtgttgcccatatatggattcattgctactctccccactgtttcaaaaaatgccaaattatttgttcctggcggattgtctcgctgggttggcggttttgcggatgattgtacatctgagatatttgttgatttaactggcttaagatagatcgtaattaagttcggaagtgaattaatgagcactgctggcagtttttcaaacattaaggatatcaatttttttgagactatgaattaccattttatatatatgcatctaattgggaaacgtaagctgaactaaaacattgagtctaattaagagtagaaactaaaaccgcgatgcttaacaaaccattacaattgccattcattttgtgtggacttaagccagctaattggtagaatgactaaaactagtaggccaatctttggggaaagccaaatgaaaatccgccaccaggagccacttacaaagtgcctagactctagccgctagctactactactactactacaactactgctatttgcccacgatctcgtccttgaaggacagggcagtgatggccttggtgtgaccagtataatccctaatcgaactctttgtctgcagcttccacagtcgtgcaatgccgtcggatgaggctgtgaacagccatttagaatcggcgctaaaggcggcatcccacacccaatagttctcgatgcacagctcgcgccatttgctaaagtcatccgtcttccaaatgcacacagtgccatcgccggatgtcgtcagcagtagcctggaatcgggactgaatttgcagcgcagtatgtagcgagagtgggccggaattttcctgttcggccgcagcgtgctcatcttctgatcctgactggtcagcgaccagatgtagcagttgcccttgttattggccgccgccaagtatctgccatccggcgagatggcaacatcctgaatggatgcgtccacctcgggcacgatgcgttcgtgccgctccgacttgacgtcccacagaaagacgctgccattttgtgagcccatggcgatctccacctggttgggatgcaaacaggcggcatttaccggcgcctcacaatcaaagatccgggaacagtgtggcggtgcggcaatcatgtcccagatccgcacgtgatgatcctcgccggcggtgaacatccaattgccgtcctcttggaagccaagtcgcgtcacattcttttgcacgccatcgaaattgatcaccggtgcggtgcagttggactccaggtcgtacagccggatgcactggtatccgcacgccgccagtcgcgtcttatccggtgtcctgtctagcgcattcacttgctgcaagttaaagcatgttcgttaaccggaaaatgcacgaatcggtttattcctaccgaggtctccacgaatctcatcgtcttaatgcagttgcccgtgtgcgcctgccacaccttaatggtgtggtcataaccaccggtggccaggatcagctgctgttggtcccccatcctgtgattgcacagattaattgacaatttccgcgtttttttgccccaatgttttcatttcaccagacctatcggtccattggtcctcgatacgcgcctatcgcgcttatcgataagtggcgcggtgctggtaagcgcgaaaatatattcttattagaataaaacctaaagcgcagcaacaaaatcgttttcaaaaaacactattaattgatatcagtataattttaggttttattacaaaaatgcgtactgatttacatatcaagtctttcttttatccgcataaataatcattagattagatataacacaaaaattatgtcaaatcaaaaaaattttaactgaaaaattttgataatttacggtacctggtttatataatcgagatattttccatataaagtattatagaattatcttaataatatttattatcccaaaactcggacattagcagaaaataaaaaaaagaaactgacgcagctttggttattgggaaaaatgtttattggttgaataacttagcaactgggattagtccgggaccagcgtaacgtacaaggattgggtctgagtggagtgagcggcgttggccatctactgctgtgcggtgggagcagtttccgctgccgtgcggttggcatcctccggtttcatggcggggaacagcagaacctcctacaaaaaaaaagaagcctcatttagcaacgcttgcaataagttaaagaccaagtgtagacccaccttgatgttgttggagtccgtgaggaacatggccaggcgatcgatgcccatgccaaaaccaccggtgggcggcagtccgtactccagggacgtgcagaagttctcgtcgaccagctgggcctcatcatcgccggccgccttgtcgctggcctgctgctcgaaacgctcgcgctgcacaaccggatcgttcaactcggtatacgcgttgcaaatctccttcttggccacaaacagttcgaagcgctccgtcaggccgggaatactgcgatggtacttggccagcggcgacatgatctgcggatgctcacagatgaacgttggattcacgcaaaactcctc

SEQ ID NO: 4016 - DNA, 1532 bp, DROSOPHILA
ccaatggaccgataggtctggtgaaatgaaaacattggggcaaaaaaacgcggaaattgtcaattaatctgtgcaatcacaggatgggggaccaacagcagctgatcctggccaccggtggttatgaccacaccattaaggtgtggcaggcgcacacgggcaactgcattaagacgatgagattcgtggagacctcgcaagtgaatgcgctagacaggacaccggataagacgcgactggcggcgtgcggataccagtgcatccggctgtacgacctggagtccaactgcaccgcaccggtgatcaatttcgatggcgtgcaaaagaatgtgacgcgacttggcttccaagaggacggcaattggatgttcaccgccggcgaggatcatcacgtgcggatctgggacatgattgccgcaccgccacactgttcccggatctttgattgtgaggcgccggtaaatgccgcctgtttgcatcccaaccaggtggagatcgccatgggctcacaaaatggcagcgtctttctgtgggacgtcaagtcggagcggcacgaacgcatcgtgcccgaggtggacgcatccattcaggatgttgccatctcgccggatggcagatacttggcggcggccaataacaagggcaactgctacatctggtcgctgaccagtcaggatcagaagatgagcacgctgcggccgaacaggaaaattccggcccactctcgctacatactgcgctgcaaattcagtcccgattccaggctactgctgacgacatccggcgatggcactgtgtgcatttggaagacggatgactttagcaaatggcgcgagctgtgcatcgagaactattgggtgtgggatgccgcctttagcgccgattctaaatggctgttcacagcctcatccgacggcattgcacgactgtggaagctgcagacaaagagttcgattagggattatactggtcacaccaaggccatcactgccctgtccttcaaggacgagatcccagttaaatcaacaaatatctcagatgtacaatcatccgcaaaaccgccaacccagcgagacaatccgccaggaacaaataatttggcattttttgaaacagtggggagagtagcaatgaatccatatatgggcaacacgacaactgaactgaactgagtagcgactttttcataatttataaacctttgatacataattatattacgactaaatcgtttgtatgcaaaatgcaatttgaataaaaatcttatcagcgtacatacacatacaatacagaaattgaaaaaccaaaagtatctttaagataatggggagcacaacatagatgcgggaaaattgactgtctttcgttcttttcattttcctcctgcgctttcagtggacgggagcgggtgatacttatatgtcggggtattttagtccacatagtcaatgcctttggccacaatcgattccttgatgggatccggatcgtcgcccagcttgtagcccacaatgcatgttacgtccacggcc

SEQ ID NO: 4017 - protein, 362 aa, DROSOPHILA
MGDQQQLILATGGYDHTIKVWQAHTGNCIKTMRFVETSQVNALDRTPDKTRLAACGYQCIRLYDLESNCTAPVINFDGVQKNVTRLGFQEDGNWMFTAGEDHHVRIWDMIAAPPHCSRIFDCEAPVNAACLHPNQVEIAMGSQNGSVFLWDVKSERHERIVPEVDASIQDVAISPDGRYLAAANNKGNCYIWSLTSQDQKMSTLRPNRKIPAHSRYILRCKFSPDSRLLLTTSGDGTVCIWKTDDFSKWRELCIENYWVWDAAFSADSKWLFTASSDGIARLWKLQTKSSIRDYTGHTKAITALSFKDEIPVKSTNISDVQSSAKPPTQRDNPPGTNNLAFFETVGRVAMNPYMGNTTTELN

SEQ ID NO: 4018 - DNA, 8094 bp, DROSOPHILA
tttgttggaaatttaatttcgagctcacgaggtataacattccatattcaggctattatttttaaagttatggccaaaaaactgattatttgatgaccgaaattcgaaaaaacggatttagccaaaaagttgatatttacaaacggaattttcatcataacttggctaaaaatgctcatataattgtaagaataactgttttgagcagctaattaccagtgctaactatccctatcactttttgaagtttttagggaaattaatttttgggtcaattttcgcattttttgtaaggggtaacatcatcaaaatttgcaaaaaatgtcaaaaaaatagaattttcatttttgaacacagtttgattggaaatttgaatacgagctcaacgaggtataacattccatattcaggctattatttttaaagttatggccaaaaaactgattatttgatgaccgaaattaggaaaaacggatttagccaaaaagttgatatttacaaacggaattttcgtcataacttggctaaaaatgctcatatagatgtaagaataacagttttgagcagctaattaccagtactaacgatccctgtcggagtttttagggaaattacggaaattacgatccattggtagttggtcctggaaaaaatggtaatcaccactgttccataaattttatacacaattttcatttgttactttttatttgctttttttttttaactgcaaaatgcattttgcttttacatcaagttgtattttggtttctcgattctctttatgaaatgataacacatacttatatgtccttaaatattatgcgaccatttctctagactaagatctccatgtttcggatgtggattgtggactacttttgccggacgcgcgtcctgccgcgtgtatgtacagtgtctccctgtgcttttgagctggattggggcagattagtggtttggtggaggctagtggtcttccggttggttagtggtggtggcttatccaagtgcgacaaatgcgagtattcaatattcaatatgcggggagtagctgctagtggatagatttagtcaagagttggttaagggtgggctggatcgatcgatcgatcatctgttaaatggtttcgtttttaagttttgattttaggtgcatgttgtgcgctgcaaagctttctgaaagcaatcgtgacacatgcaacattttgcgtactcatactaagtaattttctttacacttcgtttgaacggaaaacaaaggcttgtgactctagctaattttacattatacttgaagaaattttgctaattttcatacatgtgttattacatatagatatatgtatgtatatatagtttgttttttttgttttaaataaattctttccttcactccgagcctggagactacaaaaaatatttatagttatctgcgcggcattattttgcgtcttcccaatttcggattggttttggattatatgcagaatgatccgagtgtcaagcgttataaaaatagagcatccatcgatctgatctgggaggtgagtagtattcatcatgcaatctggtaaggtttttttttttgctttttgttctttgtttctctaggaaaaggcctttgaaagaattgaaaatggttctgttctgtgattaaatagtattggagtgtatgacttcagtggtctgactgactgactgactgactggctgtgcgaggagagttctgtggctccaatttcgacttgcatctttcattcgggtttgatcacagcttttacaattctaatgatatatacgtgtgagtggtagagtgtgtatgggttgtgtgttgtttggagcacagtgcgggcaacttttaagttcgcaccaaaaatactatatatctcgtaggtattatatttacatgcatacaaatatgatgagacaaaaaaacgtatttatcttcttcttttcttttttagcagatttctttttatatgtaaatatttataatactttcgcaaagatgcacaaagaaaatgcattctgaccgacattacatacacatagtttacacttaagatttctgatttttgttttcattttcagtttacttctgttcgagaaagctgccattcttgacttgattcataattgaatatagatcttcttgttattttaaaaaagtaatacaaaatatgtttggttttccttcatttattttctttacgattattattccgttttagattcgcttggcatatatgaaaaatgtaggtaagaaggcatgttagatatatatgtttcttaatcatttttctttaatactcgctttctgcgcttttcaactattcacgtctagttggtaaaataatttttagtaaaattcactacgactctctgctcgatacacttaattacgctctatgtataaatattagaaaaaaagggtaaaaaaaaaaacaaaacaaaatgacacatttaacagcttagggggtcgaagagagctctgtgggtgggggtgttcgggcatcagattcggtcacatctggagaagatgcggccaggagactgggcaggcggagatgaatttctccattttcattttggtctattttcgtatgcaacaacattgaacagtgcttaaatctgatttcttctggtattttttataatcgttatacatcatattccatattcctatatgcgctacatagatctaggcatatgctataaattttatgtaactagttggctgatgcgcctctgccgctgccgctcctgctgctccatcttcagctgcttagttgcgtttaggaaattcgcagcccgctgcatctgattactcggttgagatgggggggaaaatgcacaaaatttgtccgctccgcctcgggtccgcctacgattttgactgtccgccggacggtttgtttggcttgctagccacgagtgtcctcgtcgtcgtccttatcctcatcctcatctgttatgccttcgttgtactccgtactttatcggactctagttaactttgtcatggttaaacactcttcgctgttaatttcggttttttttttttgcttttgtttagcctttttgtttgttttgctaatgctgctggttttgtttttgtttctttatttttagctatttgtttttcattttaaatttaatttaaataatgtttatatatagatgtttttgctatacaactatagcttggtgtgtaataatatttaaaaaaaaaataatagattaacgtaaattttttactctactctctacaatttcatctccctcgtccgtgtctccttgtctcggaatctatctgtgcttccgatcgtttctctcgtatcatatataccatattatatcatatcaggacgaacatctatctagtcgaagaaagttacaactccaatttgcaatggtaaaacataaaattattctgtatacacgttgttttctcgtccctcttccggtccaaggactgtgttggtagtattatcctactccgagtccggttcgcgctcatcgaagccagccagatcgaccgtctgtagcattccacgcgaatatgcgtattcgatgagggccaggtgacagaacacgtactgatcgggcatctgaatggagtaggctcgctgcgaccggatcttctcaaccgttccacgtatgtccgccgtgcccacgtcctccaggcgcgatatgcaaatgtccagggtgatgaatgtacctgtatagtgtttttgatagtcagtaaatctgacgtgaagtgtctacaatgctagcgactcacctgtgcgtccaatgcctgcactgcagtgcaccacaatgggcggtccacggggatgacccgcccaggtgtcgcccagtccttggacaagctgcgcctgcttctcacgcaccttctgcaggaagttcagcatggccatggccgagctgggaacgccatagtccggccagctggtgaactgccaatgtgagacattgcgaatttcgtcagtctgttggcgaaatgataaagtgattataatattcgctatcgttgccctatttcgagaacttcacctttatgtttctcaattctaacgaggcaaccatatagtcctcgttgcactcaacgctaattgttcgcacatggtagtcgccaaactctaaggaactttcttcagtcggctcccagtactggccgcatttcacgcgtccgcgctccatcacgcgcgtcgtcatcactataactaaacaatgttgttcccagatcatgcgccaaaagtcctgggatgtctttggtaatggacctggcggcgtgaactccattagcatacagtttttacatatgattaagtgtgtcatcatcgcttaccttgagttgaaatataggcattcttttgtttgtagccatcgacgaaattcgcattaatataatccgacggctcgtcgccgtcttcgtgtgccagaacaactcgactgtgatcgtagcagaggacgtctgtgtagcgattcttggtcagattggcccgcattctgcaaggatataggaacgttaatcatttagaatgatgtagatgcagaattaggatttcatttgacctacctcgcatgcagaaaggtgccctcgggcgccctattccgaatgtccgcgtactccttaatcagaccatggcgtccgcgctgcttaaccatctgaacaatctgatcaatgggcttgggatcgccctcttgaccggcgagactatcatcgtcactgaagccggatgaggcgctgctgggtggattctctgaccagaactcgccgccgccattggtggtggtgccagcagctgctccggctgctccagcagctgtggtggcgttcgtgatggtactattgttgtccgcggagccacttgtgttgagcttgaggggattggccactgtggctgcactgctgctactgctactgctgttattcgccgcctgacggtggcttggactcagtccgttgattgtgatattttcgttgggttccgtcgccgccgacgctgctgtcgttgctccgccagatgccgatccagctggaccgacgccattgctgaccgtcaccacggtggtattattatcgcccaactggtggacggcgctgattatcgtggctgccgttgtcgcggcctcggtttccgtgccattggtggacacaattgctgctgatccagctgctgaaccggatccggatccaccgcccacacccacgatattggccagcagctcgtcctcacgattcgtcatcgattggcggcagctgagcaaccatgtggcgtgatcgacctccagcgtgccacccaagtgaatgggcagcgccttgcgcggcacgtgcagcgccaattgaggcaccgatacagtgaacactcgctcgcgcagcttctcgcgcacgaacagacgcaggatcttgaagggtgccttgaaccacagtggcgccgtcacgatcaggaccttcttcagacgcgctggatagccgccctgcaaggatcaaagaaggttttaatgattagaacttggctcttaaatgtgtaaacaggtttttttttttggcagttctagttcaaaatgttcctaaaaatgtatattttttgtagaatttcggacagagttcctgtcgactacacttttgttagcaatatgcatagaaaatcgaattaaaacgctaccctttaagcaattacaaatatctttcaatggccatggttcttggtatatttttaattagtttcgtccatttattattgacttcatttactaattgacacacaaaggcatgattaaaagtaagattaatgtacatcgagctataagcaaccaattagaggagcatgcagcaattttccaggaaattttcaaatatatatgtatgtatgtgtgtaccgtcagtcgacggacaactcattgtatttcagtttactgagaatcaatttgtggcagctgacatttttgcttaatattcagttttgacccttgcacttttccccaaaactgcgtaccttagattttgcattcggaatagcgattttagattttgttaagctaaccccactgctcccctcttctcaatgaaagtttctattccacctaaaatctgaatagcagcttttcccaggaatcgtatattgcatactgctgtgcattggacccaatacgagggttggctgagtttgcaaaagtccacgcatagctcagcccagagatatttgtaaatgggccacgttcgtatggggacccagtttccagggaaaccttgtgaaatgaagtaagttgcagttctggctaaaaaactttgcatttattaattaacacgcaaccccagtgaaaggctctggtttcagctcgccatcattacttgctttggcaaacgtagagatacgcacttcttggaaaaatcgagaaacctttcacgttgcttgcaatcacagaaattcccttccttcctaaataatatcgggtgatccaaactggtggtcactggatacttagtcagatttaattgaatttaagaagaaatgatagcaatttaaaatagtaaatatttgatagttattggcttataactttcctgaacttggaaactagctaaagtaacaaatatattaagctaactttttatacatttaaatagttatcacatggaccgattacatgtgcatatttttggttaactgctgcagctttgatgaagttgaaaagccgccaggtaaagtggctaaaagaaaactgcgtcaacatacaacggttcagtgggcaagaaggaaaagtgggtggtggtggttggttgttggttgttggggcaaaagcaccggcaaccttcacccagttgggaaaatgttgagaaaatttcattgcggcatttttcgtcgatggtacattgagatagagcaaaaacaacaagtggaaaacttggcttcactcaaaggtgaaatgtgatttcccagcgcaagagcgagaaagatagttatgagacagagatggggggagatagaaaggggttgtgggtggctcctcgttctttcccgatgtagttctgcttttcggagtatgtgcacacacgtatatacatatgtatgtacatcaaccatgccatcattatttagtttattggcctcaaaagcagtgcagcaagcagattaaggtcagcaagcacagtgggcaaaaagtacgtgtacatatatatgtacatatatgcaacagaaatgcggtacaaccaaacgacaacaacaagaactgcaaatgcacactttaattaaacgcacaatcacaaccaatataggcacacgcacacacacatccatgtgtttttgtggaaaatttaattaaaagttcttcccgcagtttacctaaaaaatattgtcttttccctccgctttccccccattgtttcgctttgtgcatctgctgttggctcaataaattccgtttaaagccctaattggcagcatattcaattacatagcctgccccccccccccctttttcttttctgacccctttttttcggaatttctttctcttcttctatggctacggattgcatcatcaaatcttacacaacagcacaaacgcaaacatatagaagttgcagttgtcattcgactcaaaaaattgtgattttaattgacttcatatcggacatccggggtaaaacatcgtatcggatatcctatacaaaattgcataagaaatggaatttcctttcatctaccgcttctccttctcaatttgtaccctcatatgtatgtatattcattcctgaaaccctcgttctctcgctttttatgcttttgttttgcctttaggtttgttagcatgtgcactttcactttgatcccagcacacacacacacacatctgagattatggatgctgaaaagtacgcaacattgtttaaaattctcttcaaagcgaactcaaatgcataataaccatttattccgcagtaattttatgtaactcttggaggaaggactaagaacacatataatacgaaatgtaggcttttactttctaactcaacatttacatctcccttttgattgtcctttaatttcttaattaaatacttggaataataatcaccat

SEQ ID NO: 4019 - DNA, 2222 bp, DROSOPHILA
atggttgatggcggctatccagcgcgtctgaagaaggtcctgatcgtgacggcgccactgtggttcaaggcacccttcaagatcctgcgtctgttcgtgcgcgagaagctgcgcgagcgagtgttcactgtatcggtgcctcaattggcgctgcacgtgccgcgcaaggcgctgcccattcacttgggtggcacgctggaggtcgatcacgccacatggttgctcagctgccgccaatcgatgacgaatcgtgaggacgagctgctggccaatatcgtgggtgtgggcggtggatccggatccggttcagcagctggatcagcagcaattgtgtccaccaatggcacggaaaccgaggccgcgacaacggcagccacgataatcagcgccgtccaccagttgggcgataataataccaccgtggtgacggtcagcaatggcgtcggtccagctggatcggcatctggcggagcaacgacagcagcgtcggcggcgacggaacccaacgaaaatatcacaatcaacggactgagtccaagccaccgtcaggcggcgaataacagcagtagcagtagcagcagtgcagccacagtggccaatcccctcaagctcaacacaagtggctccgcggacaacaatagtaccatcacgaacgccaccacagctgctggagcagccggagcagctgctggcaccaccaccaatggcggcggcgagttctggtcagagaatccacccagcagcgcctcatccggcttcagtgacgatgatagtctcgccggtcaagagggcgatcccaagcccattgatcagattgttcagatggttaagcagcgcggacgccatggtctgattaaggagtacgcggacattcggaatagggcgcccgagggcacctttctgcatgcgagaatgcgggccaatctgaccaagaatcgctacacagacgtcctctgctacgatcacagtcgagttgttctggcacacgaagacggcgacgagccgtcggattatattaatgcgaatttcgtcgatggctacaaacaaaagaatgcctatatttcaactcaaggtccattaccaaagacatcccaggacttttggcgcatgatctgggaacaacattgtttagttatagtgatgacgacgcgcgtgatggagcgcggacgcgtgaaatgcggccagtactgggagccgactgaagaaagttccttagagtttggcgactaccatgtgcgaacaattagcgttgagtgcaacgaggactatatggttgcctcgttagaattgagaaacataaagactgacgaaattcgcaatgtctcacattggcagttcaccagctggccggactatggcgttcccagctcggccatggccatgctgaacttcctgcagaaggtgcgtgagaagcaggcgcagcttgtccaaggactgggcgacacctgggcgggtcatccccgtggaccgcccattgtggtgcactgcagtgcaggcattggacgcacaggtacattcatcaccctggacatttgcatatcgcgcctggaggacgtgggcacggcggacatacgtggaacggttgagaagatccggtcgcagcgagcctactccattcagatgcccgatcagtacgtgttctgtcacctggccctcatcgaatacgcatattcgcgtggaatgctacagacggtcgatctggctggcttcgatgagcgcgaaccggactcggagtagaaaatgttgcatgtgtcacgattgctttcagaaagctttgcagcgcacaacatgcacctaaaatcaaaacttaaaaacgaaaccatttaacagatgatcgatcgatcgatccagcccacccttaaccaactcttgactaaatctatccactagcagctactccccgcatattgaatattgaatactcgcatttgtcgcacttggataagccaccaccactaaccaaccggaagaccactagcctccaccaaaccactaatctgccccaatccagctcaaaagcacagggagacactgtacatacacgcggcaggacgcgcgtccggcaaaagtagtccacaatccacatccgaaacatggagatcttagtctagagaaatggtcgcataatatttaaggacatataagtatgtgttatcatttcataaagagaatcgagaaaccaaaatacaacttgatgtaaaagcaaaatgcattttgcagtt

SEQ ID NO: 4020 - protein, 578 aa, DROSOPHILA
MVDGGYPARLKKVLIVTAPLWFKAPFKILRLFVREKLRERVFTVSVPQLALHVPRKALPIHLGGTLEVDHATWLLSCRQSMTNREDELLANIVGVGGGSGSGSAAGSAAIVSTNGTETEAATTAATIISAVHQLGDNNTTVVTVSNGVGPAGSASGGATTAASAATEPNENITINGLSPSHRQAANNSSSSSSSAATVANPLKLNTSGSADNNSTITNATTAAGAAGAAAGTTTNGGGEFWSENPPSSASSGFSDDDSLAGQEGDPKPIDQIVQMVKQRGRHGLIKEYADIRNRAPEGTFLHARMRANLTKNRYTDVLCYDHSRVVLAHEDGDEPSDYINANFVDGYKQKNAYISTQGPLPKTSQDFWRMIWEQHCLVIVMTTRVMERGRVKCGQYWEPTEESSLEFGDYHVRTISVECNEDYMVASLELRNIKTDEIRNVSHWQFTSWPDYGVPSSAMAMLNFLQKVREKQAQLVQGLGDTWAGHPRGPPIVVHCSAGIGRTGTFITLDICISRLEDVGTADIRGTVEKIRSQRAYSIQMPDQYVFCHLALIEYAYSRGMLQTVDLAGFDEREPDSE

SEQ ID NO: 4021 - DNA, 4637 bp, DROSOPHILA
cagacataaacgcatatcagctaatgtctgaaatggaaattaactaatgcagacatgaggattcgacaccatggctttgcgaaaataattgggcatggaaaaacgcggatgagtaccaagcaaggcacacctcatgcgaaatgatggaattccaaggatattcgttcatcaagcagctaatataatatgcaacgaacagcatcaagttataggactgcccaatcaaggcattatacaactacttgcaggatgcacagcaatattaggggatacaacaagaattactccaaaaagtaatttcgacaggcgtctgaaatgtctatctttcccagtttacgaattatagacgagaaatggaacgtggtcccgctgaagcacttgattgtgaacaacactgcaaaatcttcaaatgcgcatcaagactctgaaaaataacaaggtacacattgataacttgattttccacacggcaagcggacactcggctctaggggttgacaacgattatcataattatattggtcatttatatccggaggcaacgcataaatgagagacgactactggccgtacactcaagggaatgccttaatatgtgtttagatatgataagtaggtaaactataaaaatgttctatttatgggctgcaataaacatgtcaccggacagtataagtggcaactacagataagtaccgattgcagcggcctattgccgaagtgtcaagagatatgaccatgcgggaggtgattagcgcggtcatagtcctcaaacatagatttaagaataaaacttagctgcattaaccaacgcagactgcggcgtcttacaagcgctgcattatataattatatgataagaacctatgtaagaatgaataaaaggcgacgccctcgcagcagcgagtccgttagattcaaacacccgaattgaactcattaagtgtacgcacaagtttatagtatgaacaaatattttaattgttttcttatttcttttaattttctagaataaaagtatctcaatgacagacatgtatttggatagcaccgatccaagtgaaaatgttgggcaaatacatttctccttggagtatgatttccaaaacacaacattaattttgaaagttcttcaaggaaaagagcttccagcaaaagatttgagtggtacttccgatccatatgttcgtgtaacgctgttaccagataaaaagcatagattggaaaccaaaataaaacggcgaacccttaatccacgatggaatgaaacattttattttgaaggttttccaattcaaaaacttcaatcacgtgtaagtaataagttagaatccgtttataagcactgcttggagtttgctccacttttgagtgctgtaaagaaattttgtggagtttattaaagctaaattggttttttacgaacaatcattacaattataataataaaaaaatactgtaaaatatttatttataatattataatacacatttatatttgctgtgaaatttagtgagatattaaataatttaggagggttaataagagtgattttaagcatggactgacgaagattatatactttcgttcggtagcgtcattctgattctttttgtgcacttggcaggcataaacaaaggaatagttatatttattaagttagaattaaatttcaatcacaatatacattttattgtatttttatatggacaattgaaggttttacacttacatgtttttgattacgatcggttttcaagagatgactccataggggaagtatttcttcctttatgtcaggtaaataattaatttaagaggtatttcttaaaatttatattgcttatttaataaggttgactttgctggaaaacaatctttttggaaggctttaaagccccctgcaaaggataaatgcggagaacttctctcctccctttgctatcacccgtcgaactcaattttgactttaacactaattaaagcgagaaatttgaaagccaaagatatcaacggaaaatctggtaagcagaaacactagtgtttacaagatcattttttttatatatcattatatacgtatgtttattgttaaaacaggatttcatttaacaccgcaactcctaaagtaatagtaactactatagattcgttgaaatgtatgtagcatgtcagtctgtctctccttccttataaacgtcgagaactcgaactaggaagttgagcttaaccatatagattgtttccagagacgcaagaacacgtctaaaaaaatattttgcgagctcgattatttctctcaatcgaaaacgaagctaaatatccccatcgctataaatcaatctacaatacatagtggcgccccctgtactataaaaccattccactcggctaaaaaaaaataattactattcagtatttactattttctatcaaaaccttgccgaataagtgcactttatatttatttggtacaaaatcatttataattataaaattttttttaatttatgttttaaattaaccatatgttaagtttggcgtgaaatggcctgcaaaggtatatagatggaaatcagtttagtcaaagccgtttacacagaatcataaaaagttgaaaaaacacaaaatgctgacaataatagtgtttctgaatgatataaggatttaaaagctgtagtccagcttttatttacaatacttatgacctgtctcagtctcaaaaaatatactttttggtgatttttcacaaacttaattccgtcgcattttattttattttattattaatttgatttgcctaattgccgaatcttatatataccgaattagaagactttatgatcataaggtgtcatttaattcaaaagaatgggaaggcgacaccactttgattgttctctttatgatcataaggtgtcatttaattcaaaagaatggaaaggcgccaccattttgattgttctcttgcatgttaattttaacctcttcaatattaaaatggttatacaatcagtttcgattttgaactacagtttgattggttatgataggaaaatcacattatatttttcattccctttgttttgtttatattatagtcgcaattgtttcgtctatacaagatttaaggatttaacaacttcaatgtgttttttactagaagactttccaccagtaaatgcaaatttaatattcttttacttgtagatccatacgtaaaggtgtggctacagtttggcgataaaagggtagaaaaaagaaaaacgcctatatttacgtgtacattaaatccagtatttaatgaatcctttagttttaacgtaccatgggaaaaaataagagaatgttctttggatgttatggtgatggattttgataacattggaaggaacgagttaataggacgaatactattagctggtaaaaatgaaaataacatctctacagcttaatataatccaatctttaataaaatattttttttgttttaatgcaatcaaactaggaaaaaacggttctggagcatcggaaactaaacattggcaggacatgatctcaaagcccagacaaactgtagtacaatggcatcgcttaaaacctgagtaactttaatacgaattccttaataacgtttaattaacaccagtagatataccggagaacaccgtacattgatggatgtagatacatacatacattagtttatttatagttgcttttatagcaatatcataccaaaataatgtaaaaacgaaaataatttaaatctgcacaaattaatgttatattgtttacaaaaattgtaactttacgaaacagccataaaactataataaagtatttgttctgaaaagagcaatagttttgtacgtgcttaatacatatatattatatatatataatacatataacatatatataatatatatattttttgtaaggacattattatcatcataaaatattataaacgattgtacatttgttcaaaaaatcctgttaaaaatgatgttgttgcacaaaggagtacctctttttgatggaaaagtccttaaagttgaaaagtactattttccatcactttattttattgaagcataaaaggtgataggaacaaaccattcaaaaacatgactaagtgcaatttttgcgtactttctttggaatgaatttaaatttattttccggataatcatttgcttagaattttgagaatccttataatctctcatattttagtcctaatacagttaaaatttttataaatgggtttaaaaagcgtaacgtggtggtttttttttatcaaatgcttaattaaatatttataagttggaatgctttaaatccgattattgattttgatattcgatttcggcaaaaattttatttcctaataaaaaaaataattttataaatcgaaaaaagttttgtttttgaatgagatcttggtatcctaaaaggaaatctgaaacggtactggtgttcagttatacatcttatgggataagttgataagataaagttggatattgatatatattcgcaagatagatatcggtcaaaattaaagaaaaaatcatttaattaataaaaatgtatataatacgatcaaattgttaaattgtaacattaa

SEQ ID NO: 4022 - DNA, 904 bp, DROSOPHILA
aattttctagaataaaagtatctcaatgacagacatgtatttggatagcaccgatccaagtgaaaatgttgggcaaatacatttctccttggagtatgatttccaaaacacaacattaattttgaaagttcttcaaggaaaagagcttccagcaaaagatttgagtggtacttccgatccatatgttcgtgtaacgctgttaccagataaaaagcatagattggaaaccaaaataaaacggcgaacccttaatccacgatggaatgaaacattttattttgaaggttttccaattcaaaaacttcaatcacgtgttttacacttacatgtttttgattacgatcggttttcaagagatgactccataggggaagtatttcttcctttatgtcaggttgactttgctggaaaacaatctttttggaaggctttaaagccccctgcaaaggataaatgcggagaacttctctcctccctttgctatcacccgtcgaactcaattttgactttaacactaattaaagcgagaaatttgaaagccaaagatatcaacggaaaatctgatccatacgtaaaggtgtggctacagtttggcgataaaagggtagaaaaaagaaaaacgcctatatttacgtgtacattaaatccagtatttaatgaatcctttagttttaacgtaccatgggaaaaaataagagaatgttctttggatgttatggtgatggattttgataacattggaaggaacgagttaataggacgaatactattagctggaaaaaacggttctggagcatcggaaactaaacattggcaggacatgatctcaaagcccagacaaactgtagtacaatggcatcgcttaaaacctgagtaactttaatacgaattccttaataacgtt

SEQ ID NO: 4023 - protein, 280 aa, DROSOPHILA
MYLDSTDPSENVGQIHFSLEYDFQNTTLILKVLQGKELPAKDLSGTSDPYVRVTLLPDKKHRLETKIKRRTLNPRWNETFYFEGFPIQKLQSRVLHLHVFDYDRFSRDDSIGEVFLPLCQVDFAGKQSFWKALKPPAKDKCGELLSSLCYHPSNSILTLTLIKARNLKAKDINGKSDPYVKVWLQFGDKRVEKRKTPIFTCTLNPVFNESFSFNVPWEKIRECSLDVMVMDFDNIGRNELIGRILLAGKNGSGASETKHWQDMISKPRQTVVQWHRLKPE

SEQ ID NO: 4024 - DNA, 5962 bp, DROSOPHILA
cgcagagaacggcggccaggtcctcaccgtgatccattcccagcatccgctgctcctcagagaggctatccagcagccaggcgccgtaccagatgagcaggcagccacctagctaaacaaaggccacaatccctttcaatgtcagccgatcgggtctatttcgggcacttacggcacagatgccactgatgacacacagaacgtatctgagcagtcgggtggtgcagtacatggcgcagctagctttcgattttcacaattttcatgcgagtttttccgtcggcgttccaaggcgcacaccttgagcagtgccatcaaaatatagactaaagtcgcataatctccatttgtttgcctggggcgactcgcagagctgtcgccggcaaccgattaacccacagattcgttggctgcttcggattctgtcgccatcccgtccggtccggcccgatccgatccgacccgttggccagatgcagtggccaaataaatgccagggggaaatcaaaggcgagcacggtccgcagcgaataataccaatgaaaacaaccgaccgcccacgcgctctacaaaaatgagccagcatgtggccaccctcaccttttggccgccactcccctcacctcattatcataggaatgatgtcaaccgatctttagatcttcagatcttctggatcttcggccagattctttatttgacttgtctcctcgaaatgctgttacagaaaatttgtggcttaggtcgagcttagtgtagattaagttacattctaagcggaatatagaatccgcttcaacattgcagttatccaaagtgataaatagaatacaaacaacgcactgctttcggtttgcttggcttaagtaaatttgttttggaatctctatcgagtttcggcttaagtatttgtatggagagttctttggccttaagtatgcgcagcttaaacttgaattttcgaaatgcatttcaatgtatttcaaaatggtatgtgaacctatttctgatagtacttcgagcgtcgccagcggttcacgatgctattggccaggacataggccaacagggcgcaaatcagctgtgaaggaataattggttttcattattgaacatcatctaactctcaataactctctacccacctccacacccaatagcaccagggaaaccagattaaatgtcgtccaacgatcggcgataaagtccaggaacttttgccggcatccttcaagattcagtttgtcactctcgccgttgtagcaactattcgggggcagaatgtagtccgagggccccacattgccgcagcaatccaactaaaataaatggcatgaaagggtcttattgggcacccccaccttttatagatctcgtctcaacttacccatcgctcgaggctggcaatctgactctggttgccaggcttgattggcaccggctggtcattccacagtttatcgaacgttttgtccacgttaatcagcagcgaggtttggaaaacccacaggaacccaactgctagaacttccagtatgaccaagacaatcagaataacaacgaactgggcaggcgacagagaaatataattataatttaaattcagattagtatgttttataagaccactttttttagtgaattcaataaatctagagaaatctcaaatatatagaaccaatacattggtttctaaaaaagctttggtacctacaattttttaagttctgggaaccaagaaattttaatttcggtccataattttatgaattatttggatttgttgagctttacgggcataacatacagtatagagtatacttttacagtgcgaagagtatactatattcgttgaaaagtatgtaagagtttggagaaagtgtttccgacgctatagaggatatatatatacttgataaggttccgcctaagccgcctaaatgtatggtttattgtacttaatgtacttcttacttaccaccttagatgtggcactgctctcccgcgctgctcccagagccccgaaaagggcggtcagaacgacgaccacgcccaccgcgatgatgacgaaggcggccgtgttgaagtgctcgaatttgtagatgatgtgcacaccaaggccgataacaaccaggccgaacagctgtcgaaatggggagaagtggatgattgaaaagttaaataattcagctttgtccgagaggtgataaaaccgtatcgcctgaaggttttcgcgttgagtcagtatgcaaatgaggtttctctctaccgagaatcaatggaaacaatccaggcgttcggctgtgtgattaaatcttagttcttacaaagatcgccgcacagcgatgtttactcattctcgccgaactaatgccatcatagagctatattacgtatacgcagagttgtctctagaaaactgcctctcacttttcgagtgcattgcggttgcattttaaaattaccgccatgactcactagatccacaagcacaacgctacatttcgcactctcctgccaaatgtaggctcttcgtaatttggcagcttgcccagagaagcgaaaagaattcaaaatccaatcccaataccgaaagtaagttttcgaaatgcgtagtaattacaaggcgatgatgtttgcacacggcaacctgttgacgccagcaatttgtaaattatttttacaattgtcgttggcaaacaagaaaaccagtcggcaaatacgttggctttgacgagccacgtttgtttgtcaccccaactcaatgggcccggcttagaaaacgcttacgaatcagcccaaagcctacgaggtgattatgagtgatttcgacgattaataacggcagccatgactgatttcgagtgtaattcccggtcagaaacgttttggtaaccctaaactgggcgtaacgctttattttaggctctggatagtaggcagttaaataaatattcacttaaggctgaatttaatgagctttgttgcccaataaggcagcgggtaaatatcatttacattaatagagttacaatcgacactggcccatcaattaatgcttatgagacaatgggatgagctgtagttcagcagacacgtcgactgaggagacatctggcactgttttgtggatgagcgagtgtgtattgcgcgccatttaattgtaatttattattccccggcgcccaaaatcccgcaaagtccaaataggcgctgacacggaaaaccgaaaacacaaaggcacgttcttgaaagcccgaaaatcgaaaacaaacaaattgtattagttgaggaaatgcgagccaagcatgccacaatctgaattcacttaggaccatcgacccatagttagactttgtgattgagtaccgcgctatgcgacttaattcgaagcagaaccttatgatcgccatttgcacagggaacaagcccgcccactcaaccggtgatatcgaaagcggactattacgcccgtcgagattgtttaacgggccaagaagacactcaggtgatgtctaataaacgcgataagatcgccatgtgttggcaacagagaaacagcaacgttttattaatttgctcccatttccccacgcagacaagcaattaaacgcaattatcaccagactaaccaaggtcggacttcggcagagcagtgcggacaactaatttgcatatccgttgataagggggacagtagtccgctgagtaggcagatcaaatgccattgccagagctcggaatcaatgttcaaaaacgtacaggggaccagatttatgtgggtttgctgtcggcatgggagcactaaaggctgagacacaaaggttaagccctaccctaaaacataatgaagtaatttcagtttcagcctgggctccagcataattgaaatctctcaacgcgcaattcaagagttaactcgcctggaaccaaatgcggaaaatcgcgcatacgccgtgtggtgcgcgctggcatttcctcggccttcagtcgcattccaatggaatcaaacgccagaaagatgcccaaaacgtctaggaaatgacatcaacagatatgtatatgtacacacggcccaagccaaaatctggttcaagtaaatccaactaaaataacagcgaatatctaataaaaattctgtagattttgttcagggttaagtgatggcgtgggtgaccaagtttcgacttggcagacataaaatgttgaaagccaaataaaaagctcaatagaaaataaacaaaatacaagcaaatatctaaatattatatcatttttaaagatatttttgtgcgggtgaaattcgctagaacatggtgccttttagaagagtttttccctatctggctgatgtaaaagtatttgcctcaacattcaagtgaatttgaaaatgaaacacaaaaacaaacaaaaatagcaaaacaatatttatgcttaaggaggcgctccaatgtttgaattctgtgcaatgaaataaacaaatgtcacgtcaaaggctgatggatttgtgaatgaacttgggcgaagctggagaacgtttcttgggcaagaactggcatttggccaaagttaagttgttttcctgcaattagccttggctagagcttcagcttaattactgtcgtcgtgctgtttggggtcaccagagttgcgcgacagaaatacctgccccttaacgcttaaaacatgtaatgcttaatctttatggatgcttatagtatataatactcacagcgaggataatatcccaaaagagggcaaagcccttcaaaacgtttgtggagcaggccatcttgccaatccaattttcggaaactatatatctattgtttctttgcaggaggttacgcgtattatttataacacttggcaactcgcggcttgttgacaatcggaaaatatttatttcggatctaacggttgctggggttacccaaaaccgggctcatgctcaccgctcgactgttaactgaaaactgaaaacttttccaaacgttccgactttgttgatagcgcgaaaagcatttggcgaacaaacggcggaaatcggaacgaaagcttcggcacaacgtgtggaatcgaaacatttggccgcaagagcgcaatgattttgtgctcaactagatatttacttatatatgttcgttagcgtgtacacagaaaacagaaatagatgacgatctatttgaataaaatggaagacgcggtggcccatgctagttataccccttactcgaaaaaatagggtatgttgtgcacgtgagcaaggaacaaacatttcctaaaaacaccacgatatcaacataagctgacttatctgctgaaatacagaacgacgattgtactgatcctttaataaaacacttcattaaaaatatcatattttttccaaaaagtgcaacaggcttggaaagctaatataccctgattactttgagggtgtgtcgcatctcatagtaatagtactctgactgcagcattctcgctttttttattttatttttgccagtagaaatattcggtttataattaatttccatttgaaacgttcatcgtgtgtatttattttttggataccaaagcttttctatgtgtgagcaacataaccggcagttttatttttaaatataatatcgtttgtataatttatacaagcaaaccacaaatgtgccccacaatgtgtgccccaatacgttactaatcaggtgtgtgcaactatatggataactaattaggttagaatagtaacgaaacacgacccaaacacgctaaatataatgtgtttttcaataataacagaatgaagtaggtgcttgactttggttcgataaatttatttaaaagtatgttgaaataaataaaactaaatctattttacttttcttaatcttagttgtgagttgccctctgtatttcactgaaatcaacgtgtgaaaagggatcatttcagtgcactgtgctg

SEQ ID NO: 4025 - DNA, 827 bp, DROSOPHILA
tcgagcggtgagcatgagcccggttttgggtaaccccagcaaccgttagatccgaaataaatattttccgattgtcaacaagccgcgagttgccaagtgttataaataatacgcgtaacctcctgcaaagaaacaatagatatatagtttccgaaaattggattggcaagatggcctgctccacaaacgttttgaagggctttgccctcttttgggatattatcctcgctctgttcggcctggttgttatcggccttggtgtgcacatcatctacaaattcgagcacttcaacacggccgccttcgtcatcatcgcggtgggcgtggtcgtcgttctgaccgcccttttcggggctctgggagcagcgcgggagagcagtgccacatctaaggtgttcgttgttattctgattgtcttggtcatactggaagttctagcagttgggttcctgtgggttttccaaacctcgctgctgattaacgtggacaaaacgttcgataaactgtggaatgaccagccggtgccaatcaagcctggcaaccagagtcagattgccagcctcgagcgatggttggattgctgcggcaatgtggggccctcggactacattctgcccccgaatagttgctacaacggcgagagtgacaaactgaatcttgaaggatgccggcaaaagttcctggactttatcgccgatcgttggacgacatttaatctggtttccctggtgctattgggtgtggagctgatttgcgccctgttggcctatgtcctggccaatagcatcgtgaaccgctggcgacgctcgaagtactatcagaaatag

SEQ ID NO: 4026 - protein, 218 aa, DROSOPHILA
MACSTNVLKGFALFWDIILALFGLVVIGLGVHIIYKFEHFNTAAFVIIAVGVVVVLTALFGALGAARESSATSKVFVVILIVLVILEVLAVGFLWVFQTSLLINVDKTFDKLWNDQPVPIKPGNQSQIASLERWLDCCGNVGPSDYILPPNSCYNGESDKLNLEGCRQKFLDFIADRWTTFNLVSLVLLGVELICALLAYVLANSIVNRWRRSKYYQK

SEQ ID NO: 4027 - DNA, 3172 bp, DROSOPHILA
atcagcagaaagtaatgaaaaacaccgaagttaatgtttaaacataaacacacaatgagaaaagagtcgtgtttccatattcacttgatttaatcggcatgcgatgttactcacagcgaaaggaaattcagcaagcttgaatcgataaaattgttgtatatattaaatagtttaacactgtgtaattttatttatcctagctcgattctaagtgcttgcgtaaatgatcatttaaattttctaacccgaaagaacttatttattggtttatttatacaaaattgaaatgaagtgcatatggaaacacaactcaaaaacagacagcacaaatagaacaacaggaacaaatgaccaacgcatttcgaaaggcgataatcatttacacgaaaaaccaatataattaaacagaatcccacgcaaactgaagactaactaacaaccaagttaagggctagttaatggagccggtgccaaagcaaaaaaggaaaaatgataacaacacctacacacacgacaactaaatgtaacaatagcaatacattttaatgaaaattgtagtccaaataatttgcatacatttgtattttgtccaaacttagttgaaatgattaaccgaactgtgaaagagtgcaatagaaatcgttttgcttctagattagtgaaaaatacaacgaagcccctaatttgaatacgaagcaacccaaaatccccgccctcccgtaataacaataaatacatatgcataattatgcaaaagtttgagaagatgaaactagaaagtctgtataatgcatacataatatacgactccattatacacacacacacgcatactaaggccgatgaataacatatgcatatacaatatagacatatattaaatatatatcattgtaataatttgtaatgtttatcagtagaattatgatccgaggtggagcagacgagtaaaacgcatgcagagatccattaaagtgtactgtaaaatgtgccacacattgttttatctaaatttattaaaggatttattattttgcagagggtaagttctaaaacttaaaaactagtcctgtttggaagatcctaatcattgcaacgttttataaatcaaagccgaactcttactctagtaaaaatttggctacgttcggaaaattagccagaacataggaaaaaccctactgaattaaacaaaaaaaaacgtgtttaacatttggctacgatcgtgttagtattgcatacttttaggtccatctttttgcacagagttttgtgtgaatcaacaataaaattggcactggaattggtcgatggcgtcccactactgattgccaggcgccgttgctcctgtagtcttcatggccagcatggcgtccagttcgccctggatgctctcgaactgattgtacagttccattagttccggttgtgtcatttcgatgttgatatcctcgccgacggccgttttcatttggagcacggccagcggggtcttctcccgctgctggcaatgcgaggagatctccatgttgagcttccaggccacatcttcgatgacatttgattcgtaccgcttgctggccaaattgttcataatgggcgtcgtttcgcgcacccacaaacgcaatatggcatcgatcttggcctcatcctccagctggagtttctcgcgcagctcacgctgcagcaaacttggcttgatgataaacgtggagatgcgacgcaggatgtaggagaaggtcttgatcagcagcaggaagtcctgacgcggtacgcccaccaatcgctccagttcctcgagtgtgtactccggttcggtgttacttgtggggttctcctcggtgctgctgtccacccggccggtggtcgtcacactggtgcccactgtactactggtggcactcgccgatgctacgctgggactcatctgccggtgggtgtagaacagaaccgtcgtaaaggtctcgtagggcaaggcattgatgattttgatgccctcacgggctctaagatataaatgcaagaaattaatctctataagaacattgatattacatacctttccgtgatctttatccagttaatgctcattgtgagatatatttaaaaatttttaaggaacatagagttattaagtctttaccagcacttcttttattatgactttaatattatttgtttatacagaccaacaatatacaaaaaactatcgacttgccacggtgcggtgctgccacacagttactactgccaataataacggtaagtgctgactaaaatacaaaaatattacattttgcgatgtgattttaaacatattctttattaattttttagatttaaatgttttattaaattaatttatttttctgtatttaggcctgaataatttaccttataaaattacaatgttttaaataatatttgctgttatgtttcctgcaaaataaaattcgtgaaaaaaagccgcaccagcaaatatcaataccagattgtcgacggcaccgacgatcgacgattcaatttgtagaagattatcaagtacgaatagttttccaactcattaatataatcgtcctacctggcaactccgctgatgcctatcgatgctccgctcgatagcgccaacaatcgataagcagtatttgtgtattggaaacgcggcttaacttaatgcagatttttccgctgattcggctgcgaaagatgcacttttaaggcgcagcgagtgcacccacgccccgagttcgagtgcagttgcagtcgggaaagcttgacaagtgcgcggagcaaggagagcgacgagttcgttgagctacagcgaaacggaaaagtgtaaaagcggggtaaacaggcgcagcggagcggatgataaacggaactcgggatcggaaaattggaagcaaaaccaaccaccgattataaaaaatagtcagcatcttaaaagtaaggatttcaagctaaggtttcagcgaaagcccgagaaaaacaaaaaccccaactaaactaacggaacagtgcgtcgggatatatgcatgtgtatgtggtatacgtatgtgtgtctttggctgcgtgcgattgtattgttcctgtgtaaataaacaaaacccggctctttagtcttccactagttcgtttcgcgtttctctgcgaggaatttttgttgaaaaaa

SEQ ID NO: 4028 - DNA, 1172 bp, DROSOPHILA
atattaaagtcataataaaagaagtgctggtaaagacttaataactctatgttccttaaaaatttttaaatatatctcacaatgagcattaactggataaagatcacggaaaggtatgtaatatcaatgttcttatagagattaatttcttgcatttatatcttagagcccgtgagggcatcaaaatcatcaatgccttgccctacgagacctttacgacggttctgttctacacccaccggcagatgagtcccagcgtagcatcggcgagtgccaccagtagtacagtgggcaccagtgtgacgaccaccggccgggtggacagcagcaccgaggagaaccccacaagtaacaccgaaccggagtacacactcgaggaactggagcgattggtgggcgtaccgcgtcaggacttcctgctgctgatcaagaccttctcctacatcctgcgtcgcatctccacgtttatcatcaagccaagtttgctgcagcgtgagctgcgcgagaaactccagctggaggatgaggccaagatcgatgccatattgcgtttgtgggtgcgcgaaacgacgcccattatgaacaatttggccagcaagcggtacgaatcaaatgtcatcgaagatgtggcctggaagctcaacatggagatctcctcgcattgccagcagcgggagaagaccccgctggccgtgctccaaatgaaaacggccgtcggcgaggatatcaacatcgaaatgacacaaccggaactaatggaactgtacaatcagttcgagagcatccagggcgaactggacgccatgctggccatgaagactacaggagcaacggcgcctggcaatcagtagtgggacgccatcgaccaattccagtgccaattttattgttgattcacacaaaactctgtgcaaaaagatggacctaaaagtatgcaatactaacacgatcgtagccaaatgttaaacacgtttttttttgtttaattcagtagggtttttcctatgttctggctaattttccgaacgtagccaaatttttactagagtaagagttcggctttgatttataaaacgttgcaatgattaggatcttccaaacaggactagtttttaagttttagaacttaccctctgcaaaataataaatcctttaataaatttagataaaac

SEQ ID NO: 4029 - protein, 201 aa, DROSOPHILA; identical to SEQ ID NO: 4005

SEQ ID NO: 4030 - DNA, 5728 bp, DROSOPHILA
aagcattgaatagatggcgtcgtagagcgcccaaacgtactgcttttagatgtactcatttggatacgtaaaggaaaataaaaaccccatcgtgcatattcgggtacaacgaaccctgttctgtttatacacagactctgtagaatcttttcatcctttcagttatattttaatattagatatactcttattaaaactatgaatattaatataaattttcaaacatatgtatgtgtacgcacgtacatccaactaatattttaaaaagatcaagaccatatatatacatttatgtatatatgaacttttttctcaaaaaatgtgtacgtttgtgttcacacatatgttagaagggcaagcacattttaaacaatcgttacttacaacaaagcaaatgacaaaagggatagaagctgacaaaaaaggtcgtagcattttgttgttttattgccattctgtttaggtgctctttaaattttgaaacgcaaagatcagtcagttttttgcaaaaatttagcgacatctttatgttttgtatttggcaagtataagcacataatatttataaatttcttgatttgtttaaaaaaatgtgacaatttcacaattgcacttttaatcgaaatatatttttaaacaaaaatataatataatttttagtaccatcaggaatgatggaatacgtagttttttgtatatatacataaggtggtgcaaatggtttttatttgtaaatttttgtcgattttttaagcattccttgttttgcactttagaactctaactacaactataacatacctcacctatctttgggattgtcaagtatttaaaacttattacagttagaggcaattagggacttttaagtctctgttctatggtccttaaatccgtattaagcttattgttaatatacaaagtacattaagttatatgcacttagacatgtaaaattatttaagatcagtaactaattaaatgccttttttacatataggatgaatttcacccttttattgaggcactcttaccgtacgtcaaatcattttcctactcttggtttaatttgcaagccgccaaacgaaaatattataagaaacatgaaaaacgtatgtcactggaagaagaaagacattgtaaagatgaactccaggtattaatacaaacaatttttacaaaagtataaaatcgttttttttagaatgaaaagactgaggtgaagcaaaagtgggcttcccgtcttcttggaaaactcagaaaagacattacacaagaaagtcgagaggattttgtgcaatctataatcgggaaaagaaaatcaatttgtgttctctcaaaccccgatcaaaagggaaaaatgagacgaattgactgcttaagacaggctgacaaagtatggcggcttgatttggtcatggttatactcttcaaggcgattccattagaaagcacagatggtgagcggttagaaaaaaatccggaatgtttacatccaggattatgtgtaaatccgtaccacattaacgtgtctgttcgggaattggacttgtacttggccaactttataaatactcataattcaattaacaatacaaatacgactttctcaactactccgggcgtaagatcgccacatataactatgtataatcgaagtaatgatccaaacagaaaagatgaggtcgctgacatgaaaaatgatgtcgttaaacaaaacccatataatggtgttgtttgtaatgatattattttagcaactggcgtgttttcttctcaagaactgtggacattatctaaaggtactatttactttatttgcatattaatcaacagactgtgtaaattatcatatacttatatgttataaaaggaagtgaattgaaacactttcgactacgaatatttgccaagatagaagaatttgacgcttcgacttagaatcaagaacgcacccataggttttaatatatgtatgtacaatatacactagtatactattgtagattcggtgaaaagtatgtaacaggtatatggaagcgtttccgaccgtctgtcagtccatatagaagcatgataataacttttaattaaatttaagttctaaatggttttttttttgcaaaagttactgtacttttgacacaacgtcataaatagtccatgcttgcactgcgaagcatggcaaacatcgatagaaagggaaaacgtgaacaatttgtgaaacactggaactatttcgattgctattttggaaaattttggaaccgttggccatggaaaacaattctttagcagtggttttattccaggctggaaaacttgggaaaaaataaaatgatcaagttttccaatgggaatacagagttttggtgtaaagtgcgccttggttctaaatgtcctatgaaaacttggtatgcaaataaaatgaaagtagttggaataataattttacaaagtctgaaaaaagtggaaggcagaaataatttttttctggaatattattagatttaattttagatgaatcaaatgatataaacctaaactctagccttataaagagggagaacgttggagctacctatgagtgtaatacatatcaaattaactctgaatcctcaatttctgctgctcagagtcttgttcaatctgggtcaattgcggctaatccgattccacttggatatagcagtacgtaaatatgcttgattgtttttttaaattttcacgagattttcgtatagttgattttatagatcagaggattacacaattatcacaaagtccattgccacgtacagaaggcccaaacggcgattcccatgatgctaacaaaatcgatcaaagtagctcaccgccaatcacgagcactgcatcagataatggcacaagtagtttttctttgatcgtgagagctacggatagctctattgaagatccaaaaacttcacccatttctttgcatcgctatacctctttaagtagtcggacgctggcccaaggtatcgtaaaagcattcaaaaagttgtaataataaaataagaatttaaaatgtgttattttttatagctctcccacaacatagttgctccttgctacattcgtcttccactagtccgactaataccttatattacccccagcataataatacaagaccatctcaaacaacttccgttgaggaacaaaatcgtgttggctccgacaaatattcaacggagcctcaagatatttcggactttgtcacttatgtttgtcaagacaccagtcatacgacaactataacaggatcagctgaaaaccattcatttcaacactcccatacactcccacaaggtcatggtcattcgccgcattttcaaattcatcaacagctgcgatctgcaaaattaacgacttcaccatcaactcattatcacagtacaatgcttccgccgatgctgccaccaatggctcgacctgtagctataattcgcagtagcagtgatctaaccttagtccaatccccaccaacttctttgccactgacagcccaatctacaagcttgaacgacaatagttgtatagcgaaacatagcctgccaacggataatagacttgcaagtaaccttgacaacagaaatagccccaataacacagatgtcgtttcacaacacgaaatgactggaactgcatctcctcaaccgcaatctcacacaccgacattagcgagtccccaatcttatctggatcctgggcgatgtaagcttttatcagctggctcaaacataggcagaattacaacacaaatgtatccctcatcaaataatagagaatattttaatcactttcattcgcagcccacatcggtaagtacgattgtttgacaagatgtcttttcatatgtccacacaagcgatagggggaataaggggtatatggaattttagatttgctaaaaccacagtcccactcttttgtaaaacgtttagatttctcaaaccacactacgtctttgaaagtttttagggtatgaatatttgaaggcctatacagacagttttgagcaattaatacactgcaaactgctttcgcagttccaccaaatgagtaacgggtagctaatagtttaaatgtaggcaataatttaatgctattgacaaatgtttcataaattttaagcttttgggatatgccggctctatttctacaatgtctggagttataagtccaacagacctaacactttactcagctccaatggctgtatcacgttcaagtaccaggactagatggaacgaagaggagcataatgtaattccacagtctgcatctagtacaaacatggataacacccaagttatattaatggaagactgtaagttttcgattacgtttgaagtgtttactgtttaattgatttaggaacttatttcagcgactggtcgttatatagatgagtattctagtcgtgactatgtgtcatgatgtaaactaaataaggtaaaagtcattaaactcttcggcttgggcatgccaaaatattgattagagaatcagtaactaataagagtaccttaaacagatacataaaatccttttgcacatatatttaagtttgacaataatcgttgtatttaatcataattgaatggactctaggtatgcctgtataataagctcggtaaaaagaatatattaaagcccataaagaactattaaggcgtcggagatgtcaatattagaagtcaaataaatttacgggatctcttattcctgttaatcctttattaaaaaaggtatacttgatttgattgaaaaagtgtaacaagaagacggaagctacgtctaccctataaagtatatctactcttaaccaataaaaccaatagccgagtcgatctggccatgtccgtctgtccgaacatcgagatatggaaaactataagagctagaaagttgagactagaaatgccgactcttgtgacgccaacgctgctcatatttacttcagtacgaccactctaaaaccacaagcgatttcggtatctcagcaatctaaagacttttttttagatttgataagtttacacaatttttttttctaatatttaatacagatccaaacttaaatacttacgacaaaattatttcggatatcatgaacttttattaaccaataagttataggcaggaagtcatatctaatattggattttaatttaatttttaggacgttataacatataataatatatcaagatgtgagcgaaatatctccaaatagtgggttattagttgtcaataaatctttataagccagaggccgaaatggatttatttgaaacatacagtgctactgtaagctgctaataattttgtacttatgaaaccagaacgaaatcgcttttaatttttactcatttcacaatttgtatcaaagattctcctacttacctccctatttttacttttagaacaatatataatatttcaattcaagtacaaaaaataatagacacgtattgaaattcccaggctaccacagtcagactatgacacagtattaaatatattaatgctctgtggctttttcgatttgtctagaatttttttaggaatccgtttgtgatttataaagataaaatcctgtcaaccactgtatgaaaatagtaccagcgttgccatgcaaataaaaaacattaaacacaaagcaaccaaaattctaatcatattttacgcatgtaag

SEQ ID NO: 4031 - DNA, 2217 bp, DROSOPHILA
gatgaatttcacccttttattgaggcactcttaccgtacgtcaaatcattttcctactcttggtttaatttgcaagccgccaaacgaaaatattataagaaacatgaaaaacgtatgtcactggaagaagaaagacattgtaaagatgaactccagaatgaaaagactgaggtgaagcaaaagtgggcttcccgtcttcttggaaaactcagaaaagacattacacaagaaagtcgagaggattttgtgcaatctataatcgggaaaagaaaatcaatttgtgttctctcaaaccccgatcaaaagggaaaaatgagacgaattgactgcttaagacaggctgacaaagtatggcggcttgatttggtcatggttatactcttcaaggcgattccattagaaagcacagatggtgagcggttagaaaaaaatccggaatgtttacatccaggattatgtgtaaatccgtaccacattaacgtgtctgttcgggaattggacttgtacttggccaactttataaatactcataattcaattaacaatacaaatacgactttctcaactactccgggcgtaagatcgccacatataactatgtataatcgaagtaatgatccaaacagaaaagatgaggtcgctgacatgaaaaatgatgtcgttaaacaaaacccatataatggtgttgtttgtaatgatattattttagcaactggcgtgttttcttctcaagaactgtggacattatctaaagatcagaggattacacaattatcacaaagtccattgccacgtacagaaggcccaaacggcgattcccatgatgctaacaaaatcgatcaaagtagctcaccgccaatcacgagcactgcatcagataatggcacaagtagtttttctttgatcgtgagagctacggatagctctattgaagatccaaaaacttcacccatttctttgcatcgctatacctctttaagtagtcggacgctggcccaaggtatccataataatacaagaccatctcaaacaacttccgttgaggaacaaaatcgtgttggctccgacaaatattcaacggagcctcaagatatttcggactttgtcacttatgtttgtcaagacaccagtcatacgacaactataacaggatcagctgaaaaccattcatttcaacactcccatacactcccacaaggtcatggtcattcgccgcattttcaaattcatcaacagctgcgatctgcaaaattaacgacttcaccatcaactcattatcacagtacaatgcttccgccgatgctgccaccaatggctcgacctgtagctataattcgcagtagcagtgatctaaccttagtccaatccccaccaacttctttgccactgacagcccaatctacaagcttgaacgacaatagttgtatagcgaaacatagcctgccaacggataatagacttgcaagtaaccttgacaacagaaatagccccaataacacagatgtcgtttcacaacacgaaatgactggaactgcatctcctcaaccgcaatctcacacaccgacattagcgagtccccaatcttatctggatcctgggcgatgtaagcttttatcagctggctcaaacataggcagaattacaacacaaatgtatccctcatcaaataatagagaatattttaatcactttcattcgcagcccacatcgcttttgggatatgccggctctatttctacaatgtctggagttataagtccaacagacctaacactttactcagctccaatggctgtatcacgttcaagtaccaggactagatggaacgaagaggagcataatgtaattccacagtctgcatctagtacaaacatggataacacccaagttatattaatggaagactcgactggtcgttatatagatgagtattctagtcgtgactatgtgtcatgatgtaaactaaataaggtaaaagtcattaaactcttcggcttgggcatgccaaaatattgattagagaatcagtaactaataagagtaccttaaacagatacataaaatccttttgcacatatatttaagtttgacaataatcgttgtatttaatcataattgaatggactctaggtatgcctgtataataagctcggtaaaaagaatatattaaagcccataaagaactattaaggcgtcggagatgtcaatattagaagt

SEQ ID NO: 4032 - protein, 613 aa, DROSOPHILA
MSLEEERHCKDELQNEKTEVKQKWASRLLGKLRKDITQESREDFVQSIIGKRKSICVLSNPDQKGKMRRIDCLRQADKVWRLDLVMVILFKAIPLESTDGERLEKNPECLHPGLCVNPYHINVSVRELDLYLANFINTHNSINNTNTTFSTTPGVRSPHITMYNRSNDPNRKDEVADMKNDVVKQNPYNGVVCNDIILATGVFSSQELWTLSKDQRITQLSQSPLPRTEGPNGDSHDANKIDQSSSPPITSTASDNGTSSFSLIVRATDSSIEDPKTSPISLHRYTSLSSRTLAQGIHNNTRPSQTTSVEEQNRVGSDKYSTEPQDISDFVTYVCQDTSHTTTITGSAENHSFQHSHTLPQGHGHSPHFQIHQQLRSAKLTTSPSTHYHSTMLPPMLPPMARPVAIIRSSSDLTLVQSPPTSLPLTAQSTSLNDNSCIAKHSLPTDNRLASNLDNRNSPNNTDVVSQHEMTGTASPQPQSHTPTLASPQSYLDPGRCKLLSAGSNIGRITTQMYPSSNNREYFNHFHSQPTSLLGYAGSISTMSGVISPTDLTLYSAPMAVSRSSTRTRWNEEEHNVIPQSASSTNMDNTQVILMEDSTGRYIDEYSSRDYVS

SEQ ID NO: 4033 - DNA, 4608 bp, DROSOPHILA
cgagagggccaacgttgcaatggctatcagggatagacccgaaagctacagagggagcatagggtcaattcagattagcatttggcaatgatatcgggtggtaatgtcaatgactccaatggagcttgaggtattttcaaaatattatcaaatgccgcggtgaagaaactagattttcccgtttatctgggcactggaatctctgttatttgatttggtgtttcacaataacgttcgctctcttagtgctaaataatgagttatttttaaaaggatatggataaaacaagtttttggcagttaaaaatcttgttttcttccataatcttccataaattgtaaatatggtacaaatcgcagcatatggtaaagtcgtaaagcatttctagatcaaacaaattgaatttggaatgtgttggggctaatcattaaagtgcggcaaatgtttctcatacatatctgacaagcaaattacgtttactggccaaacaaattttcgattccatgaaaacggaatgcgtacttgcttgtcgatttgcagaaaaatgtattcatttaaattcctgtgggaacacagatggctaatttacatttgtaatacattcttatagcacagaattaccaatttttattcatatgcatgtgaatatatgcatatgttaagaactcaccgcgttcagagtattaagagtgttaaggaaacacttaacgcaaccggaagtgcagcccatcctagtgctacgattaagctgtttttgtaaaattccaaactaattcctcttgaataattagtaatagagagtaatctttgttgtatgatcgaacctgccagatcggagttccgatagacaatgaatttcagatgcaaatatttgccggcagcacgtaaaatcccaaaatcacgatctgcgctcttcaatgttcttttgtttttcagatcttcgcagccgaatgatgccgaattcaatgagagagagatataactgcggggaactcgtttaggctatggaaagtatttattttctaatggcattttagctaatttggttaatttttattatcaataatcatgcaggggtatcctcggccatcagtcgttgatgggggtctcctcgtcctttatcttggttttggcatacttgcgagccttgcccaaatggtaagcggtgaacaagcccaaaaactgaaaaatacataaattgtaataatataatattgatatggaatcgaaatcgaatagacaagcgaactttgttaaaaaaatattttactgtcttaacgtccttactactttataactttataacatcaagcaaaagctcaacaactgtgtacataaatagtaacgatcgcacctttgacatatttagtttaaagaaaactttagtaacaaaaatggtttgaatgaaaaaacacacatcttatcttggcagggatttctatttaagcgtgacgaataaaaaagtagttaaaatgtgttcactgagtcagttgtgtgcgttaattcaaaagttattggataactcttccataagcgacgtgccgaaacatacccttgtgctcaagtacccttgtggcaagtgaattttaccctgcgtatggtttaatgtctcacctcgagggcaatgatcgccatgcagctgtagtagttgagctccgcctgcattctcagagtagctaccgccttggtggagcatccctcctcgtagacgtgcgccggcttggagcagtcgaaggcgtagcagcagctgctgggcagggcgccgtgctcctcctgaaggtagtcctgcggtccctcaatgccgcagcagccgaagaggctgtgcactggctgcatcttgtcgtcgctgtgggtctttcgctcgaagaggtcgcgcatgcgctcctcgaacctgcccatcagctgctcccgcatcgccgtgaaggtgaagaggtaggagcccagggcggctataaccaggccactgcaaattaggtactgaatgcaaagaggttagtctgtgacttgcagttgtgaacgcagtttactcacgtatatggaatacttgtacgacaccttcaaggccacgtacatgcccaggaaggcgactccgaaaactgctcctccgcaaagtgccgacccatagctgccgtagacggagacggccgaaccccaggtggtcacgccacaggagaagaagaacacgttgcacgtctgaacgaaagggaaacaaaatagttagttaagtccttagtactaaggaaaattatggactaaattacttcctaatctatttcttcttgaacgaacatctttctcgcagagttagaaactaaaactaaaagtgtggccccaataacttaataaattacttgccaaggttgtgcgtatgaacttcaggaactagctatatggaatgcattattatttaacacctaccgataaggcgtaatagttttagggtttattatttttaataggtgaaagttacttattaaatcgttgatcagccagcttcaaagtctaaatatacattttgtactgacctaataatattttaatgccgcgacaagcactttaaataataaattgcacgtgtagtgctggggtgccaaataaataaatacaagcacgattcattagcgtctacagcgtcattttttcaacttacatttggcagtcagacattaccagctatccatcaactagttttctaaactatggtaaaatgagcattaggcatttggcatttgtacttgctaagcaccaaaatgaaaatctatgagactatagcatgcaaatgcaagaacattttatgctttcatgcttaatcaatctctgacatttgtaaacagtgtcccatgtgcataattgtataagaataaattatataatataatagtgaatttaattggcgtaagccacccagaattgcgggccatttatagatattgcaaaaattacaaacagctggccggcggaattatgtaagtatgtgaacaggtattatgcatttataaatattttttgagattgcatcgatttgtttatagtctttagcggctcattgtcaccaatttttgctctcttgcgaaagatgtgaacttgggcgcaatattgatttttcgattttggctcattgctcgcatcaccgggtgttgtgcaagattcccatttgggtcaggctcgggaaaatgggaaagctctggaatggggaaatgcgcatctttttcacttaccacaatgagaatgcaggtgaccagtaggccgtacttccagggtgttatgggaaacgacttctccatgttgccacaatgtcgcacgtgagtttccttggcagttatgcttgtgaaccaaagtatctggctgccgatagaatggaagatatgacctccgagttccggaaactcgctcgattcgcactatgccactggcttagggcagggcattgtttacttgcgcccagagtaggtctacacccacattaaactgggctcggagctctgagccctatttcggattggaactcgtggtgttgatgccacaaaagctgccctgcgactgagcgaaaaaatgagagacccaagggcccctctcgaatctgaactttttggtctggcgcgttctgcgttcgctggcaaactgaaagcgggaaaagttttgtttttctctcttcccgtgaggactgttgttccccaatcaaaataaaccacacagagcgcactcgctctctcaaaagagagcgttgcacttgggtcagagctccaagtcatgtcgactggcgtttccacacggtggtgttttcgaattcttatcgggtctgtcatgagcgtacatatgtgaactgctgaatgattgaatggattcgagcttaagcaattaggaaaatattaatgtatccagaggtttttagcaccgatgaagctattaaacaacacaaccaaggtttaattcttttttctttcttttacgagagtgatgatgatggtgacagttttgtggaagattgcctagaatgctgtgaataccagcaacgattcaccgagttgctatgcattctagcgctcctttagcggctttgatctccagctccattttgatggtgtttatcaggtgcacattggtggctcgatcctttccttctcggtggcggatgtcagacttgccggtgccaatgtgcacattcaaggcgtcgtttctgattaaattcttggtgcacagataacaaggataggccacctcgccaatgacctcgatctggatgattgaattattggcctcactcagggacttttgcagcgtgtcaatctcctccagggccgccgtatgcgcctgaggctggcatactgagacatcacaaaggacttgacaatgtcactgtccagaatgtgtccagtgaagcctccgaaaggtgggcactagctcgaagttttgctccctgagaatcctctccgtttcatgggatcctgccagaaatgccgttgtgaagtaagtgataactattatttttataattttccatacccataagcctccaatccagtggaccatcaggatactatctattgaatatttgcccttaaatcccatttctctgaaaataaatcagccacttcttcttcgccttt

SEQ ID NO: 4034 - DNA, 1097 bp, DROSOPHILA
cagaacgcgccagaccaaaaagttcagattcgagaggggcccttgggtctctcattttttcgctcagtcgcagggcagcttttgtggcatcaacaccacgagttccaatccgaaatagggctcagagctccgagcccagtttaatgtgggtgtagacctactctgggcgcaagtaaacaatgccctgccctaagccagtggcatagtgcgaatcgagcgagtttccggaactcggaggtcatatcttccattctatcggcagccagatactttggttcacaagcataactgccaaggaaactcacgtgcgacattgtggcaacatggagaagtcgtttcccataacaccctggaagtacggcctactggtcacctgcattctcattgtgacgtgcaacgtgttcttcttctcctgtggcgtgaccacctggggttcggccgtctccgtctacggcagctatgggtcggcactttgcggaggagcagttttcggagtcgccttcctgggcatgtacgtggccttgaaggtgtcgtacaagtattccatatactacctaatttgcagtggcctggttatagccgccctgggctcctacctcttcaccttcacggcgatgcgggagcagctgatgggcaggttcgaggagcgcatgcgcgacctcttcgagcgaaagacccacagcgacgacaagatgcagccagtgcacagcctcttcggctgctgcggcattgagggaccgcaggactaccttcaggaggagcacggcgccctgcccagcagctgctgctacgccttcgactgctccaagccggcgcacgtctacgaggagggatgctccaccaaggcggtagctactctgagaatgcaggcggagctcaactactacagctgcatggcgatcattgccctcgagtttttgggcttgttcaccgcttaccatttgggcaaggctcgcaagtatgccaaaaccaagataaaggacgaggagacccccatcaacgactgatggccgaggatacccctgcatgattattgataataaaaattaaccaaattagctaaaatgccattagaaaataaatactttccatagcct

SEQ ID NO: 4035 - protein, 227 aa, DROSOPHILA
MEKSFPITPWKYGLLVTCILIVTCNVFFFSCGVTTWGSAVSVYGSYGSALCGGAVFGVAFLGMYVALKVSYKYSIYYLICSGLVIAALGSYLFTFTAMREQLMGRFEERMRDLFERKTHSDDKMQPVHSLFGCCGIEGPQDYLQEEHGALPSSCCYAFDCSKPAHVYEEGCSTKAVATLRMQAELNYYSCMAIIALEFLGLFTAYHLGKARKYAKTKIKDEETPIND

SEQ ID NO: 4036 - DNA, 8085 bp, DROSOPHILA
tgcctgaatcttctggtggcctcagggttcgggtatagcttgcgactgttagagaggagaccaacataagccctgaaattaataaatagaataaacgatcaatattgcaataatcatacatatttacctaccgataccaaagtagttgtgaaccttttcattggtacctaaatgttctccttggaagtcgaacaggatcaagtgtagaacaaagccagctaaaatataggtcgaagtcatcagaagccaccagtgcagataacacagatcctatacgcaaaagttcggcgggggtaagagtcttcttataaaaagaaatggagccttcgcaaaccttcaacttgattacgaccattagggctccgcaccagctttgcattgtccataatatgtagtaattttctattcccgaagtgaaatctgtgccaaatagtaaaaaaatgtatttccatagtgttaagcttataatattctgcatcaccttgtggtccatgaaccttaatatagtagaaatgtattactaagttgacggtcacaagaaagtttataaaaatggcaaagataaaaatcagaattttgaaaatgtgctcgagcaaacagcacatgactgcgattctgagctgaactgatctatgctggcactcagaaaacaggctaaagctatagaacattaaaaaaaaaaaaaaaatgagtaatggctctaattatcgaatttcattaaggaatcagcgtagttgcgtaagcaattatattacccgccattatcgcaataatatccttggcgagcgcacacaaatttgaagtggccgtggaagcccaaagggtatctagtaattctatttctagtaatatctagttcacatacgagtatattgcttaataagctaaagtcgctgccatgacaacttgaggacataacaaaccgcctgaaggcgagcaaattattactggcatcagttttcgttttcagcccctgaacaattgtataaacgcaacggtattggtatataaatacatagtaaatgctttattcataaatttcttatgcaattcgagctctcgattattgacgcttcttccaaatttaaatctttcccggagattctccttacaaatatgaatcgaatgaacaatgtacttacaaacatatataccagtatatacatatgtttattacaaatttatatttcttttcgcattgggactctcaacagtttatagattatatccttaattttgaacaaatatatcattattaacgtgtttattttgttaatgtgtggggattcggtttaacaagtaaaacgtttgtacaaaggctttggaaatatctttgtttgctcgttcgttcgataggtataacatgaattttaccagaaatacataggatatcaaaaatgtaagcatttcatatcgccttaaactaagcttcttcttgtttttccgtgacaaatatccacttaaatggcttatttcaaggtgttattgtgtatcccgttgtgtatgtgcgttcaacgactgtaaaagttaatgagaatgtgaggtgtgtgtgctactggatgtgggtgtgcctctagatgtagttgatggatacacctattgcttagtaggcgttccggcgcttgtagttacgcacgttgttggccaggcagcaggcaaagataaagccgatcagctaaaatggatatttcgttaataaagcggcttgagaaacttatatttagcgtataattttcacctctattccgatgaggccgatgcccacatatttagcgttatcagatccagtggtcattaattcgacgaactttccacggcatcccgggtagtagttagtcgggatcaggcacgaaccgctgcaacaacttgggggcaccaagtctcccttgccgatgtagtccagagcagagcttgatccgcagcagtgcaactaaagattgcgttgtgaagtcatatatatggaaagtgcttggttattaaagcacttaccgatttctgaatggtgtcgaagacacctcccttataagtatgttcagaattccatgcattctcgataacgtttcccattgcgttctcaaactcttccctgtgggtaaacagcagaacaacgaacgtcagctgcaggatcagcaggatcagcaagaaggtggcatagctcatggtcatgcagacggattcgcgaatggcaccgcagcatcccaggaatgaaatgaagaccacaatcgagcccaagctgataagaatgatcggcataagagcctgtatcgggaagcccacctgtccattaacttcaactacaccgatgctcttcagaatcagcacgccataaacaatgcccaagatgccgataacctgtaggcgaagaaagagaaacaaagggttagacatagttttaacttggcgataaaatgaactcaataagctaaagacaagacataacagatacatcataagatacgcactgcattttcacttctaacaaacagctctaaatatagttcaaattaatcagctcggtctcgtttagtttaattgaaagtgccggagtggaagaactttcgcaattaccatgctaaaaagacttaattaccacagaacccagtagctgacctcagggattcctggtcaggctcaggcacgccataagcggcgcatggttcatgataattaaaataagtaagcgcgttacgtaattccccactaaaatagtttgctaccaccataatattggtccaagagtatttgctgcccaaacaaggctaaggccgtccgattcgctcggataagataaggcagctcaagatgagaactgaaagccagccgagggacgcgcatcccgtgacattcacacatgacaatgccacggaaatctcgaccaagtctgcggtacaccgtagtttttgattttacggctgggctcagttcagctggtcagacaatgcaaatcaactttgatctttcggcaggaacgaatggccgacttgcagccccaattacgcggtcggtcatcaattgaatctgcttgatttcattatgtgtacatgatgctcgcggccactgtatctgtatttctgtattcatatctaagtggcgtgtgggctgcctggctatagctccacagattgaaaactagaatgaaacgttggcggcggtggcagctggatttaattccgtgtcaaaatcgaaccaaaagtattttcaaatgcgaacaaaggaaagcaaaaccccggcactctgctaattgttccacttttccagcaccaataaacaaaatgcgacatgaaaacaagagttttcgtttggaaacctgtttgcagccgccaacttttcctccccagcttttactcatttcagcccgatttcggctaacgcggacattacacaatccacataaatatggccgagacaatgctgttggccacatttcgcccaaaactgttggcgacagcttcaatgacgtcacactggaatgagaatacaatgcaaattgcttttgcaaataccagaaagcccttagcaagggtctgagatcatattgccgacaaaaaaaaagcacaaaattaaacagaaaaacaaccctcaagggaaacgaaaatagttgagagttttgcgtaccgcaataaaaagatagatatatatttattaatgtggggaaccacacccaacgatgtgaatggctcgattggcgccaaactgcctgcatccccgaatcgaacaagtaaacttgagtgtgcttaggtaggtggtggggggacatcagttttgagctacccgatgagcaacaggacaaatgcgtgatgggaatgctcaaatgcaagattaaagtgtacattttaattggcgtagtcatgcaatgaatatatgtcacgctgcatcgaacacagatgaaaagatatatacactatctcaaagctttttacatataaggggacgactttttgaattgttttaaagaaatctggatataaaaccttgtgcacctatgagcaaattcaagcaaagaactatcatagtatagtatagtagagtatactatagagtatacaagacacgtaccctagaatgtgaatcactttccccataccattccaatacagaaaattccttagaaaagccgaaactcaactattgacacgtcatcggacaaaattcgaggcgattttcgatattctgtttggctttggctaaacggatatacatataaatatttactccagaagttgtttgcactacaacttgtggcacaggaaacggctatcgataagctgaatgcaggtcattcaataccagtcggccttacactcatggccggcactgcacgcccttttacccgacagcagctgtgactgacttgttgcgctaattatggcaatacagtttcgtcatatgttctagcacactttttgccaagggactgggaaaaccccgctcacacagactgaggagtaactaacattaacatataacaaacacctaatttgaccgaaaatcctatactttacgagactttcaatgaaaataatgcaatttttatgggatagtggaaaccaatgtgtttatcattctgacagtaatcgagtggttttttttaaacatttttctgaaaaactgcgaactgttgttctgccattttgcttgtcgctgctgtttttcaagcgtggcggcagctttttcacttttagctgtggtggtgctcggcgagctctaaaagcggcttgttaatttatttggcttgtctgtcaagtgtgctatgtactcggctatatactcgatcgggccagataaatataaacacggctcgctgtaagtgtagactgttgtatactacaaacttcggctctgccaaccagttgattgctgttacctttgttttatcactcttctttctatagagcaacaagtttttattttcgtccccgctttggttctttctgctcatttatctacttatgtatgtacagagtaaagaggaagaagagtaatagaataccattgcgagatgataatacttcgtttataaatttttatgttgtgggatttttcagcatagttgataacattttgaccgcagctgtatcgttttatatttataattcgtttcgcttttcgctttgttgtttcaagttagtgactcacatacattggccgtgtttttgcaggcgccttagcgaatgcaaagtattcaaaaatttacgatgagtacaatatcatttgcttaattattattttaaacgcagtttgcaggcttttggcccggcaaggctatcacgtgtgtgttcgtgggagtgctcaaagcccatttgaaacccaaaactctactttaaaaatgcgctgagggcgaacatgcaatcgtgtttataagagtttaatattacacagaaatgttaaatgaaatcgtatcttttttctaaccagaaagtgtttacgtactcatttgtgaagcaaggggatgtggaattattttaaaataccataattataactcttcaataagttggaaattgatccataatgagcacataagttattttatgtatttaagagtatgtatatacatatgtacatatgtgtttttttatgttttatgtgcatatataaatatttgtatacatattcctgttttattaaactatatttaaactgataactaacttttttttggcatagctgaaaatccatatctaactaaggaattgcgagtctttttttaattaccggaaatcctttcagagacttagatacaaatttttgactgttagggatttattcatttttcttgcaaatcccagccatttgtgatttcgacttttcagaaccgggttgtttcggccccaaagcaaaccgtccagttgctggaatggaagctgaacggaaggcgtcggcgatgacatcaccagagttcaataacgagtctcagactgaatcagcgggcaaacaacagaaaagcacgagttctcgacttctcaatgcgccgcgtctctccaggggcatataactaaagtttcaatatatcgtggatatacatatacgcggatttatcactggataacacactgttgagtatgcacaatgcacacggtgtatgcgaatgaatttatcgactcttatttcgacagcactttcgtaacatagtgtcccattgtggctttcacgcaactcttttttaccggttttgtatcggtttcgatttcgtcggttataaaccagaaacgtaaacataatcaagacacacacatatgtatactcaccgacacaatggtgttgaatatgaagaggatgtatttgaccatagatgtgccgcagtccatcttgatgttgctttactgtaccgtctggaaggggaagcgaaaagagcgcaatcgaatgcgtcgtattaaaacgggtgtgcaaatgaatcaattggccggctaaatgtacattttcaagcgaaatcacgtaaataaacgaaatacacatgggtttgtcagggggaggggggggggggttggtatgacaagactaatagagagggctgctgcttgaggccagtggcgataaggctttcagaagcatcccattatcaccccgttctctttggcgcccttccgaatgcgttgcccgggcaacaacaaaggcaataacaaatgcagcgtgcccgctgcggcaacaacaacaacaaaaatgcggacaacagacaacgaaggccgcgtcaatgggactcgaagattcaagtggggaaaatgggaaaagttcactgcactttgtcaaggagaagaggaagcgcagcatacgcgccgcccgactcccttgcacaacacttttccacacgtactacgcagtcttttgttttcctgccttctccttctcctcgtccttttttgcactgcttcttcttcccaaccactttttgcggcgtgcagcatcatttgcttttgtgctctggcgagctgggagcgccaaacgaacaccactcgtttccgtttgcagttcgctggctaattccgagaatctcactagctttaattggtctagtttagagagcatcattaccttcgactttaaattatcaccaatttatattccaacgaaatacgcgtccgttcaagtcgaacagctttctgttagtcagtgtgaccgtggcggagcgctcttataacctccgattcgccaaaacaagccctaaatatgccagcaaaagtcagcacagcaagagaactttgataaggagcggaacttcggtaaccgcctttcaattgcacatttccactagattccattgagctaacaccttgttccaactgagccacattaagcacatcttgcagataatctctaaattcctttaaaatcgttatattattaagttttactacacattattgctaagtgatttagtatatcgatgttattcaactagtttctcatattatgtatggttcgtctttaacttgtttaatatgaaattaataattttttatcaatagacctcaaaacctactattcaatttgatacctaggtactttttgggaaatctctaccactgcagcaacgcttttcttatcgccgctaaattcagagctaaaatctaacagagcttttcgcgataggaaatgcgctcataaaaatattgttatatatcagactttttcagtatcaagcggaccacgaacgaaatcgcatcgaacgtcttactcttaaatcgaacacaagtgatacacaagtacatctcagcaatggattgcggcggcgtttttgtgaaatatgtgctgttcatattcaacatactgtttgtggtaagactctaggttctcaagagatatgtacatagatcagcaatagtgaaaaaacgggtggtatcttatctggcaaacaatgaaaaatgaactctcgaagctcaagatttcgtccaaagagccatggatactcctttcaaaagttatcttatcgaaaaatactgggaaaagtggttggaagtggttagaaacctgacattctttaaataaatcattgcatgccaatgccgaacgtaattacggctaatgagccgaaacagttgtcggaaaacacattgtactcggaaagataagggcatgagtaataccata

SEQ ID NO: 4037 - DNA, 1370 bp, DROSOPHILA
cttgaacggacgcgtatttcgttggaatataaattggtgataatttaaagtcgaagacggtacagtaaagcaacatcaagatggactgcggcacatctatggtcaaatacatcctcttcatattcaacaccattgtgtcggttatcggcatcttgggcattgtttatggcgtgctgattctgaagagcatcggtgtagttgaagttaatggacaggtgggcttcccgatacaggctcttatgccgatcattcttatcagcttgggctcgattgtggtcttcatttcattcctgggatgctgcggtgccattcgcgaatccgtctgcatgaccatgagctatgccaccttcttgctgatcctgctgatcctgcagctgacgttcgttgttctgctgtttacccacagggaagagtttgagaacgcaatgggaaacgttatcgagaatgcatggaattctgaacatacttataagggaggtgtcttcgacaccattcagaaatcgttgcactgctgcggatcaagctctgctctggactacatcggcaagggagacttggtgcccccaagttgttgcagcggttcgtgcctgatcccgactaactactacccgggatgccgtggaaagttcgtcgaattaatgaccactggatctgataacgctaaatatgtgggcatcggcctcatcggaatagagctgatcggctttatctttgcctgctgcctggccaacaacgtgcgtaactacaagcgccggaacgcctactaagcaataggtgtatccatcaactacatctagaggcacacccacatccagtagcacacacacctcacattctcattaacttttacagtcgttgaacgcacatacacaacgggatacacaataacaccttgaaataagccatttaagtggatatttgtcacggaaaaacaagaagaagcttagtttaaggcgatatgaaatgcttacatttttgatatcctatgtatttctggtaaaattcatgttatacctatcgaacgaacgagcaaacaaagatatttccaaagcctttgtacaaacgttttacttgttaaaccgaatccccacacattaacaaaataaacacgttaataatgatatatttgttcaaaattaaggatataatctataaactgttgagagtcccaatgcgaaaagaaatataaatttgtaataaacatatgtatatactggtatatatgtttgtaagtacattgttcattcgattcatatttgtaaggagaatctccgggaaagatttaaatttggaagaagcgtcaataatcgagagctcgaattgcataagaaatttatgaataaagcatttactatgtatttatataccaa

SEQ ID NO: 4038 - protein, 228 aa, DROSOPHILA
MDCGTSMVKYILFIFNTIVSVIGILGIVYGVLILKSIGVVEVNGQVGFPIQALMPIILISLGSIVVFISFLGCCGAIRESVCMTMSYATFLLILLILQLTFVVLLFTHREEFENAMGNVIENAWNSEHTYKGGVFDTIQKSLHCCGSSSALDYIGKGDLVPPSCCSGSCLIPTNYYPGCRGKFVELMTTGSDNAKYVGIGLIGIELIGFIFACCLANNVRNYKRRNAY

SEQ ID NO: 4039 - DNA, 9182 bp, DROSOPHILA
atggtagaaaacaaaacgcactcgcatatgcacataccatgtatacatacatatgtatgtacatatgtacatatatgtatgtatatgattcgtacgcgaagcaagtgaaattttaaccagcgacactcgaaactggcgaaatttcttaacactttcataagaagtcatgagcagcggccaagaaaataaattaaattaagcacaaaagccgctcagagcgagccgtgcctttgggcattaagatttaagcttgatttagttattttcctcacattttttgccccccatttccactgtcggttgccagctgagctcgctgcgcacttctgttagaatgcagtgggacctccctgtggaagtaggattgcttacattgatttctttcattcaaaagttattattgaacaactcgcaaaattcataggctgatttagaactaacatttcaaatcagacctttaatgaagaaagtttttactacgagaggttggattttgggcggttctactgtacttgctggcaattaacagatcatgatcactgttaatgggcatccttttaatcttaacatgggctcccgttttctcctctctctctctctctcttattctctctcgctcttccgccggctgacattgaactgtgtcagtggcagcgacaacaacagcgacaacgccttgtaatggggcggactgcgcagctccactcgctcagcctctcaccgcaccacagtgggcaaagtggcttttcagatggaatacgtttttattaggtagtaactcatatttttgaaaatggtgaatatcttagcgtcttaagcttaaatgtggaatttggaaaatggtaaacaactgtattaaccaaaactagattacctgtttgacccactgtactctcctctttctcttctgcgcatgcgcagcagctctgtcgacgccgacagaggctgctggctgcgtttctcgctgtttcgccgttcgctgttcattgtttgttgtcagtcgacgcgcgttcatctcatctcatccgcctcgtgcgctcgcgtctgttcgctgtgatgtggaattaaattattattattatttatttatttgtttttgtgcgtgtgtgtgcaatatagtgtttgttccagagtgtgggtgtgtgaaaaatgccgtaaaatgcagcaaacgcaatggaataaggacaggcaggaggatagaaacaacaatagcggcagcaggagcgagcaggatagcggctgtcatcggcgtcttttcctgtgcattgccaaggtgtgtgtcagtgtgtgcgtgtgtgtgcacacttccatctcattcttacatatgactttgatttttactttctaagctttgctttaattttctctcacctcaggatgctctctttttgcgtagttctctctctagcacaccgaaaaaaaactaatataaaataaagaaagaatacatttagtcagagaaccctatgatgttctattaggtttaaagatttgtttttttttttgtcaagcgaaatgcacatttaagttacttgattaattttctattttctgcaagccaatgtcttttcctcctgtgtaggcactctcttcttgcatcgttttttctttgcctgcgctatttatagatagtttttcttgcctttttggctccttctgttccttttcaacttgttgcgctctctcaagcttcaatatatgtgttcttctgctgttctttcttctctagttcattagcatcgaacaaagacttctgcgaagttggcttctttccacctgaaaattaccgggaaagcgagatgaacacacactcactcacttatctcagctgctgtatttgtcttaagagagaaagaatggattcatttcagttatacgaagtgactatcttatctgaactggtgttaaaaaaaatcgagaattaaattgcctaataccgcgaaacaagagagtcagatctacgaaattgagatattgctaatggtcttttttttcaccagccattaaattggaaaaatggtcaagtacaaccatttcctgtcaattgcctctaaaatacatattcggcttactcattcaaaaccctatggaatttgttgttattacaaaacacctacaccttgcgtttccgtatgttgcacttaaacattctaattactcatacgtttcttcccatgaaatatgcttacagatagtttcgaaattcaaagcagctgttgtttttagtagtatgaaatcatgttccattagcttttttagccgcgtaatcaaacagctggtttctttttatttcgcctcgcatttcttttgctattggccaaattccgtttggaactcggattcgaacccatatgtaacacatctcatcgcacaagaaacccaagaaacatgaggcaaacgggagactcgacatcaattcgcatgcaaatgaaatttcgccgcttcttcgttggatttctttctaaaagcatttgttcatatgcaaatgggcgtggcgaaagggggggggggctggctaagaaggggggctcttacgatagacaatgaagataaaccgtttgaaaagcatagttgttgttcttgaatgaagtcttggttttaatgaatcttgaaattggaacttatttgtaataaaatgtctctaataacataatatttaatttcaaacaaaatttgtatatttttatgcgactattacggtagtggttcgccttagagaggtcatactgtagcggcaaaatatgaactgagcggtcttttgtccagctccaagttgccactatccgctatggggtcagctcttctccgctgcgcttgtcatcccacaaaccccaacatatcacgccccgtaaaccaatttgcgactgcgcattaagcggaagcataataaatgcgctttagcagagcatttcgaatcaattgcgaaagtgtgaaaggaagtagcccctcctgcgaaaaaccccttcgttgtgcgtcgtttcctgctggaaactgtgcaatattctcagacaacaatctgtcagcaatatcctgcatcctgtgaaaggaaatcgtcgaaaggagccggaatgaagccgtaaataatggcgaaagcctcgtttgatgatcctgtgggagggtctggtgcattcacttaatgggggttaatatccgaacttgctgaatggctacagtaagggaaatggaaagccaaaacaaagcgaaaggggtaggtgtgataaagatggacttttgtttaaattctactgtaagcatcctttacagggctttgaattgtagcaatttaacattgcggatggttaaatagttaataatatacgaattctaaagctgtgtttcccctttctctcgtgaccgaccaactgttgtcaactcactgaccaagtgcaattcagcgttaaatatatacatattctgatttaatgctccatttgctaaggagcaattgttcacgaccagattagtcagcaatgaaatcataaatgatgagtgatctgtgcacggtaactactatgttgatcagacagatagatatggctgctgctcgatgttagttagtttctccaaccaatctgcatggtgtttggtctatgggtttcagtttttccccaagcgaatctaactaactatctggctgactgagagttttccgatcgctgatcgttggctgattttcagaacaagcagcaaccagtggctttcatgctcagagtccgttaacagaagagtcttctccagagatcggagacaccgatttagctatggccccaagcggttttacagtttccaggtagaaccgaactaaccgaacgatccgaacgaaacggattggaacagttttgccaggtctgtcgcttttactttgcatgcaaacagttaagaagactggtcgtagttgttggttcgttggttggttggttggttgttgctctattaactggctctggccaagagatttacgttgactgtaatcataaccataaccagaactcaaagtcgaactgtgcaccgaaaccggaagtgagtgaaccgccttccgtctttgcgagctgctttctagatttctttctttagcatcaggctaattgacaaacaatcttttgtttatgctgatgttttaaagcgatattttaagaagttatttctgcacccgtactttatccattcttaataacaataggttaaaaaaaaattgtaaaaattaagattaattattcatttcttcaacatggtaaaagctcctccagaacaaaacaacctaatgatcttctcacttgattgattaagatattttcatggaaatgatacatctgcagcatacacatcacgtatgtccaccctttgctgacccattccattgaacttagtcacaaattcggggcattcgggcgactctctccgataaacctttttgatttccagtccggccccgccccgctccgctgcgcccccgtaatccccgcgtgccaaaagtgaaagtagcgcccgcggggccattagcgggtatccaaaattagacacgacttggtgacctgttggcctaggccagctactaactgcaagaaaacaacaacaaacccacaaccgacggatgacacatcataaacaaataccgcatacccacttccactcagtatttgtgtttgttttcttttttcttttttgctttgctttgcaaagttaatagtccaattacggatcaaaggacttgaatttcgactcctgaatggatttatttagtcatttccctcgaaacgaatgaattgaatatcttatgtcataaccattaagcccctgttccagactccgttgcgataatgtattcgtagaaagaggcgagataaacaaacgtgatcgctgggaaagaggtgaggatcataaatacgatgacgcatagcatcgctcacctctcttttgggtccacatcatccgaatccgtttcaaaggaatccctggacccgcacagtgggaaaaataacatgctaatgacgaaattacttattactaattaagtaaaccattatctttagccaggaaaaccttttctaactgaaacatcatttcagtaactgctcgtaaaaaaagcttgcaaattcatttgcaaaaattaatgactattttccaatatttgtcgtgaacttgcattttttgttttcgtgttgcaaaaaatacaaattaattggtaacaattcgcgcgagaacgtgagctgctagagtaattcatgctaattgataggctgcgtttcattgaatgggaacttctgcgaactcttctcgcagataaaaagctcgagttctcacgaacacaatttgctagataacttatcgctagccgcagcactaatcaaacatcgatgttatcgccgatctggcccactgtgcaccggtcgaagggtgacatatggtggctccggttccgtctctgtctccgccggcgactcccgcatgactcaaattgttggtatgcctccgctggcgccgcccgcgtctccgcttccgagaaaacgctcaacgtgttctctgcccctgcagttcgttaaccgcagcagcgcagcggcggcgcacttagcgaaaaattctaggagtcttcataaaaataaaaaaaaatgttcctcctagctaattgtaagcatcatgctagcattccattttgaaccggaatgacttacttaaaaacttgttggtcttaacacaagacgtgcgtttctcccggtgtaaccgctatcagtcagtcgatgacgatgacgacgccgacagcgctgttttccgctctgcccggcgatcgaatccaagtggaatccgactgtttgcagttttcagtatccaagaaacttcggacgcgtcgtgttgccaaaagggaagtgcaaagtggccaatagttaagatcgattaggagagactccatatctatatttctgtgcccaaaggatatatcctatttttgttcaagtgtcttgatagtgcgaatgttcgaaaggtgatttgagttgagcactaacagacagaccatggtgcatctgtatcaacgacgtcgcaaccgcgaacaggtgggttatgatccgttccaaacggtaccattcagttccgttctacgttttgtaatgtatatatagatacatattgctcgtgctcgtgtctggcatatggattctctaattagttggtgcagaaaatcgctagcatagggaagacccagctatacttttttttgttttgcattaaatgaatcaattttcagtcgatgaaattcgcacctgtttaatggcaagcgaaaaagaaccggcgtaaaaaaaacattggaaatccaataacgagagagtcagataaagaaataaaacctcaattggttccccaataatgacgaattgctttaattgagcaattctcacaagcgaataatgttttaatttcgttgatccgatactttcgtggcgtgtatcgaattgcattaaccttgatgggaaacggggtcaaaagaacacacacacacccccccaccccccaaaataacgattgaaccattaagaaatgaatgaaacttgcacttttcaccaggagtacaaatgtatgtacattgcacacccaaagatataaaaacattgccatatacttgaggaaatttccagagacagaagattattcgactgaaagcggaaaagccagaaggtggcacatctgttgatatatcccatttacacacttaatctcgccccatttcgaggcagataaggtgggccacagtgcaatggcattgtacaatgtatacatagtgtacagtatatacatatgtacatacatatacaaatacatatatttgcattattggcaatgatgtgatcgtaggcgcgaggcattagcttaaaatgaaggatgatcaccgtgtttaattgcacatcatcacgaagtcgtgagaacacagagtttgcatcactccataaattgcacaaatttacgatccgcaggctctgaactagttccgctgatcataaagttggcggttttattgatctgcaagccgttggcaatcctatccaatgccaatgcccatgaatcaaatgggcaatggcaaagcggaaaccagttaaccactttatgtgcgtcagagggacagaactagttccgtaatttaaccaattgtcgtaaattcacttggttatgatggagctcccatcgaagtttaacccgttctcttactgcagatgcattcagtgaggctatcttttcagatctccaagatatttgcaaagatactgaatttatgcgataaacttgcactgtcatagtagtagttctttccataaattcgtaatgtaatggaaacgaattaaaaatctgcgtttttttttttaaatactcattatacaattaatatgaatgtttttgctttcaggctgtgaaacaattcattgatctctgcaacaatctaggtgctaactgcagcacgacgacagccacatccccgtcaacttcctcctcctcagccagcagcacgcagaacttaatagcagtagtgccgccacagttgcagcagctgcaggtgcaattaccggcgccaggtggaggaggaggagcaggtgcaggaggaggaggtggtggaggtgggggagctgcgcctgtgaggcgccacatctcgcatacgacagccgtgaagtttttgtacgcccgtaaatttgatataccacgagcagtctcactgtacgaacagcatgaacagatccgcctgaaggagtatctatataacatcgatccggatgtggagcccttgcgctccgagttgcagaccggcaagttcacaatcctggtgagtggttacatatttccgcatctactccaggaatgcgttgataatcatttccgtttctgatttcagcccgcacgcacttccagtggcgctgccatcgcccttttcaccgccaatcgacacagtccgctgagcgtttcgcacacaaccacgctgcagggcatcgtctatcagctggacagtgcgctccaggattcggagacgcagcgtgccgggctcgtttttatctacgacatgagcggctccaagtattccaacttcgactacgacctctcccagaagattctcacactgcttaaggtgagtttcgatcggccagcgtggcatacttttgggcagaaagctcgaaattgctggagggatcaagatactatatagaaagtgaatctttacgatacatagagcaatctcgattttaagtgaccatagttctttgtacctttaaggaatgtaaaattttgctcagggatctacttttagaagaatggtacctttatactagcaattggttggttccaaaaaataatattaataagttcatgtcaagactaatggctaatcagtagtatttgttgtttaagaactgagtcattagcgttatatgttggagaatccgaaacatttccaggtggcttgcctgtcatcacacggtgcctgccccctgcagttttaccccattgtgtcgcacttccggctcgtggcaagtcaaaagtcaacgcaacccaatcccagcttgccccacaaaggcacgaagcgtggcacacggtggtctctgaaattaaaatattaaacatgcctctattaatgcaaaagatatttcccatttggtgtgtgcgtttttttcgtgtgccatatgcgcatttatgttttttttttttggttttgccattttgtcgtatctgtgaatcagtatacgcgcatccaactatccgtggtttctgtgccaagtggcccgtggattctctatcaacggaatggcggaaaaatgtcttcaagctgaaaatttctgtctcgtttcgttggcttttcatgtcatgcgtcaaatgtatttcttgtttctttttttcatttttactttgtggttcacgttgattgaaaggaagtgggagggatccatgaagtcggtattgggcaagttcttaatttatctggctcttcattttgggctggtttctaaacagtctttgttttctagctgaaaacaagaggagcttacaacacaataatgattttataagtcagcttaatatcagctaaatagatggatgctattctttattagagtaatgtaaatatagagattgtgtaaaaataaaaccgtatgaccccacactataggaattttttctaattgctttgaaaattgtaaagtgtgggctct

SEQ ID NO: 4040 - DNA, 996 bp, DROSOPHILA
tcgacgcgcgttcatctcatctcatccgcctcgtgcgctcgcgtctgttcgctgtgatgtggaattaaattattattattatttatttatttgtttttgtgcgtgtgtgtgcaatatagtgtttgttccagagtgtgggtgtgtgaaaaatgccgtaaaatgcagcaaacgcaatggaataaggacaggcaggaggatagaaacaacaatagcggcagcaggagcgagcaggatagcggctgtcatcggcgtcttttcctgtgcattgccaaggctgtgaaacaattcattgatctctgcaacaatctaggtgctaactgcagcacgacgacagccacatccccgtcaacttcctcctcctcagccagcagcacgcagaacttaatagcagtagtgccgccacagttgcagcagctgcaggtgcaattaccggcgccaggtggaggaggaggagcaggtgcaggaggaggaggtggtggaggtgggggagctgcgcctgtgaggcgccacatctcgcatacgacagccgtgaagtttttgtacgcccgtaaatttgatataccacgagcagtctcactgtacgaacagcatgaacagatccgcctgaaggagtatctatataacatcgatccggatgtggagcccttgcgctccgagttgcagaccggcaagttcacaatcctgcccgcacgcacttccagtggcgctgccatcgcccttttcaccgccaatcgacacagtccgctgagcgtttcgcacacaaccacgctgcagggcatcgtctatcagctggacagtgcgctccaggattcggagacgcagcgtgccgggctcgtttttatctacgacatgagcggctccaagtattccaacttcgactacgacctctcccagaagattctcacactgcttaaggtgagtttcgatcggccagcgtggcatacttttgggcagaaagctcgaaattgctggagggatcaagatactatatagaaa

SEQ ID NO: 4041 - protein, 277 aa, DROSOPHILA
MQQTQWNKDRQEDRNNNSGSRSEQDSGCHRRLFLCIAKAVKQFIDLCNNLGANCSTTTATSPSTSSSSASSTQNLIAVVPPQLQQLQVQLPAPGGGGGAGAGGGGGGGGGAAPVRRHISHTTAVKFLYARKFDIPRAVSLYEQHEQIRLKEYLYNIDPDVEPLRSELQTGKFTILPARTSSGAAIALFTANRHSPLSVSHTTTLQGIVYQLDSALQDSETQRAGLVFIYDMSGSKYSNFDYDLSQKILTLLKVSFDRPAWHTFGQKARNCWRDQDTI

SEQ ID NO: 4042 - DNA, 2711 bp, DROSOPHILA
ctcctccatgcagcagaagcgacagagttcactttctgcaatgtcaatcttgtgcaaatggctgtgaagtcggcagtgccccgtaagaaggccagtcaaaatgcgcacggtgtttttcccgtgtgtcattaaggtcttgaaccttttatgattatattcacggaggataatcttagactgcctaacttctggcaggtgttcccagaagggcagacgtttttcttcctctagtgactttagtaagcccagtactctgtggtgaccaacaccacagaatggttcgggcccaattagaggtttctctgcccctttcctggctaggttgtccgctagctcatttcccgggatgttgttgtgtccaataaggacccaccttattgtgagtttgttgacagctcctagtttgtctagggctgtcctcacttcatttactagcttagatgttaacttagctttgctgagcgcctttatggctgcatgactatcagacagtatagcaatgtccttgccatgatagttcctttgcagattaaactccgcacagcgtccagtagcacagacttcagcttgaaaaatgctggtgtatctgcccattcattcgtggtattttaacctggggcctaaaacctccagcccacttccctagtcggtgagggatccgtctatataccacaatattgtttgtggtttcatagtgtgtactttccccagggatgtccaactgtttttattactgagatgagtgctggagttctgagcgaacctatgctcagctggcatctcatcccttggttgcatcagcaaagggatatccctctttaggcttttagcatccttacttgtgaggttgcagtcatttcctgctccctcaattcttattaggatggctttccgtttcatttcaatgccgatatgaagtcacctccattagtacttctagggctgcagtgggagaggtacgcattgctcctgtcatgcatacgcaggccattctttacagcttatgtagtttcaccttagtggtgctaaggcgtgctctatcactccaggctattgcccataggttattatcggtctgactaccatgaggtacagccatcttattatgcgtggtgaggttccccacgacttaccagcaattaccaatgcagaagcacgtgaaaagtgctctggtgcacttatcaattgtgttatcgacatgagttttgaagctaagtttggagtcaatggttatccccagatacttaacttttttactgtcctctatgcgacattctgacagggttatttccttcattctctgtagcttgtacctatttgtgaaaggaacaataaaagttttgctagggcttagggtcaggcctacttcattgcaccattcgccggtcatattgaggcccagttgaatgatatcgcagagtgtttcctcatatttacctctagctataatgacaatatcgtcagcatagccttggcaaagtatacccctgcgggtcagtctctccagcaactcgtctaccagcaagctccacaggagtggcgagaggacacccccttgggggcaaccccttgtggttgatcctgtggacgactgtcctcctatagtggttcgcctagatgccagtagtgatttgatccatctgctgtccatctgatctgagggatgcgttccctcatgggaggcattgtcgaaagcaccctgtatgtttaagaagacgcataacgccacttccttatgaatcagtgtatcctcaataaggctttcaggtgatatagggcagtatcagttgatctgcccgctctgtaggcatgctgcgtccgttggagcggttgctccacaagcagagtgattctaatgctgacgtccactagcttttccaacgttttctagccttggagctaaaaagttagccgcaaaagagttcacacacctaggaaatgtaaaatccagactgaatacaaaatttaaaaatatcggctcttagtgtttcctttctaaatatttaagtgctcggttaggttttaacgtgcttaattctcagttttacaagggctatttaaaccgtcgtaagttccagctcgcacaggatccgaaacagttttataatttcgttaccactaagcacaaaacaatttcttacccttcttcgatacttttgaaaataatacggaaacatcggatcaggcactagctgatctatttgccaagttctttaaaacaacgtattctacgttacctcattccaaacagctataatcttacgcgaatctactagttggtcccactcactgctttacgatcttcagcctgcctagtcaggtcccgacgaaatccatgactgtgggctcagattctctgcggaagccttgtgcaagcctctactgaaactgtttaccttatctctgtaatcttcacagttccctcatatatggaaggagtcctttgtgattcctcttcataaaaaaggtagcaaactgaatgcaaacatcaatcatatcaccatgtcagtacggttttatgaaacgcagatcaacaaccagtaacccctttaagctaatttcatatacactgactttagtaaagcatttgactttctcatctagcaaggaaactttcctagttgatcttctaaattggttattaagttatctggtatgcttggtcttataaaatgggggacaaaggaatttgataattcttacacgaccaa

SEQ ID NO: 4043 - DNA, 650 bp, DROSOPHILA
ttaaacatacagggtgctttcgacaatgcatggacagcagatggatcaaatcactactggcatctaggcgaaccactataggaggacagtcgtccacaggatcaaccacaaggggttgcccccaagggggtgtcctctcgccactcctgtggagcttgctggtagacgagttgctggagagactgacccgcaggggtatactttgccaaggctatgctgacgatattgtcattatagctagaggtaaatatgaggaaacactctgcgatatcattcaactgggcctcaatatgaccggcgaatggtgcaatgaagtaggcctgaccctaagccctagcaaaacttttattgttcctttcacaaataggtacaagctacagagaatgaaggaaataaccctgtcagaatgtcgcatagaggacagtaaaaaagttaagtatctggggataaccattgactccaaacttagcttcaaaactcatgtcgataacacaattgataagtgcaccagagcacttttcacgtgcttgaacctcaccacgcataataagatggctgtacctcatggtagtcagaccgataataacctatgggcaatagcctggagtgatagagcacgccttagcaccactaaggtgaaactacataag

SEQ ID NO: 4044 - protein, 207 aa, DROSOPHILA
MDSRWIKSLLASRRTTIGGQSSTGSTTRGCPQGGVLSPLLWSLLVDELLERLTRRGILCQGYADDIVIIARGKYEETLCDIIQLGLNMTGEWCNEVGLTLSPSKTFIVPFTNRYKLQRMKEITLSECRIEDSKKVKYLGITIDSKLSFKTHVDNTIDKCTRALFTCLNLTTHNKMAVPHGSQTDNNLWAIAWSDRARLSTTKVKLHK

SEQ ID NO: 4045 - DNA, 5539 bp, DROSOPHILA
ctccttcagcgggtttatcgactctttttttttttttttgtttacctccttgaaatgtggaggccgtgtgtctcgattgtgattattcaaattctaggaagtgtttagaccatttctgggttgcggtttttgggaaatcagtttaccacctatctcaacagttatgataaatacatgtttcattatatcctcgctaaactaaagttacatttcatgctttattcaaatcgtaatcaatataatcataataccattttaatctgtaacctattggccattaatattgtatatatttattcgagtttataaacacttaatctgacagaaaggctcataggcattcctctacaatacatatctatcgttgtccttgggaaacgcttatccaaatcgaccttgactttctatacagactgaaatgatcgtataattatctgtgtcaggtgtgctgctcgtgggaccaaagtccatgtgctttgggtaatttaattaaagcgaatctaaacttttttccattgatagtggcatgatgaactaactaactgtctgcaatcttgaccacagtgctgtgactactattttttgtctttgacatggatttatggacggcggattgcgttcacaaatccgtttggagaatccagttcgctcatatgaggtaaccaagtgggtattgggctggatcggattgggggattgggccagataagacacacgcggcgataagatgtgcaatgcaagccatttgattagcagacgctggtggggagacgaggagaggttaccccttatcgggggtttccaagaccagtagctaccaatatttatagactccaggggcgggcgttgcttggtcatcgctagaactgcccactcaagtgcccactccagtcgtttcgaaaacggaacggaaccgaactcaagcgaaaacaaaaaaaaaaagaaacactagcctataaaaggcatgcgatctttgcgatcgcccactcagtaacacgaaccaccctcaggtggccgcggcgcgcactccagatccctaatcccagatcactaatcactatacccaccgacaatccacgcaaaaggatttatgatggagcatttcggtgtcctggccgtcgtgctgctgatcgcgactgctgtcggtgcccaggatacttcgtccaactatctgctcaccggtcactcaactccgctggccagcagctttgcccaccagttctttaccttggcctcgcaaagcgctgagctcgccaataggacgaacacccaggtgattcaaacctacgaggatcgcaactacgacgatgagctctgcgatcgggatatcaacctaatcagggattcaatcaacaacttggaggagtgggcactggaatgtaagcatgtctggatgtagtgtagtaacgttttcttttttttttttacgtgtttagttagagagtgatccatccatatgcgaacgttagaagtgttcgttccaattaagattattccgaaacaatttttaattaagttgccagcaattttacaatcaattcatgcattataattcatgccccaatcccaatcttggctaaacattttcctggtggggcggctattcataaatccaatttagccttgatttcactattatgtgggccataaatttatatttcaaatcaatttctatcgattcaaattgctgcgataagatctggctaatgcctgcgaaaattcccacatgataagtttcattcgcatgggaacatttgttataatttattaacaagattaaggagattagaaacgagactgatccggccacttgatcttttggctctcacgtttctttttctatattattttattcaaaaaaaaaaaaaaaaagcccgtgaactttgattgctttgcttattgccccctggcatttcgcaattccattcataagtcgaatgcaatttacgacactcatatatcaaacgggaatatcaaaagtgaacgagggcagcgacaaacaataaagaccatatcattatcgagcccccttaatctggatgtttatctgtgctgcaaatccccagcataaagcctgcaggtgggggggactcgaaaatctttagcacttcaaaagttcttatctacgaagagtggtttcatttagaacgtacttcggcacttcttcaagttaatgcagtacttgaaaacttgaaagtggctactaaaaatttgatggactgttattagattgtcaatgctaacaatagaaatccactcaaaagctctgtatctttatgtttcctttatatttttacacttgcacatttccttgcagttcccgacacatggggtcgtttgcccatgggtctcttctggggacacaccatcagcatgggtcagtacgaggagtgcgtagcagctagctctacccacaccacagagattcgtggacagtattgcttggctagtttgaacataactacgttttatcaatcggttaagaaacgcggcgaagagttctcacgtattagctataagcaaacagatccggaagtctttgagcttggcatttgtgttccaaagacatgcagtgctgcaaagaccgaaaaattgctcaagtacgctatcacccacttttatggacaggatgtgatggaatcaaactacacaatggtgacggaagcgcgctgcaaatacgatgcacccatcgagctgcgcggcattgacatattcgcaatgtgagtacgagttttttttttattttttttttatagcaatcaattactaacgcaatgtttttcacagcattttcttctcgctgatcatcttcttcatggttgccagcagtgtctacgattatattcagacccgcaaaggaggtaagttgaggatacttcagccgccgaagaacataaatctaatgataaccttttgatatccttagcccccaaaaagccactgctgatcgcgttttctgtactgacaaatgcccccaaaattttcaccgttaagaaggtgaacaatcccaatgtgattcactgcctaaatggattgcgttgctttagtatgatgtgggtggtatttggccacggctatatgaccttctacgatctgccacacatcaacaaaaacaaattctacacctgggtgcagaccccctattcgatgttggtccagaacggctcgctttgcgtggacacgttcttcttcatgtccggtctgctgatgtgctggggtgccttccgtgaaatggagcgcaccaagggcaagctaaacatcccgatgatgtatttccatcgctacattcgacttacgccagtggtggccgtcgtcgttctgtacattatgtcactgtataagtactcgggcgccggacccatgtggttcaagctgggcacccaggataagaggtgtgccgacacctggtgggcaacgctgatctacgtccagaactatgccttcccctacagcattgtaagtgacttgttgcgtaggttgttggtccttcaagtcgagtttccagactaacaaattctaatatctcattctcttatccatagtgcatatctcaatcgtggtatttggccgtggacacccagctgtacttcctttcgccgctgttcctcattccgctgtggaaatggggaaagaaggccttggtgcccatcgtgatcgtactgatcttgtgcttgggtggaactttcgccacctttatgttgaatgactttacgcttttccgcgtgcaggacgatcaagtggatctgcgacagcggttgacctactatccaacgcacactcgaattcccacttggttgattggcgtgatctttggctacttcctgtttacccgtaaccgtggacgccagattccgatgtccaagccactggtgctgaccggttggttcgtggccttcggaacgatgttggcctgcatgtggggaccatactggcgcatcctgccggatactcccgactcgcccctgatcgaaggcgcattctttgagcccctgagcagaacgtcgtgggctctgtccattggttggatcgtttgggcctgctacaatggtcacggcggtctggtcaatgacttcttgtcctggggattcttcacgggcttcagccgactgtgttactgtatgtacgtcattcatcgcattgtccagctggtcaacgccgctcgtctgcagacagatacccacttctccaactacgatgcggtatgtaacgatatttatattgctacttgatgggctaaactaaatgcttgcactcccaatttagatcctccgctggtggcatgactttggcatcaccctcaccgcctcgatcttcgccaccttggccttcgaggcacccattttgggcatcgagaaggccatattcggcaagccggcgcccaagaagccatctcccggagagctggccaaggctgccccggtggcagccacttctgcttccgctgaaccggaaccggaagccaaacccgagtccgttgtggagaccaagacggaaatagcgcccgttcccaccaacgaagagaatccatccaaggcctagactctgcagccttagcacgatttttttttcaccatgcgaaccaattttttgtgtgtagttagtttaatttattaaacattttaaacaataaaacgattcatgtatttataccaactgttaaaagcgctgtagcgtaacatctctgttaagaaaagcgccaatgcggccgaaaagggaacattgccatgtgtaaccaaagctccacctagatagtaaatcgatgcatcgcttagcatcgataacgaccgagaacatcgaaaggtatcgaccccacaaaagtcatcgatgcccaatgcatcgatgtttattcacatcactagctctacggtaaaatggaggcagaacaacaagaattcgtaagttccgttctcaaagtaaaccaaacaaacatataaatattgtttatacgcgttactgtgccaccttgccgcccactggcacaacacgcatatttgccagtgcgtactggtgatcgtcatgggttaaacaaaacaggacttgcaacgggaaaaccttaataacagaaaggcttaacgaaacgtttaccgaaattttgcgtgcgtgtttcaacctgtattcgtatggcagtgtgcttgtgtgtttttctttatgcgagcttacctgtgtgtgtgtgctgttgggcaaactttttgtgtggcggtatttgtgcgtttgttccgcaattgcaatgtttgtgcactgcaagtgtgtgtttgtgcgtgtttatgtcggttaacacgtgccgccccagcccctctgctaatcgctccgtctcctttcctctcgcgcattccgttgcagctctcttatcactgcaacaacaacaagagcgcctgcttgtgcgtgttacgtgtgtgtgtgtgtgtgtatttgtatgtgggttcgcttcattagggaaagtgatttccggagtgcagttgttgttgttgttactgttgctcttgcaaaagggtcaaaaaccggtttagttgcaagcgaaataggaaaaacgctttccctt

SEQ ID NO: 4046 - DNA, 2319 bp, DROSOPHILA
ccaccctcaggtggccgcggcgcgcactccagatccctaatcccagatcactaatcactatacccaccgacaatccacgcaaaaggatttatgatggagcatttcggtgtcctggccgtcgtgctgctgatcgcgactgctgtcggtgcccaggatacttcgtccaactatctgctcaccggtcactcaactccgctggccagcagctttgcccaccagttctttaccttggcctcgcaaagcgctgagctcgccaataggacgaacacccaggtgattcaaacctacgaggatcgcaactacgacgatgagctctgcgatcgggatatcaacctaatcagggattcaatcaacaacttggaggagtgggcactggaatttcccgacacatggggtcgtttgcccatgggtctcttctggggacacaccatcagcatgggtcagtacgaggagtgcgtagcagctagctctacccacaccacagagattcgtggacagtattgcttggctagtttgaacataactacgttttatcaatcggttaagaaacgcggcgaagagttctcacgtattagctataagcaaacagatccggaagtctttgagcttggcatttgtgttccaaagacatgcagtgctgcaaagaccgaaaaattgctcaagtacgctatcacccacttttatggacaggatgtgatggaatcaaactacacaatggtgacggaagcgcgctgcaaatacgatgcacccatcgagctgcgcggcattgacatattcgcaatcattttcttctcgctgatcatcttcttcatggttgccagcagtgtctacgattatattcagacccgcaaaggagcccccaaaaagccactgctgatcgcgttttctgtactgacaaatgcccccaaaattttcaccgttaagaaggtgaacaatcccaatgtgattcactgcctaaatggattgcgttgctttagtatgatgtgggtggtatttggccacggctatatgaccttctacgatctgccacacatcaacaaaaacaaattctacacctgggtgcagaccccctattcgatgttggtccagaacggctcgctttgcgtggacacgttcttcttcatgtccggtctgctgatgtgctggggtgccttccgtgaaatggagcgcaccaagggcaagctaaacatcccgatgatgtatttccatcgctacattcgacttacgccagtggtggccgtcgtcgttctgtacattatgtcactgtataagtactcgggcgccggacccatgtggttcaagctgggcacccaggataagaggtgtgccgacacctggtgggcaacgctgatctacgtccagaactatgccttcccctacagcatttgcatatctcaatcgtggtatttggccgtggacacccagctgtacttcctttcgccgctgttcctcattccgctgtggaaatggggaaagaaggccttggtgcccatcgtgatcgtactgatcttgtgcttgggtggaactttcgccacctttatgttgaatgactttacgcttttccgcgtgcaggacgatcaagtggatctgcgacagcggttgacctactatccaacgcacactcgaattcccacttggttgattggcgtgatctttggctacttcctgtttacccgtaaccgtggacgccagattccgatgtccaagccactggtgctgaccggttggttcgtggccttcggaacgatgttggcctgcatgtggggaccatactggcgcatcctgccggatactcccgactcgcccctgatcgaaggcgcattctttgagcccctgagcagaacgtcgtgggctctgtccattggttggatcgtttgggcctgctacaatggtcacggcggtctggtcaatgacttcttgtcctggggattcttcacgggcttcagccgactgtgttactgtatgtacgtcattcatcgcattgtccagctggtcaacgccgctcgtctgcagacagatacccacttctccaactacgatgcgatcctccgctggtggcatgactttggcatcaccctcaccgcctcgatcttcgccaccttggccttcgaggcacccattttgggcatcgagaaggccatattcggcaagccggcgcccaagaagccatctcccggagagctggccaaggctgccccggtggcagccacttctgcttccgctgaaccggaaccggaagccaaacccgagtccgttgtggagaccaagacggaaatagcgcccgttcccaccaacgaagagaatccatccaaggcctag

SEQ ID NO: 4047 - protein, 742 aa, DROSOPHILA
MMEHFGVLAVVLLIATAVGAQDTSSNYLLTGHSTPLASSFAHQFFTLASQSAELANRTNTQVIQTYEDRNYDDELCDRDINLIRDSINNLEEWALEFPDTWGRLPMGLFWGHTISMGQYEECVAASSTHTTEIRGQYCLASLNITTFYQSVKKRGEEFSRISYKQTDPEVFELGICVPKTCSAAKTEKLLKYAITHFYGQDVMESNYTMVTEARCKYDAPIELRGIDIFAIIFFSLIIFFMVASSVYDYIQTRKGAPKKPLLIAFSVLTNAPKIFTVKKVNNPNVIHCLNGLRCFSMMWVVFGHGYMTFYDLPHINKNKFYTWVQTPYSMLVQNGSLCVDTFFFMSGLLMCWGAFREMERTKGKLNIPMMYFHRYIRLTPVVAVVVLYIMSLYKYSGAGPMWFKLGTQDKRCADTWWATLIYVQNYAFPYSICISQSWYLAVDTQLYFLSPLFLIPLWKWGKKALVPIVIVLILCLGGTFATFMLNDFTLFRVQDDQVDLRQRLTYYPTHTRIPTWLIGVIFGYFLFTRNRGRQIPMSKPLVLTGWFVAFGTMLACMWGPYWRILPDTPDSPLIEGAFFEPLSRTSWALSIGWIVWACYNGHGGLVNDFLSWGFFTGFSRLCYCMYVIHRIVQLVNAARLQTDTHFSNYDAILRWWHDFGITLTASIFATLAFEAPILGIEKAIFGKPAPKKPSPGELAKAAPVAATSASAEPEPEAKPESVVETKTEIAPVPTNEENPSKA

SEQ ID NO: 4048 - DNA, 2597 bp, DROSOPHILA
catctgctatctatgcgatgaacaggacgaaaggatccaccacaaaggcggatctaagtaaaaggcgaatttgagaaaataatactaataaacttgaagtatatcacgttctttccaaccgacaacccaatgttttctctcagtgcagtgttagtgtgcgactgctggtgtattcgtttgtgctggccactcaatgtggcatacttattggggcaagatggggccgagtcggcaggcctgacctgtatggcgctttgattggtatgcgcataaaatggaagctgccagctaaacgagtttctgcctaactgagggcggagtaaccctccacgcacttaaagccgacttcaggtaaaagatgccaatttcagtggactgccgagcacttcaaatttaaatatcgcgcatacgccgcgttgagcggccgcctcatccatttgcatgtgcgacaagacacatgagccaaagaggcgggttggtatgtgcatgtggcatgcaaatgtttgctggtctccaccgaccgtccgtccattcgtccgtccgagtgtcgcgctaacgactttggcaccgcgctgctcctcccgtcggctttgtgcgcctgattgcaattgttgtaagtctaacaagctgcgacggctaggttcagaaattcagaggttcagaggctcagaggctcagaggctcagaggtcgagggactgaagaggaggggctctgcgctatttggcacttgaaaagaatttgcattgcttgatttgacaaagccaagtgggacggagactggagaggctttcaaagtgcaaacttaagcttaattgcaaaagaaagcaacagccagcgagcgagtttccagtactccatccccgggctccaatctagcagccactgtcagtgaatcgcctgccaagtagggctgctggctctgtggaatttggaagatgtcgctagcaagccaggctgttgacacaatccagtccccacatcgctggcttcccaccctccgattccctagcccgcatcctggcctgtaatctagacacccattaaatctgatacgctactcagcccgggctgcatatataaatatgaggaacgcacaattaggcagcgcaaattggaagcagatcctttggaactcgacttacacagcacggatagctccacctccgccttgagtggattctgggacatcacattgcttgcctcgcagcggaatcgcgccttgttatcgcccgcctcagcggtgaaggtatagatgttctcggacaatcggccagaggttctggaagagattagttgtgtcatatgattatatcaatttctaggtccgccctgtaccctgtactatatacgtatatatgtatgttatgttgcaataattagataatttgtagctcacctataggccatgcgtatctgggatccgttcttgtaccagatgagctgggcaggcggattgccgcctcgactccggcacatgagctccaccgtctggccgcggcgcagagtttcgcccgctgagtatccctcgatgtagggcggtcctgggggatctgtgggattagaagggagtacggtttgagaacaacactaaatgccggcagtttgctgtgtttacagttcgcatatttaattgcaactgctgtccgcaaataaattcaatttacactaaagtaaagtgcggcgagcgcatatgtgtataaatacatgtgaaattcgtggcgtttttaattgaagtgtttgcatgcaaatcgtttatgcggtcatatgtattatttcccgattttgccttttttggcctacgattcggggcgttggtaatttcacttgttgtgggcgtcgcactgggggcgattaataatagtgtaaaataccgcaaagcagtggaaaaagcagcgacagtacgtgttgaatacatttcggatattatcggcagatggaatgcaactagaatcgccattccactggaaaactttcgaaaagcatcagctcttaaccggctgtaatatattttccttatcacaatttgacaagcggtcaaccgtattgaatcaacagcagcaatcaggtggggcacaaaagctgccaggcacacacactctgccccgaaggcatgcaccgaaaaattaaattaaaatcacttgaaatatggtacgcgcgtggaggagatggggctgtggggaagcaataatagcgccataattaagaccccgcagtagggaaatgaaaggggatacattccgttcgagcacccccttcattcccggcctgaattcgcagatagcacggctcaatttttcgccattttcaatttttttttcgcttttttgtgccaattacatcgcgacgagctcgggaaatggccaacgaactgcggcagttgggatcgccatttgccagctgcctatgcataaataacaaacataattaattcgaatgtgcgtgtgcaggtggagccatcgtcatcgtggcatccatagctacggcctccggctattgcaggtgcctggagccaaacaccggcaccctcagtgtgccaccagttccagcagtgctaccacggccaccactgccaccactgccaacggcaacaatcaa

SEQ ID NO: 4049 - DNA, 597 bp, DROSOPHILA
gcatttagtgttgttctcaaaccgtactcccttctaatcccacagatcccccaggaccgccctacatcgagggatactcagcgggcgaaactctgcgccgcggccagacggtggagctcatgtgccggagtcgaggcggcaatccgcctgcccagctcatctggtacaagaacggatcccagatacgcatggcctataggtgagctacaaattatctaattattgcaacataacatacatatatacgtatatagtacagggtacagggcggacctagaaattgatataatcatatgacacaactaatctcttccagaacctctggccgattgtccgagaacatctataccttcaccgctgaggcgggcgataacaaggcgcgattccgctgcgaggcaagcaatgtgatgtcccagaatccactcaaggcggaggtggagctatccgtgctgtgtaagtcgagttccaaaggatctgcttccaatttgcgctgcctaattgtgcgttcctcatatttatatatgcagcccgggctgagtagcgtatcagatttaatgggtgtctagattacaggccaggatgcgggctagggaatcg

SEQ ID NO: 4050 - protein, 90 aa, DROSOPHILA
MTQLISSRTSGRLSENIYTFTAEAGDNKARFRCEASNVMSQNPLKAEVELSVLCKSSSKGSASNLRCLIVRSSYLYMQPGLSSVSDLMGV

SEQ ID NO: 4051 - DNA, 3887 bp, DROSOPHILA
ctaggacccaccgctgtgtccttcgtgagagctgccaagagcggccgaacaataaaaattaaaattatttaatttgccgcgcataaagtaaaaatatccgcagggcgtccgcatcctcaaggcatgaccatgcacataccatcgtatcgtccttcgtccttgattgggcgctgggcgggggattgggagtgggcgtgggcgtggacgctcaggaggaccgctcattaccttaggggtccgttagtcattttcagtgctcatggtatgggtaataaatgtaaatctcttgccgccccccccccccccgctgctttttccctgtgatgttggtcagaaaaattaattagcgctgcaggagagcgcttacaaaggacatccaccgcagggtcagagaagcggtggggcgaaggcggagccatgaggtctctggatggataaaccgaaactagaatcgcaattattaataagccccggcatcggcttaactactgccccaaaccgaaccaacgccattcaacctgttatcgagtgactttgcctgtcagtcctttcatcttccccagaaatccgcaatcccagcatcccggtgtcctccttcgccgacatctattttttcctgcgtgttttttgtcactgccttcgcttataattgagtcaaatgaagagtgacatcgaacatcggataatggagtttgagacacttgcagttgtcgcgtggcggagaagtgtcactctgcggcagcaaaagggggtggtgtcaaagtccgggatgcgtacatccagttggactttcacgggggtcaccagagatgtgtgtgggcataggaaagttggcataaacatggattactttccatgcgtacagaataaaatcacctttaaaggcgatatcgaacagagattgttgtatgctttgaaatcatatttcaaaatgcaggtaaatgtagatttaccaatactcttgaaatatttccaacccacaatcaattaaattcatcactttaatactgactacatgccccatctatgtgaagggattgattttaaaaagtactgactacgatttacatggctcaaaaatattccctgcacacatgaacaatttataggaaccacctgcgggctacagcaatccgcagctggtaaaaagcagaccccggctgagctttccgttcttagtgccgtaactctgaatgcactcgcatatcttgctgcccttcacaatccgtccgaatcccacgcgggatccattgaccacggtaagcggcttgaacgagatggcgaaggacaggtggtgggtgaatcccgtgacgtaagctttgctgaaggataatacgtagctggaggccccgtggtcaataactttggcgtcgtactccaatggctggtggagtagcgagtccgacgacagcatcaaatcggtttccagccagagattggggaacagtcgtttgaccataaacttcgagtgctgattgcacatgcaggacttgatcagctgcagcaccaccagcggagcagcctctgtgtacagctggaccacaaacctgcccagtggtcgggcatctttgagatagaggtcaaagtagatacgcggtcgaaagaggcggcgtagttcggcatccgacttgggtagcgggatgttgaaggcctcgtacttggccattgcttggggcggcaactccagtggagcgacgggcgtcgagctcctgccctcccgcatccgcttgtccgacagaccggagtccacttcgctgtttacctccagaatgcgtcgaccgaagtcgcgattatcgcgctccagtttctccagggtgagcagggccatgggaatactggagacggcgtgcaccgtatcgtatcgaaacggattgatggctccgtgggtgcgcatcgtccgcgaaatctccaccagcagctggatgttggccttggtgcgcttcataaatgtttgcgcctcgtctcggaggttgttcactccggtgatgcgggccgcctgaaagttgggcgcttcggcgtccaccgtgctgatcgcccccttgatccgctcacggtgctggtgccacatcttcatgtgattcaccataagcaggccgcccaggatcttcttcggcttggccttggccgccttcttgcgctcctttaccttcagctgggcggtcaggcgctcctgctccgtgagctgagccaactctcgctgcgacggggtcacacacatcggaaaatcagccatttaaattgggcgaaaagacctttatcaataaataaaactagcagctaaatcgagaattttccacttggaattgttaaccgaaacgttattcaactaaaactgaaggaaaaacgaaatgtggggttgatatgggaatctggaattttctattactgcttctactcggaataattttccctgcttggcgaatttgaggcatattttcagctgtaagttcactgaatcgggcatacttacaaagcacattgatcgtgtgggtggacacgacgttctcggtcagctgcatgttcagtccgtgacagatgacgaccagggagcgcttgttgggctccacgacggcggtgatgttcgaggtggtcgtccaaccgcctgcgatgacaggcagagatggaaatggattaggcaggggattatgtcataccggcaacagcacttaccctcgggactgacaatcgtctttgaggtggcattgcgcacctgccgcccgcccaccatccatttgatctcggcgggcggattcgatggcgcggtggtgcatgtcagcggcacaatatcgccgacgcgcgcctcggtgggtcccattacggtgacgtgggtgggtgcaactgggaaggcagaaggtttcgggttgatttcagttaccgggagtagcataatgaaggaggcattaatatgtaataggtttgcggcgaggctcacttgcggcatgctcggagcaggcacacacgagtatctcctgtcctccagatagcaaagaaccccctggtttcccgtttcccgctttcctaatagccttggggaggaatgtcggctcatgatgccgcctccatgcaaatgatgactgagtgactgacagcccgtccggctgcggagctattacctaatgccgtcgaagcagagagaaacagaagcagaagctggagcagctgcagctgccactgccgctgccttgatggataagtgcatacattacgcatacgcagcgttgtctttggcttcatatagggccgggacttgggcatgggaatggtgcgcggggaatacgaaactttcgactcgatatgtttcgcatataaataaacattatgaattcttaacttctcgcatctttcgtcggtccgtcttaaccatacatcttcattccgggcacacaccctagcacacacactcgtgaggggcaaaagaatgctgatgctgaatgtattcctgctacgtcttcagttttgttgttccacattcgttatacataaataatgcgtgtgctaagagctcgggccgccagctgaggccacatctgctatctatgcgatgaacaggacgaaaggatccaccacaaaggcggatctaagtaaaaggcgaatttgagaaaataatactaataaacttgaagtatatcacgttctttccaaccgacaacccaatgttttctctcagtgcagtgttagtgtgcgactgctggtgtattcgtttgtgctggccactcaatgtggcatacttattggggcaagatggggccgagtcggcaggcctgacctgtatggcgctttgattggtatgcgcataaaatggaagctgccagctaaacgagtttctgcctaactgagggcggagtaaccctccacgcacttaaagccgacttcaggtaaaagatgcc

SEQ ID NO: 4052 - DNA, 1539 bp, DROSOPHILA
atgctactcccggtaactgaaatcaacccgaaaccttctgccttcccagttgcacccacccacgtcaccgtaatgggacccaccgaggcgcgcgtcggcgatattgtgccgctgacatgcaccaccgcgccatcgaatccgcccgccgagatcaaatggatggtgggcgggcggcaggtgcgcaatgccacctcaaagacgattgtcagtcccgagggcggttggacgaccacctcgaacatcaccgccgtcgtggagcccaacaagcgctccctggtcgtcatctgtcacggactgaacatgcagctgaccgagaacgtcgtgtccacccacacgatcaatcgagagttggctcagctcacggagcaggagcgcctgaccgcccagctgaaggtaaaggagcgcaagaaggcggccaaggccaagccgaagaagatcctgggcggcctgcttatggtgaatcacatgaagatgtggcaccagcaccgtgagcggatcaagggggcgatcagcacggtggacgccgaagcgcccaactttcaggcggcccgcatcaccggagtgaacaacctccgagacgaggcgcaaacatttatgaagcgcaccaaggccaacatccagctgctggtggagatttcgcggacgatgcgcacccacggagccatcaatccgtttcgatacgatacggtgcacgccgtctccagtattcccatggccctgctcaccctggagaaactggagcgcgataatcgcgacttcggtcgacgcattctggaggtaaacagcgaagtggactccggtctgtcggacaagcggatgcgggagggcaggagctcgacgcccgtcgctccactggagttgccgccccaagcaatggccaagtacgaggccttcaacatcccgctacccaagtcggatgccgaactacgccgcctctttcgaccgcgtatctactttgacctctatctcaaagatgcccgaccactgggcaggtttgtggtccagctgtacacagaggctgctccgctggtggtgctgcagctgatcaagtcctgcatgtgcaatcagcactcgaagtttatggtcaaacgactgttccccaatctctggctggaaaccgatttgatgctgtcgtcggactcgctactccaccagccattggagtacgacgccaaagttattgaccacggggcctccagctacgtattatccttcagcaaagcttacgtcacgggattcacccaccacctgtccttcgccatctcgttcaagccgcttaccgtggtcaatggatcccgcgtgggattcggacggattgtgaagggcagcaagatatgcgagtgcattcagagttacggcactaagaacggaaagctcagccggggtctgctttttaccagctgcggattgctgtagcccgcaggtggttcctataaattgttcatgtgtgcagggaatatttttgagccatgtaaatcgtagtcagtactttttaaaatcaatcccttcacatagatggggcatgtagtcagtattaaa

SEQ ID NO: 4053 - protein, 471 aa, DROSOPHILA
MLLPVTEINPKPSAFPVAPTHVTVMGPTEARVGDIVPLTCTTAPSNPPAEIKWMVGGRQVRNATSKTIVSPEGGWTTTSNITAVVEPNKRSLVVICHGLNMQLTENVVSTHTINRELAQLTEQERLTAQLKVKERKKAAKAKPKKILGGLLMVNHMKMWHQHRERIKGAISTVDAEAPNFQAARITGVNNLRDEAQTFMKRTKANIQLLVEISRTMRTHGAINPFRYDTVHAVSSIPMALLTLEKLERDNRDFGRRILEVNSEVDSGLSDKRMREGRSSTPVAPLELPPQAMAKYEAFNIPLPKSDAELRRLFRPRIYFDLYLKDARPLGRFVVQLYTEAAPLVVLQLIKSCMCNQHSKFMVKRLFPNLWLETDLMLSSDSLLHQPLEYDAKVIDHGASSYVLSFSKAYVTGFTHHLSFAISFKPLTVVNGSRVGFGRIVKGSKICECIQSYGTKNGKLSRGLLFTSCGLL

SEQ ID NO: 4054 - DNA, 3486 bp, DROSOPHILA
gcttcagaagcggctcctccttgcctgcaagcagcttgtcggctgagtatatgttgatctgccccgcctcgcagccgcccacaatcaggccactggggtgtggtcccactggggaccagatgagtttttggaacctgcgggaggaaaagccggttatgtgaacgacttgatgcacaaattgaaagccataactcacttgtactggctggaaacgctggccctcagctccagatcgtatgtggcatcgctgaagttcggtgagtacaactccagagtggaattggcattggaatcgaattgttgggcggcggtgccggcggccaagagaatctgctgctgctgcgccggcgaccaggcgatgttcaccgtcttttgcagttccttgatcttcatcttgcaatgtcccttcgtgctgctcgtgtaaataaagcgaaaaaacacaaatattatgggaggtacaagttcagaacgaaattgtgtcacgtccaattggagtaagccccgtcatcacttttcccattggcttccccattgcagatgtggcccagtagtgcccgccggcctttaagtatctttaattatgctaattgcgcaacttacacacaattgtgaatgcaatttgtactcgcttgcgctgcaacgagactttttgatcttgaatttaactggaatcgttaatatttttaagaaccgtaggaacggccagtgtgaccgtgctctgagccaacgtaatataccacagggcacgcactgaaataccaaatgcgtgcgaccagaatatactgcgagtttaacggtatgcaatttaaatattccgtttcaatgtgcaattttaaaaatagtttttatcagtatacattattaaaaatgatagtcgaaattatttaaagatttattttccatcgcattttatattcgtaaactagcttcagcacttttaatattaatatttattatgaactcattttaaattccagatcactttgcatttattttttgactggaactggactcgaatgtagatctctttattataggtatctttcataaatataagctatgtttatttaatacgcatggtatgcatccactcatttggcagacgatatggccgccacacgctgctccaccttggccaccttgctgttgatagtctccagattctgggcgaaagtctcctgtacggaatgcagcagctccttgttgttcaccaagctagtggtgatggttccctgcttctgctcaatctctgcgatgatcttggcgaaattgtttgctgcagagcaagttgattagttacagaaacaagcacaatgctaaaatgctaaatagaattgcttaccatatttatggagggcctcgagggcttgcatgcgttcgatgacgtgcggcagtatttccaccactggctccgtgcgcttcgcgatgtcgtatagttccgtaatcttctgatctcgtttggcgtcctgggcactgccgctggacttttcggcgatagcatccatcttgccggccagcgaggtcaggcgctgctcgatggtgtccagtttatcaggctgtatcagggccgccttggtgcttagatgacgcactgcctctagtacattggtggtgttggtggcggcggtaaggcggctcaacttgtccggctgagcgcccagcaccttctccagctgcgagattcgctgctctagactggctacgcgggccgtggccgccagatcggtgccaggcgtgggtatggctgtgagaacgccggactgcttgaactcctccacctggctaatgagtgctttcacctgcttacttccaggcgtctgctccttgcccagcacttgctccagcttcagcgactccagcacctttcgggccgtgctgataaccgtggccaccgcatcgtacgactgcttctcctcgtcggctaccttgcggtccacctgcaaggcggccacctcgttcagaagctcgttcatctcgatctgcaggcgctggcacttctgcaccggcgtctccttctcgccctggccaaccagctcgtagtcgctggagccgcgcgtatcgtaaccccggcacatgcgtcgtccaatgcgatccgtgaagtccacactcccctcgaccgttgctccgctgaagcgcttgtgagcgacgctcggcgagatgtgcagtcgctcgatggcttcgttctccggctcctcttcgtagtagtcggatgtatcgagctccgggtcatctggagtttcgtacacgtccggctggtcataagcctaaaaacataaagtacatatatgtataaatgggcaaaaacgaaagcttaaacgtcactgccatggtgcggagttccgacttactattcccggtaggttctggaacttgggatcggccattattgtgggcacgtcgacggcggtgtttggaatcctttggcaacgaaataattataaaccttcaaaaatccttttttacaacaatcaattcgatctgatgtcataaaaaaagttaccgtgcgcggttaccaaacaaatgccaaagtgcagttgtcattggagtatttataaacagaggtatctaaaaagtcatttaaaaaagacagttattacttgtaacggctaataagctaagagtaaatagtattgcaaaatatatcatcgatataaataaattgtacttgcacattgtactttgttaactggattcatagatgcaaacatttataaaaataaattaaagctttttgtgctaatttaaacctattttgattttaggaaaaacgatatacatttaaaatcattcataagcaataggtaaataattccatgatcgacttccaattggtaaatcaatgaaggtacacttttcttctggtattttatagaccagtgaggatagaaaaaaggcacggtcctactgtacctagcacaggtactaagttagtcaacactgtagttttcgtgtagtttgcgggcgaagcgagtgggcggtgggagctgctagttggttgtactaatcttaatattttgcatccgaaaacaatagagtaatgtctggcttagagtacgggttgcatagatacgatgatctgccgctggaggtgagcatataatgtgaacggactgccgcggtcccgtgaccaatccatcatttcgagcgtatctatatctgcatattcatatacctgttagggcagtcagctgattttgtttttttctgttccgcccccagattgttttgaagattttcagctatctcggctactcggacttacaagcggcaggatccacctgccagcgatggcatgcggcgctggatcaggcggaatttaaccagcgcacgcgagtctgcttctccaaggtggtgctatcggatcaattgagtcctggagtggatctgatgcgctgcgagcggcgtttccagcacttcctgttcgaggacgtgacactgggacaagtaaaggaattgatgcgcttcatgggcaggaccgctcagtcc

SEQ ID NO: 4055 - DNA, 1336 bp, DROSOPHILA
gacatcagatcgaattgattgttgtaaaaaaggatttttgaaggtttataattatttcgttgccaaaggattccaaacaccgccgtcgacgtgcccacaataatggccgatcccaagttccagaacctaccgggaatagcttatgaccagccggacgtgtacgaaactccagatgacccggagctcgatacatccgactactacgaagaggagccggagaacgaagccatcgagcgactgcacatctcgccgagcgtcgctcacaagcgcttcagcggagcaacggtcgaggggagtgtggacttcacggatcgcattggacgacgcatgtgccggggttacgatacgcgcggctccagcgactacgagctggttggccagggcgagaaggagacgccggtgcagaagtgccagcgcctgcagatcgagatgaacgagcttctgaacgaggtggccgccttgcaggtggaccgcaaggtagccgacgaggagaagcagtcgtacgatgcggtggccacggttatcagcacggcccgaaaggtgctggagtcgctgaagctggagcaagtgctgggcaaggagcagacgcctggaagtaagcaggtgaaagcactcattagccaggtggaggagttcaagcagtccggcgttctcacagccatacccacgcctggcaccgatctggcggccacggcccgcgtagccagtctagagcagcgaatctcgcagctggagaaggtgctgggcgctcagccggacaagttgagccgccttaccgccgccaccaacaccaccaatgtactagaggcagtgcgtcatctaagcaccaaggcggccctgatacagcctgataaactggacaccatcgagcagcgcctgacctcgctggccggcaagatggatgctatcgccgaaaagtccagcggcagtgcccaggacgccaaacgagatcagaagattacggaactatacgacatcgcgaagcgcacggagccagtggtggaaatactgccgcacgtcatcgaacgcatgcaagccctcgaggccctccataaatatgcaaacaatttcgccaagatcatcgcagagattgagcagaagcagggaaccatcaccactagcttggtgaacaacaaggagctgctgcattccgtacaggagactttcgcccagaatctggagactatcaacagcaaggtggccaaggtggagcagcgtgtggcggccatatcgtctgccaaatgagtggatgcataccatgcgtattaaataaacatagcttatatttatgaaagatacctataataaagagatctacattcgagtccagttccag

SEQ ID NO: 4056 - protein, 380 aa, DROSOPHILA
MADPKFQNLPGIAYDQPDVYETPDDPELDTSDYYEEEPENEAIERLHISPSVAHKRFSGATVEGSVDFTDRIGRRMCRGYDTRGSSDYELVGQGEKETPVQKCQRLQIEMNELLNEVAALQVDRKVADEEKQSYDAVATVISTARKVLESLKLEQVLGKEQTPGSKQVKALISQVEEFKQSGVLTAIPTPGTDLAATARVASLEQRISQLEKVLGAQPDKLSRLTAATNTTNVLEAVRHLSTKAALIQPDKLDTIEQRLTSLAGKMDAIAEKSSGSAQDAKRDQKITELYDIAKRTEPVVEILPHVIERMQALEALHKYANNFAKIIAEIEQKQGTITTSLVNNKELLHSVQETFAQNLETINSKVAKVEQRVAAISSAK

SEQ ID NO: 4057 - DNA, 5379 bp, DROSOPHILA
ctcaactctaagttcgacctgcgtcgcctgagccgatccgtaaacgccactgtcctgccgcgcatcaccacgcccagtcaggaggagttgggctactgcgacaaagtttgcatcgaggaactgggagacaccacaattgtggccttcaggtgggattttcaatggaattagcgagagaaaataccattataatttcttattgaatcattgcaggaacgagggcaaggactcgcgcattgccaccgtggtgatccgtggagctaccgacaacttcatggatgacattgagcgtgccctggatgacgctattaacaacttcaagtgcctgacccgggatggccgctatctgcccggagctggcgccaccgagatcgagttggccacccagctgtccgcctatgctgatactctgcctggtctggaccagtacgccgtgcgcaagttcgctaatgcgctggaagttttccccaaggctctggccgagaactccggcatcaatggcacggaaatcgtcaaccagttgtatttggcccacaacaacgaggccggaaagacaatcggcttcgacattgaggccgagaaggccagcaccatcgacacaacgaaggcaaagctcttcgatctgtaccagtccaagttctggggtctcaagtacgctgttggcgcggccgcaaccatcttgaaggtggaccagatcatcatggccaagcgcgccggaggtcccaaggtgcgacaggctgccggcagcgatgacgagagttaagcggctcctctgtgattcgtactccctactataactagtttctcccgctcccacaaagagtgcattgtattttcataaacgagtcccatggaaattataaatttcattaaccactctcacactcacccacatacacagccatgcacacagtttcttgtattaataaacttaacttacgaaaactgaactgaaacgcgtgatccttcgggggcctttgaaataaaacaacgtggttttcgcaccgaacccggtgccaccgctagataacgaatctaagtaagttatcgctttttatttttgaaatttaagcaaacgattattcattttgttgagtacaatatttcaaatgcttattcgcagatacatttcaataatatttgtgaggactcgtccccgtttgcatcgcaaaagagttgtattaattttcgaataaaatacgatctcgttgtcgcttttcatttgaagtgaaaggtgttaaagtgtattcgatgaccatgattgattttgagtacgtgtgcatctaatgcccttcctttccaaatgcgatttaccctctatggataagttatagaaaatgacacatctgaggacgaaaccaaaccatccgtgctccattgggtggttcggctgtcctcgggctaataacattcagggataactaaaaagtttggatgcaaagtgtccgttggatcgaaaactgttgaatgcggaatgtttaagcagaaactgggaggactcccgtaaccgactgcagtttcgattgatagggcggctcccatgaaagcctttcgcaatggcggctttggaccacattttgctgtttgctcacgacagcaaactggagctcaaaaccttttatataggtttccgaatagaaaatgccgtctccaaaaacgtgtgattcttggtactaagtaaacgttgtctgaattttgctacgttaggaactaaaatcaccgccaattcaaaaactcttgttaaatgcaattttggaagaaccgatcaaataaactataccttcctcattcccatccacactgagctggcgacttggacagttcgtctcagcgggacgagaatcgtaagttcgggatgcaatatgtgtgtatgtacgacttggtgggtgtatgctgatatcatacgcgtgctctccctacaggataatcattgcgtctatcattccaataccgaacaaaggtgccctatgccatgttagtttgtacaaaaataacttgcttgtgtggttacttttctctcatgccaataacactttaattaattgcgctcaacacgtttacatatatgattagaatggatgcgtttgaggaggaagaatcacacattcttctcggcattttcgccaaactagagaaacggacagttttcgagtttctgaggacatctgtgtgttggttgtgttgttacgggaatgaaataagttattggtcttgcgaaactttttgctatcattcaattggatatcggcttgctacgccgtagtgaattaaaatgaagaaactatgctaagagacaaatattgattacattttgaagttatttggtattatatatgctcttgtcgcttattgcaacgttcgttatatactttgactaagaaaaactggataataaacgcactaaatattgcgataagttcaactagctggttgttgtgggtagcatttctgcttcgtgttaaagcttttaagtaattcaataagatattttcgtacatttgttgtttgtggtgtcgttccacccgctggtggttaataagcttcaaaatacttatattttcaatacaacttttccttcttacactcgcctcgttcgttatcttctcaattttcaacaaatacaacagatatttctcgaaataagaaggcaaaatataacatatgtatttccgtttcgactgagtttgcgtttattgataaatttgtatgtcggattaagttgatagttttgtatatatagaatttcgggttaggtagagtagtaggtgctatagtcagcgcattaattgtcgttatagttgggatattcgtgtacattaactgcgttactcatcggaaaggaaacaactctgatatctttggaacaaatgcttcgatttagatttagatatagatttaggtttgacattgagtttgtgtttctggtttcggacattacttgttaacgtggctggtacacattgatatatcgattcaaatatatatatatattcctcgcaattggaattagaattggaattcaaacttcttgtaatgatattgcttatgacaatcgtagcttttgtggcttctgcacaactatatattgttccaggtggcgttgatactggtactggggtagtactccacacacgtttgcgtcctaatccatcttgctaaactaaaaataagctaaacgtccgccggcgatcgctgactcctcggcaacggcggaccatcctcaccgcctccttagagaacggtgcaggacgacttctcgcggaagggattcaccttctggctggtgaacccggtgagcaggtagtcctcctgctcgtgctccgtgatgtacttcatcatcttagcgcatgactccgagatcgtctggcggtcgatggcagcctcgcgacgcagctgctccaccacgacgcgctgctgctgcagggatgatgacattacgtccatgatggctgtctcggataggcctatggttgaaaaggttctcagtgttacggatactgggaaatgcaattacgggatagtggatttggggtggtgtgcttggttgctagtgcttgtgtggcttcgccgaagggcttggtctttgatctttggctttggcttatcttatcgtatgattctgggaatactggtttggatggatcttaatggctggctggaaataacaagttggttatatgtagtttagatatctcattctttgtacaggcttccccatacgggcacaacatcgaacaggcgacacaaagctataacatatgtgtacattttcgcgattctagacagagatagttggtagattggtgtagtttagtcagtgtttagtactaggcgggaagttaggatagctagatagtgagtcacactacgcattaacatatgtgttattttgtggcacatgtaaagaaccgaacgcaggcattggtttcatcgatcgcattgctgattaactttccagccgaactggaagccttgacgcgaacaagtgcaaggttattaactgaccccaagtgggcgtggtggtgggcggtgggcgctacttgtgccagcacatggagaacccgagttgtgtgcaaaaaacactgctcaactcgttgggaacaccgaaaattagttttttatgcagaaatagtgaaggagaacacacacacaaacacacgaaggcgtactgcgccgtgtggttagcagagggattatagtggaaaagtgaagttttcgacggatgcacacacaacacataactatatttgcacactatttgttaattaccagctccggcttatatgttttttttttttttaaatctcgaactctacgggctaaaatcgagcaaagttgacgaataaaagtggatacacacccaaactagtgatgtgccgcgcggcgatagttcgggtgcgtgagcgcacccgcataccatcgctaatattcgcgcagaaaaacatacaatacgtatcagtttttagttccatgcgctctgcaaaatgatggccaaggacaagggtctggctgtggccggaacggcggcccccttaccggccgccctcgaccacgagtggtccgccgaggaagagctgcagctgttccatgcaatggaaggcctgcgcccggtgggcatcaacaagcacttctacatgtcctgcattgtccagcgtctgtccaagtcgctgaaccgtgaaatgcccagcgagctgatctggcgccacctgggcaccatgtacaagctgaaggaactggacgatctggagtcgctgccctttcccaacgaggagcgcgagttcagcctgccggagcaggattacggaacgctacagaccaaaaagacggtggaagtgcatgccaacgaggaggctgcagaggcacagtcggcccctccaacagcagagaccaatggcaaaggtagttcgttagttatcatcaggattcattcacttgtaatgttgttttacagctccacctgcaaccaaaacgccggtaccgacgaattccaccaaggacggcgacaaaaagcccgtcgccaagccccaggagcagctgcccaagcgtccggccaagcgcacacgcggctccatgtccaacgagtccatcagcccctccactacgccgccgccggtgcagagcaacaagcgccgtcgcatataggtgacccccgcccgaaactgacgattgttgatccgttttagctcattagttttactgtactctaataaaaggatttattcttcgaaatcgttgtcctcctcgttggagccgttcccgttctcctgcgccagaacctcggtggcctgcatgttttccaggagcgatttgagaaggcgtcggttgagatggtcggtctgcgtcagttcccggactgcctggggcggagcattctcgtct

SEQ ID NO: 4058 - DNA, 2574 bp, DROSOPHILA
cggcacatcactagtttgggtgtgtatccacttttattcgtcaactttgctcgattttagcccgtagagttcgagatttaaaaaaaaaaaaaacatataagccggagctggcctatccgagacagccatcatggacgtaatgtcatcatccctgcagcagcagcgcgtcgtggtggagcagctgcgtcgcgaggctgccatcgaccgccagacgatctcggagtcatgcgctaagatgatgaagtacatcacggagcacgagcaggaggactacctgctcaccgggttcaccagccagaaggtgaatcccttccgcgagaagtcgtcctgcaccgttctctaaggaggcggtgaggatggtccgccgttgccgaggagtcagcgatcgccggcggacgtttagcttatttttagtttagcaagatggattaggacgcaaacgtgtgtggagtactaccccagtaccagtatcaacgccacctggaacaatatatagttgtgcagaagccacaaaagctacgattgtcataagcaatatcattacaagaagtttgaattccaattctaattccaattgcgaggaatatatatatatatttgaatcgatatatcaatgtgtaccagccacgttaacaagtaatgtccgaaaccagaaacacaaactcaatgtcaaacctaaatctatatctaaatctaaatcgaagcatttgttccaaagatatcagagttgtttcctttccgatgagtaacgcagttaatgtacacgaatatcccaactataacgacaattaatgcgctgactatagcacctactactctacctaacccgaaattctatatatacaaaactatcaacttaatccgacatacaaatttatcaataaacgcaaactcagtcgaaacggaaatacatatgttatattttgccttcttatttcgagaaatatctgttgtatttgttgaaaattgagaagataacgaacgaggcgagtgtaagaaggaaaagttgtattgaaaatataagtattttgaagcttattaaccaccagcgggtggaacgacaccacaaacaacaaatgtacgaaaatatcttattgaattacttaaaagctttaacacgaagcagaaatgctacccacaacaaccagctagttgaacttatcgcaatatttagtgcgtttattatccagtttttcttagtcaaagtatataacgaacgttgcaataagcgacaagagcatatataataccaaataacttcaaaatgtaatcaatatttgtctcttagcatagtttcttcattttaattcactacggcgtagcaagccgatatccaattgaatgatagcaaaaagtttcgcaagaccaataacttatttcattcccgtaacaacacaaccaacacacagatgtcctcagaaactcgaaaactgtccgtttctctagtttggcgaaaatgccgagaagaatgtgtgattcttcctcctcaaacgcatccattctaatcatatatgtaaacgtgttgagcgcaattaattaaagtgttattggcatgagagaaaagtaaccacacaagcaagttatttttgtacaaactaacatggcatagggcacctttgttcggtattggaatgatagacgcaatgattatcctgtagggagagcacgcgtatgatatcagcatacacccaccaagtcgtacatacacacatattgcatcccgaacttacgattctcgtcccgctgagacgaactgtccaagtcgccagctcagtgtggatgggaatgaggaaggtatagtttatttgatcggttcttccaaaattgcatttaacaagagtttttgaattggcggtgattttagttcctaacgtagcaaaattcagacaacgtttacttagtaccaagaatcacacgtttttggagacggcattttctattcggaaacctatataaaaggttttgagctccagtttgctgtcgtgagcaaacagcaaaatgtggtccaaagccgccattgcgaaaggctttcatgggagccgccctatcaatcgaaactgcagtcggttacgggagtcctcccagtttctgcttaaacattccgcattcaacagttttcgatccaacggacactttgcatccaaactttttagttatccctgaatgttattagcccgaggacagccgaaccacccaatggagcacggatggtttggtttcgtcctcagatgtgtcattttctataacttatccatagagggtaaatcgcatttggaaaggaagggcattagatgcacacgtactcaaaatcaatcatggtcatcgaatacactttaacacctttcacttcaaatgaaaagcgacaacgagatcgtattttattcgaaaattaatacaactcttttgcgatgcaaacggggacgagtcctcacaaatattattgaaatgtatctgcgaataagcatttgaaatattgtactcaacaaaatgaataatcgtttgcttaaatttcaaaaataaaaagcgataacttacttagattcgttatctagcggtggcaccgggttcggtgcg

SEQ ID NO: 4059 - protein, 70 aa, DROSOPHILA
MDVMSSSLQQQRVVVEQLRREAAIDRQTISESCAKMMKYITEHEQEDYLLTGFTSQKVNPFREKSSCTVL

SEQ ID NO: 4060 - DNA, 3825 bp, DROSOPHILA
attactaaattttgtcgtggccagatttcgaaaatggatcttttgtgcaatgatggcgctagctgtatggactacttctccagcccccacaacaagaaacccccgagtccaggcagtggcgtgccagcattgggaccaggcggtgccctacccattgccataatacccagcatatccagcttagtcaaccagtgcaacaagccggcctgcgatgacgctgatatgcagtgcatcatcgacctgatcgaaggcacactctgcgaagcggtggccattattgagtcagacccgcgtggtctttttatctacaactttccgaaaaagcaaaagatgtcctccatcagcctgatctcttcagtgttcaccgacaccattgtggccaacggagaggatgatccctcgatcacgaatcattacacgggtggccttggcatttcggcggactccgtatccagtggcttggcgcgcaagatgctgaccatcggggactttgaatactccaatgccattgccgacattagggattttgtcagtcgctgggaactttcgccggacacgaagtgtgtggtgatcagcaatccgattcgacacgaggtggccaaaaagggaaccattctctttgtggatgcccatttctctcggccaacaccccgttgtccgaatcctctggccgtcgccaaggtgcgtttcatcatttccttgtcgaagattctattgaagcattatcccgtgatgatcacctaccgcttcgagggttacaacacgctctactacggcctgggcgaacgatgcctcaactcgttcacttttcagcgattctacatcgacaccattctgcacaccaagctgaccttcttcgctgcgatctcggagtgtcgccacggcaccattgaaaagcccaagaataatatcaagccgaaaaattcaaagaaatcgggatcttgaacttgatttccctattaaaacctttgttttgtgtctttcaattccccaattttacttactgcaaagcttccgatagacagtgcatgcgctgctccgccacgccgaggcaaacggctagtttttcgcgcaaagcctccttgtcctcggacatcaagacactagtgtgggtggaggtcagtgcgtgcagccaacgcagggcggagcggacactgtaaaagaacgtatttagaaaaagactcaatagggctctacggaaaacactcacctcgcgtgctttccttgcagcaggatggaaagttcgttgaccaggggattgacataatcgagcggtagccgatccaaggtcaactgtatcgtctctggatcctgagtgctcagaacggcttgtatcatccttaaaaaacgaacttctattaaaacatctattgccattgttcgaaaatcccttacgcctgatccttgctgtgtaatgcctgcattagcagctgcgttttgctctgcgtcaacaacttgccgccactcagtttggttccttgaattttaagatgttctagtcgggcttccatgggcacttcgttttgcactttcttctgcgagatgggcagggcgctgttgtactccacatttttttggtttacaatgggcttctggaccttggtggcggcctggtagcccggctgctcctttcccttctttttcgcatagagctttttgggatcggcgcgcacaataacgtttagtttctcgccatagttgggcgtaaaacgttcaaactgcagctgttggcgacttccgtagccaaagaggatttcgtgggagcgatttgagtctgtcacaaagtgggccgccacggctagaagtggttccactgtttcggcgccatcggaaacgatctgcagcgaaaccttgggcttcacaaacttctctgcggataaactgtgaaacatagtacttcagtacgagtgacaaaacgtgtattcacatgacccacctgttcacattcaacaggtaaatgtgtatgatgccattgcgggtaacactggccacacgtagctgaccatcgtcgcgcacttcgctggttagacagtaggccaagtcctccatgaggagcgtgcaggcggaggctttgttcttgcccttcttgtcgatcttccagaagcagattacgcgctccatcttcgcggtggtcaaaacgaattcagtgccatctgtgctcgccacgctgctgattgtgtttatttcgcccgagtggccggtgaacgtttccaccagctcctttgtcttgatatcgtacaccttcagctgtcggtagccaatggccaaggtgccacttttctgaaggtagactatattttggggcttctcgggtcccacttgccattcggcgatggagcgctcgtccgtcaaggaccaaacaacaaccctacaatcggcacccacagtgtataggtggccagcgttgtcatttgtaattgaggtcactggtccatcatggctgtcgccactgagcgttcgagaaatctgcaaggattgcttgtggtttattcgccttcaaggctctttgtccgactcacctttccctcggctaatgagtatataaccactgagcccttgtacgttcccagagcaatgtgaagctgatcaccggctgcatcctgtgcctggaggctcttccgcgacttcttgggccgggaaccggccaccaaaacccacgtgagagctgtgcacgacccggataactgtagattgggcgtaaactcctgatacagcgtgttcgtctctgtgttccatatccgcagaactcccgactcgtccaccgaggcaaatagttggccaccattgggcgaaaatcccaacacgtgcttcttgcccagcgacatcgttttttatgttttgaattagagatgggcgctaaggctagtgtttacatcggctcacactcgtcgcacttaatgcaatctatcacgcaaatgtcacgcacgactcacgattgaattgcatttaccgacgtttcctatacccttgaaagatttatcaaattatatgcaaacaaaattcatcgagtgaacaatataataaaccaatgggaatgtgaattttttaaataaacttttcagtttttaaattaaataataaaatattttactctaattgttttaaaatttcctcaaaacttaaaatgagtaaattcttttgcaactgtaaatattacttatttggagtaacttatatacattatcctggattatttaagtaaatgcgttcaaagaccaagaaataaactcgatttacaggattctttggggcgtaaactccactgctgaactatattgttaattgcatgctattcatcataaaccattgagaatcgttaccttattgaaaaagatcaattcaaatgtaaaataaaaataaaatagcgccagtcaccgtttacgataatcgataggcaagtgccatcgctatcccatccagaatgttcgcggccactttgaggttataactatagctggaatttaccgactgactccgtgtgaaattgaaatctgtgttaaaaaatggctttatccgttcccaaggctcccggtgtgtcgcagatgctgaaggatggcgcccgggtaagtgcaacaaggaggaataactctgcgaggagtccgccgggcatcggtttcattgagattcggcttaaaagaaaacatgccgtcttgcggaggcgcgtgattagtcatcctcatggaacggggctcgacatatgaaagaaaaatgactaatttaatggctttacttgtgtcctcagatgtacagtgggctggaggaggcggtgttccgcaacatcagcgcctgcaaggagtttgcacagaccatgcgctctgcctatgg

SEQ ID NO: 4061 - DNA, 1605 bp, DROSOPHILA
atgtcgctgggcaagaagcacgtgttgggattttcgcccaatggtggccaactatttgcctcggtggacgagtcgggagttctgcggatatggaacacagagacgaacacgctgtatcaggagtttacgcccaatctacagttatccgggtcgtgcacagctctcacgtgggttttggtggccggttcccggcccaagaagtcgcggaagagcctccaggcacaggatgcagccggtgatcagcttcacattgctctgggaacgtacaagggctcagtggttatatactcattagccgagggaaagatttctcgaacgctcagtggcgacagccatgatggaccagtgacctcaattacaaatgacaacgctggccacctatacactgtgggtgccgattgtagggttgttgtttggtccttgacggacgagcgctccatcgccgaatggcaagtgggacccgagaagccccaaaatatagtctaccttcagaaaagtggcaccttggccattggctaccgacagctgaaggtgtacgatatcaagacaaaggagctggtggaaacgttcaccggccactcgggcgaaataaacacaatcagcagcgtggcgagcacagatggcactgaattcgttttgaccaccgcgaagatggagcgcgtaatctgcttctggaagatcgacaagaagggcaagaacaaagcctccgcctgcacgctcctcatggaggacttggcctactgtctaaccagcgaagtgcgcgacgatggtcagctacgtgtggccagtgttacccgcaatggcatcatacacatttacctgttgaatgtgaacagtttatccgcagagaagtttgtgaagcccaaggtttcgctgcagatcgtttccgatggcgccgaaacagtggaaccacttctagccgtggcggcccactttgtgacagactcaaatcgctcccacgaaatcctctttggctacggaagtcgccaacagctgcagtttgaacgttttacgcccaactatggcgagaaactaaacgttattgtgcgcgccgatcccaaaaagctctatgcgaaaaagaagggaaaggagcagccgggctaccaggccgccaccaaggtccagaagcccattgtaaaccaaaaaaatgtggagtacaacagcgccctgcccatctcgcagaagaaagtgcaaaacgaagtgcccatggaagcccgactagaacatcttaaaattcaaggaaccaaactgagtggcggcaagttgttgacgcagagcaaaacgcagctgctaatgcaggcattacacagcaaggatcaggcgatgatacaagccgttctgagcactcaggatccagagacgatacagttgaccttggatcggctaccgctcgattatgtcaatcccctggtcaacgaactttccatcctgctgcaaggaaagcacgcgagtgtccgctccgccctgcgttggctgcacgcactgacctccacccacactagtgtcttgatgtccgaggacaaggaggctttgcgcgaaaaactagccgtttgcctcggcgtggcggagcagcgcatgcactgtctatcggaagctttgcagtaa

SEQ ID NO: 4062 - protein, 534 aa, DROSOPHILA
MSLGKKHVLGFSPNGGQLFASVDESGVLRIWNTETNTLYQEFTPNLQLSGSCTALTWVLVAGSRPKKSRKSLQAQDAAGDQLHIALGTYKGSVVIYSLAEGKISRTLSGDSHDGPVTSITNDNAGHLYTVGADCRVVVWSLTDERSIAEWQVGPEKPQNIVYLQKSGTLAIGYRQLKVYDIKTKELVETFTGHSGEINTISSVASTDGTEFVLTTAKMERVICFWKIDKKGKNKASACTLLMEDLAYCLTSEVRDDGQLRVASVTRNGIIHIYLLNVNSLSAEKFVKPKVSLQIVSDGAETVEPLLAVAAHFVTDSNRSHEILFGYGSRQQLQFERFTPNYGEKLNVIVRADPKKLYAKKKGKEQPGYQAATKVQKPIVNQKNVEYNSALPISQKKVQNEVPMEARLEHLKIQGTKLSGGKLLTQSKTQLLMQALHSKDQAMIQAVLSTQDPETIQLTLDRLPLDYVNPLVNELSILLQGKHASVRSALRWLHALTSTHTSVLMSEDKEALREKLAVCLGVAEQRMHCLSEALQ

SEQ ID NO: 4063 - DNA, 3487 bp, DROSOPHILA
aaagcaagtaatttgttatgatagtttttaagaaattggatgtttctgcacgagtagatgtccaatgaatcagtattttaagagctacgcaactacaggcaggagcctgtatcatccgatttcattttgataataacaggtttgaaaagatgcgcatttactgagttggtaagaaactgactgataacaaacttttccagacgctatattagtcagcttttaagtgtgagtaaagctgagtccatgggtttgtccatgtcatccaccaacttgagtgctatagcaattagctttattgtcgcttaagaaatgctatggaactgtaataatgtaataatatgtctgtaataaatgcttaacttatgatttgataataaaattttcatttcacaatttaagtaaatgtggagtaagtttttcccatgtgaaaactgaattactttatttatttattttgaaacataacataaagttttccctaaatatttagaaatatttttgttctgtaatgtatcttatcttattataatttggcttgccaaacgttaggacaacctaaattagattttaaactatccttgttattaaagatttctaaattaaattttattattataaagcttttgagcacagtattctgacagagagtatatacaagactggcttttaaaagcttttattttatatgtatgtacatacatctaaaattcggattggttaatatttaaattcaaagacaccttcttttaagaattcaaatttccagtcaaaacatatttttaagtcgtttctctccctctctaaaattgaattcttttttatttatttatctatcattattcaattgtaaaaaaagctttttgatactagacagtttctttgtgtttatttgtataatgtagggattaatgcaatcttggaacgcagtcttttgtagataagagttttcctatacatatttcgcgctgtcaggattatacacattttcagataacaactattatggtctttcaagtccttccatcctcaaatgaactccctcctgggtggatatcaggaaattacgactggaaaacttcagcgggatctgtgttttctccgacctgctgaacttaaaatcccttagaaggtatacaagacccaccttcacttgcagtttaccaaaacgctcgcctatgcaatttcgaggaccctcgccaaaaggcaaataggcgaaaggatgcctagccttaatctcttctggctcaaagcgactgggatcaaacttttctggatcgggataaagctctgggtcgtgatgaatactatgcacaggtattattatcttagatcccggctccaggattaggttgctattcggtatctggtactccttggtggaacgcctcagtaagtgaggcagtataggatacttgcgaagcgtctcggcaaccacttggtccaggtagggcatctcctgaacggagtcgtacgtgagcttttggttgttgcgtttcaaaacggcgagtacctcaacccgtagcctttcttggacatcggggttgagggccagctcatacaggcagaaggacatggtggtggaggaggtgtcgaacccggccaaaaagaaaaccaatgcctgggccgcaatctgctcgaaggagagggcgtcttttactccctcctcacccaattccattagtagttggatcaggtcgttgcgatgaatattctcccgtcgcctgtagtccaatgtctggcgtaccgtgtccaagaagaactcactgacctccgggcgaaaaagcctgaagcgcagcttcctagccaactccggctgggcaaacataaaggcctggacgagcaccgaatgcaggggctcctgggtcactgatcggcccattcgccggaactgcgactccggatcctggagactattacactcgaggccgaaggcacagctgccgatcacatccgtggtgaacctggcacacagatcctttgcctctatctcgccgacctggaggcgacacgcctgcgttagcttctcgcccacctccaccatgttggggaacatgaatttcatcttgccggaggtgaacacctgcgtcaaattctggcgcaaccagcgccactccggtccgtccaggaagagaaggttcccggtcagtggatcgtcccgcacattatggaagagtcctcgatcggcgaagctggaaaagtccctgatcattatatcgcggatcagttccagatccatgataaacagcgacttggtcataaaagtgaagtagccgcagtagcgctccactccccgaaacttccggtagatccgcaggttgatatccgtccagtgaaggtcccttcccagcccactcatattgccgcggaagtacacgggtctttctccggcgacgccccttctgctccagtagctgtaatgccagcgtagcttgacatatagcagaagtccgacggtgaacacgagtaccaggagcgtcagcatggtacctactgctcgatagaataacaactgagtggaaaagtggggtacatttgatttgccgtctgaaaagctttcgcttcgctctcttttcggggactctctttctctatcggtcttatatgcaaagaactgcagttatctaaacatacataaacatatcttgcgtcattttaaatgagaatcaaatgatttgtaaacaaaatatatagagcgttgctaatgttcagttttcagatcaattattatttgaaaatttaaaaaacttcactggctaagcgttattagattatttacaagttttacaagtacattctaaactttccaaagttagtaaaattccgagtctatatgcgttccactatggcgctgcgagtgtccgaagctaaggggatgtctgttaggtctgaatcaccgaacttgaagcgctgacacaatgccaatcttggcctgcattttgccaaaacgcagacctatgcaactgcggggtccaaatgttccgaagggcagatatgcaaatggatggcgggagttggacttataagccttgaggcggctggaatcgaagagttttggatgtggatataagtgcggatcgtagtgaacactgtgcacaggtatcagtaatgaagttcccttctcaacgatgagctcagtattgcggaccctaaagctttcttgtgtttcgagcaaaaatttaattaattggatgttttcgaagagtttctaaaagttaagttgcgctatcaaattttccatgcttaccagacaagacctgttctggatagttaattttagctaaggcgtcgtaagtaatcgcatttccttccagaaccctttctatttcatcccttatttgattctagatctccggctggagggctagttcgtacttacaagagctcatcgtactggaggaggtctcgaatccagccaagaagaacacgatggcctgggcagccatttgctccagggtccagttgtgggagagatcaaactttgaccctc

SEQ ID NO: 4064 - DNA, 1487 bp, DROSOPHILA
gtaccatgctgacgctcctggtactcgtgttcaccgtcggacttctgctatatgtcaagctacgctggcattacagctactggagcagaaggggcgtcgccggagaaagacccgtgtacttccgcggcaatatgagtgggctgggaagggaccttcactggacggatatcaacctgcggatctaccggaagtttcggggagtggagcgctactgcggctacttcacttttatgaccaagtcgctgtttatcatggatctggaactgatccgcgatataatgatcagggacttttccagcttcgccgatcgaggactcttccataatgtgcgggacgatccactgaccgggaaccttctcttcctggacggaccggagtggcgctggttgcgccagaatttgacgcaggtgttcacctccggcaagatgaaattcatgttccccaacatggtggaggtgggcgagaagctaacgcaggcgtgtcgcctccaggtcggcgagatagaggcaaaggatctgtgtgccaggttcaccacggatgtgatcggcagctgtgccttcggcctcgagtgtaatagtctccaggatccggagtcgcagttccggcgaatgggccgatcagtgacccaggagcccctgcattcggtgctcgtccaggcctttatgtttgcccagccggagttggctaggaagctgcgcttcaggctttttcgcccggaggtcagtgagttcttcttggacacggtacgccagacattggactacaggcgacgggagaatattcatcgcaacgacctgatccaactactaatggaattgggtgaggagggagtaaaagacgccctctccttcgagcagattgcggcccaggcattggttttctttttggccgggttcgacacctcctccaccaccatgtccttctgcctgtatgagctggccctcaaccccgatgtccaagaaaggctacgggttgaggtactcgccgttttgaaacgcaacaaccaaaagctcacgtacgactccgttcaggagatgccctacctggaccaagtggttgccgagacgcttcgcaagtatcctatactgcctcacttactgaggcgttccaccaaggagtaccagataccgaatagcaacctaatcctggagccgggatctaagataataatacctgtgcatagtattcatcacgacccagagctttatcccgatccagaaaagtttgatcccagtcgctttgagccagaagagattaaggctaggcatcctttcgcctatttgccttttggcgagggtcctcgaaattgcataggcgagcgttttggtaaactgcaagtgaaggtgggtcttgtataccttctaagggattttaagttcagcaggtcggagaaaacacagatcccgctgaagttttccagtcgtaatttcctgatatccacccaggagggagttcatttgaggatggaaggacttgaaagaccataa

SEQ ID NO: 4065 - protein, 493 aa, DROSOPHILA
MLTLLVLVFTVGLLLYVKLRWHYSYWSRRGVAGERPVYFRGNMSGLGRDLHWTDINLRIYRKFRGVERYCGYFTFMTKSLFIMDLELIRDIMIRDFSSFADRGLFHNVRDDPLTGNLLFLDGPEWRWLRQNLTQVFTSGKMKFMFPNMVEVGEKLTQACRLQVGEIEAKDLCARFTTDVIGSCAFGLECNSLQDPESQFRRMGRSVTQEPLHSVLVQAFMFAQPELARKLRFRLFRPEVSEFFLDTVRQTLDYRRRENIHRNDLIQLLMELGEEGVKDALSFEQIAAQALVFFLAGFDTSSTTMSFCLYELALNPDVQERLRVEVLAVLKRNNQKLTYDSVQEMPYLDQVVAETLRKYPILPHLLRRSTKEYQIPNSNLILEPGSKIIIPVHSIHHDPELYPDPEKFDPSRFEPEEIKARHPFAYLPFGEGPRNCIGERFGKLQVKVGLVYLLRDFKFSRSEKTQIPLKFSSRNFLISTQEGVHLRMEGLERP

SEQ ID NO: 4066 - DNA, 15915 bp, DROSOPHILA
tttttttttaggatttttacaatttattaaaaaaatggaatctttttattgatacagcgaaaacttccgtttcttttgttctctgctcactgttaaaaaaaagtcatgaatttcgcttttaaaaaactgtataatatatatttttattaaaaaaaagacagtcagtcttcgtgcaacaaatgtacatggataaatgccgcgtttacaatcgttcctcgcttcgttttccatttttatgcttatactcttgttttattttggttgtaagtacggttaggggaggagggatatctctcttgtagttgattaagtaatagttattttttctcgtttctctcgtttccgtttaagcgatactattttggttcaagtccttgtgttttatgtacatatttaaactaaattacgagctacaattactagtttgtgtgtttcctttttgtgtgggtgaatctcgcattgaattatatgtaagtacattgtgtgtgttttgcgtgtgttacaataaatatctctaagtttaagtattccttaggtgctagcatactacatacatacaaagctgctacgcagaggggcggtggggcgtggctggaagggtgttcatttcaagggaaggggggcggggaaggcagctgctataaataccggacttcgggaaattaactaacatgcatacacatatacatacatacgggtctgcttagcttttcaattttcatggatacgtcgattttggattttttttatataaatatctggcggactctttaaaaatgtatcttgaaaccataagctaatgcatctttttgagacacaaaaattgatattttgccaattaccatgccatttaagcatccatgagaatccatgagaatccatgagaacgaaatcctcagcagacccgctggacaaatcgattttacagatacaaatagggttacggcttaggctagagtctaaagatacgtcctaatagctacaggaactagtgctagtgctaactcgtaaagttatagctgcgcaccgccctgccgggcatggccagctccaccttgatgttggccgtggccgtcaccttggtggtgttgctgtccgagtgcgtcgtctccaccgtcacctccggctgcaccacgatgctctgcagctccggcggataggccgtcgggaagggaggcgggggcgttgtgggcgggccctgatgctggtggtgctgctgggcggcggccttgtgataggcggggggcggggccgcgtaggaggcgggtcgctgttcccgcggctggtaggtccaatcattgggcatctggatggacgagttgctggacttccacgactgcggctcctcggtgatcgtcgtcagcgatggatcattaaggtctttgtggtggtggtgatgcgacttctggcagctgcctcgcgaggatcgcgatccctgcaccacataggatttgcccgatctcttgctgctgcgcacgggcagcggagagggcgtggatatgcggtctggatgctccagcggcaccagctccgcctccggtcccaccatgctcagtaggatggggaacaccaaaaggctgttgcaggcgccaacgcataagaccaccagcagaagccagcagaagtgccggatcacaaactcaaagggcgacgtggagagcatgaacacggccactccggaggtcagcatgccgtggacaagtggtcccagggacatctgcatgctcagctggacgcggcgctgtcggttgccaacggatgtcatgaagccctagaatcggaaagataagcgattaatgtgtgctgaagaggatccaatgaaaagtcttgggatatctctggaaaatccgaagctcttaatggtccagccagaaatgaagactcaccagtgatatcagcacattgaagcacagcatcatgcccacgctgaggatgagtatgactgccggaatggccgagagtttgatgcccagcagagtcatggccccaaagatctgggccagcgaggccagaacgctgaggatcacgagaacggcggcccaaacggagagcaggagcagggagaccagcaccagggcggcgagtagcacgcaggccaggatcatggccagtgaggagcgcagggtcatgtactgctcccagaagatgaagggaatgcctggcgataaataaatcgactgttagttgggccccatgtatgaagtactcatttccgactcacccgatggatagttgggcaggccgaagccctcgtacttgacgctcaggtcgcgaatatgacctatcagggtcttgatctgcgaggtatctgttagtccgtggaggtaaaagggcatctgagcgtagaccaatggcagactcttgggtatcttaagatcgtactcgttgggttggtgaaaatactggcgcggttccggatacaatttgccctgtaagaataaagatacacacacatttagtaatctttaactttggagtgcgataagttataatatgtatgtacatatgaggagaactaaggcgatctaatttaatttaatttaatttaatttaataagaagacccacctgagaagctccgtaggcgaagacgtcgttggtggcccatgccgacagatagttgtagaaggcgcgttggttgatgatgccatcgctgttgaccaggcgattggtgagcaccagttccttgtccacggggttgtccacatggccggtttgcacgattagcttgtaggccaggatggcatcgctgctggcgtttgggaaccagcactccttggtcagccgtccgtcgcggtattcctcgtcgaatatcttttgcagattacccagccactcgctgaagagcagcagccagaagtccggcagtccaccattatcattcttgatcacatgtggcacccgcacaaaggaatcatggtagtccctgagcaactgctgctgggtgggatattcaaagttgccctgggtaaccgcatacatgctgtagaagccaaagagccgagtttgagcatccaggaacttgtgctcgttgctgtccttgggcaccagatcaataatgtccaggccatcctgaaggcgcgtggaggcatacaagctggatatgagggccgccaggaaacccataacggtcaggaacttcacccagctgcgcatgaggaagggagtgtagtgctgaaaggcgaaggttgccagagagaaggacgccagtgagtgactgctcccagggatgtctgccctctgttccagcagaggattctgggcgggcagcggcaccctgttgttgttgcagctcttcggatgccgggccccgcgcccgttgttgttgttcagcggcagcaccggtggtgccaccttcggctgttccttccacaccggaaaacagcagcagaagatgtccgccctgccggcggtacgtctccgtagatccaacgaaatcatggccggaaaaaccaatagagccgctgccaaattggagcacattacgatggcagcctgcagacagaataccttcaaagccggcaccggaataaaggcggccgcaaagaaggatcctgccgtgctgcaggcactgaacaggatgctcggtcccactttcttgagaatcagcttggtctgctcccgccgattgctctccgcataggcagcggtcagcatgaagatgtgatcgacgcccagaccaagggccaaaaacggaaccacctgggtgctggcggcattgaaaacgataccgagcagggctgacaatcccaatccggcggcggtactaaagcacatgagcagaactccggccacgccgacactgctctgtccacggacggggtccctccagcggaggagcgtgcagaaggcatacaaaacggtgacggccacgccgatgacaatggacaaggcgctgggatgggagaacttggccaggatgtcatccagtgcagccgagctgaacacgtagatatcgtagttggtggcaattctcgactgtttacgtagcagctgttccacctcccgcgaaaagttgcgctgccaggcgttcaaaacctccgctgccttctcctgcgtccatccaagatggtgcaccttgtagttgtcctgccactggtcgtacatttccttctcggtcatcagctgcaccaccgactgcagggcctgggccttcctcaagtgtccgctgcggttcctcttcgctccgcccacaatcagttcctccggccagtgcatatgcttcgcggcataaccgtagcagcctccggacaggatggctcccacatccggcggctgggtgctgttcttgttcggtgccgtgtccgggcaattgggattcagtgggttcaggcagggcttctccatgtagccactgccaatggccgcacgcttcatgtactgctccacggtctcgaagtcgaagctgatcttttcctcggacatcttctgcttcatatactgcatcacagaggcgggattcagtgtggtccacaggagtcgttggttgaggcctctgtagaggagtaacaataataaagatggatttgttgagttaagaatatttatttacgaatatttattaataagaagattatttacgatggtaagcaactgggataagtacaaagatactcttgtcacgtttatctttcgacttgatagcaagtttataaagataagctatcgtatttaataaaggtaagcgcaaagtaagtactttattaattccttaatatgaatagagaagtactgtgggttaaagtagatcatgcaaaaggatatggtcataagggatacgttcactttagaatctataagatgtggctattaactacatattaactacttacggtataacgaccgctgattccggacccaacagctggcttccctcccagaaacagtccagcggcgtgatgatcgagcacggaatgaggtggcgcaggatctgctcgatgtagtagatgccctcgaaggagggcgtgctcggcatgttgcacatgtcgcgcagcccccattcggtgtcgtagaggtgcaccttgacggcggtggccttgaccaggacctccaggtgggcaagcagcgcctgcggatgcaggacggaggcgttcgggtcgtgggtcgtctgaatgagcagctgatgcgtggccgactcgtcctcgccgatcgtcttctgtgtgtaggccagttccgcctccagccggccgccctcctggatccacagctggtgcaccttggagtggatctgggcgctcttcaggccgacgcagaaggtgctcagcaccaggatagccacgaatagcaccttgcccgcgtgcttttgcacggagctgccgagggtttcgaggtgggactggaatactgatcgcagatagatcgccgtgcggctgccacgcgctttgccctgaaaaatgcaacaaaatacggaatttagcgtttagttttttttttttagattccccccgccttgctccactgccataaataacgcattaaaattataacgaaacagcgtgtggtcatataatttatttgctctgctcccaacgaactccatccgcacatgggtgtggtttgaatattttactccggggtctttatttaaatatgaaatttagggacaacaagctcctgttactattaaagagagattatttatagacatctggtatcttttactgttccatcccctcgctacgcctatgcctccggaccccacccagagcctcgatcccagattccgaatccagagccgtggaatcacaaaaacaacacagacgccgctgtcgtcattggcgggctgaaagaaggcgaacctataatcgcctgcttgggcaattggatcgatcgctgctcgggctttgggcctggctcgaactgggctccacactccgctccttcccaagtaaccaccttgaatttcgtgctgcttctccattccccagctgctgcagcgctgcacggaaactgaacccctttccccaaaaaaaatataaaagaaccatgaaaaaaataataatgaggctcgcgctaacgctaacgtctcaatcgaggttttagcccaacaatcagagaaacagtggaaccagcatatgttgaacgctagtgtttggattacaaagaaagctagtttataaattctaagctttaaagtcttaagaatgctttttgaaacgctaactgataaggtaattatgaatcaaatatataagccttatataagctaaatatatgtcctaacaacacaagtagctaaaataaattttggacaatagattgatatcggaatccctttggtcccactgtgcagcaactgtggcgcacccagccaagtcggggatcgaggcatccaataacgcattccgcacagacccaaactcgaatcttctcgaagtttggctcctcgttctggcatctcttcgctgcggccgccctttatcgcttttcacagatttttcccggcccaagttgtcggcttgtggccatcgaagagtggagaaaaagctgcagcgcacagaaatggcttattgtttggcctttcaaatgttttacgactaccgttaagatggagcgggagtcactcgtaatgtctttcttagctgaggatggggaagatactcatacttatgcgggatagcatcctgcacttcctgctgcttgtttatgcaacccagtttgctatagatatgcaacaggcacttccgcaaagcaaggaaaataaaacatcaaacgcggcgcgctctcaactttgtcgccattaattaagtcgttggcggcacatccactttgagactgcctgcggcgacctgttcgtggaatttttccataattttccctgtccgaggtgcgcaaacaaaagatgcacacgattctaggaatccctgtccgcaaaaataacattccgttgcctgtgcatgatctgcatggaccccttggggcagccgggtatagtataaaaataaagttaatctagatttggccggcattccagtggctcgcaaactgtgcggctccaaattgagccatcaacgcttgtcagcagccgtctctttcgctaagctcgagccgtctctttcgcgaggccttcgcaaaactgccgctcgagctgtgtgacatatcatcaatcttgtgccgttttttttttttttgccttgcgtgccacttttccctgctcaccgccctcagattcagtttttagtttcagattcagtttttgcccacccccgcagctctggttcgctgtgaggaaatgtcacgcattgatttatgatcctgcccggggtttcctatgctgcattttcaaatgaaaatgtcagctctttgttgctgctgttcagctacggcgacagcttcattagaaatgcgcacacacagccgccgaggttcttcagcctccttaatccgttgcccagaaacgaagaaatgaagacggactcagaagaacccaggtcccacgacaaccaatgagatcgagctaggggcagaccggtggccgaaaagaacgaaaacagttgggaacagcaggtgcaggtagaccggagatgatgggtagaaatgtatcacaagtacacggagaaaaattcagctctctagctcgattttaaatattaacagattaacatacttctatacgattaactatgaaatcataaaggattctactagaatatgaagagaaaagaaaattgtgagctactttacttaaaattctgtatgtttgaagttttctgttctcttctgtaaacaatctcgaaatcttcgcatcacgcatcaatcaatcaaaagatccgacacatcaactggcgcggcaaaaggcaaaaatcgaattttctccggccccccacagcgcctgactacttaattacacggaccgcttcgggaaccactctaaatttgaaaaaaaaaatatatatatatatatgtatatagaaaacttttccatgccatttggaaatccgaaaagcacttgagtctctcggctcgtatatggtgcgttgggccattaaatatgagcgcacccagttatgccgcaataaaaatcgaatgcaaaaccacaaaaaacagcatttttatcataaaatgaaactctatatggcagaccacccagacgaatcgaatatgaatagggagcatctatggcattgtgtatatggacaggcgattccattgcggtccaaatttatggattgtgcgagcgcgtgaatcttttcatatctttcgattccgactcaagggattactgctgatgactgctctatatatggaatctctgatccggtggactttgtgtgttatgtgtgtgcgagtgtcgcagctttcccatgtttctcacgtaagcgtgtgccataaaacttgtagctaccataaacgttatatgccacttgataacgtttttgaatacgaaatcttctgcattgccacatccgatctggcgtgtatctcatggtggttacccttccccttttttcccatctcgcccgcccgacatttgaatggaagtgtgttttttttctagtttcacatcccaattcacccagctgtcaaacaaaatagctggtggaaatggatatagtgcgtcatggatgggcctatttattgtttatttttagcagggatatggaattctttattacgtttagcgctccgtactaatttttccgtctattgggcgccattaaggaccacacacatgcactcggctggttggacagcaaaagtaaattgatttcgaggcaattaaaaatgaggcccaaacgaatgtgaaaccgttgaatgtaaattccttgctgccgccaatttatggcgccccgaaaacgtgactagcaaaccgtctgccgcatttattaccattttatgctctttactttttgcatcgagcgagtcgaaaaaaaggagtaaaaaaaacatatttgcatgcccgtaaagcgaaatcgttaaaaaaaggtttgaaggtcacagtgcggctcaggtgagcggccaggcagacggtttacagttaactccagaagcgccaggtgcaaaacagaagaggaccaccggcatggatacccgattatcttccctctctctctggacagtctgtcaaaaaagttttgtaatcacttcgatttcaactgaagctaagttcacctgccctgcgatctggagaggccgtaacaattttaatttctttattatttcgtctgaaaatcgaaaacgcaacctacctggcccgccacaggtacacacgcactcattctccactgccgatggtttgccatcatatcgtatcgtatcgtatcgagttcgcgtccgttcagcggagttttgtccgtccgccagtccgtccgtggacctctgtccgttaactgctttttcagtgaattccgtgattattgcttgaatgtttctttccggtattcgctctctgtcactgtgccctcctctctgtctctgcagtatacctttttctggctcggctctaggtcttgatcgtaacgtaagtaagcccccgcttctctctgctggggtttcgagtttttgggcctgtctgttcgtgtgtgtgtgtgtgttgatgcgtgtgtgtgtgtgtgtgtgtgtatggttatgggttgggtataggtatataggtacgggtacggcagcgtgctgtgtggtcgagttaatgtcttcataattctcccgatttttcttctctctctctctctgtcgggccgttgttatgtcttgcttcgccgagacctcagactgatgaagacaataacagttttatgtgcggctcgtctctcgggcaaaagtcgttgccgtcccgtccctaatgaagcccaagctgtggccgcctgtacaacagcatttcgtgttttttcctcggtttattttcattttttccctcacattttgtattttgtattttgtgtttttcttttcttttttttttgagttccagttccccgcgccagctgcagatggcagatcaagtcaagttggacacgttggtgcgttgagtgtgtggggccgcagcagatgaagctgtcaattgtgggatcactgtgtgggagttatgtgggccattgggttcattcgaaggggaaaataagttcaaacccctgataatgggtcaaaggattatgtaaagcggcagtgatgcgtttttatgaatgaactccaatccgattaaagttcatgtaaagtcttttggaactacgactctatatacccattggtattggcataatcttcagtactaacaattctttgtatggaatggctacgaatttttcaggtcatattgtatttaaatgacatttcccagaagtggacattttctgggcgtgcacaccttatcgtgttttgctttcaacacgcccagcatgtcaaattacagttaacttgttaagcacttcctatgtatgtatctctatctctatctatctgcgacgaggtctcgttccctccacgtaaccctaagccggaaacgcctgtaggcgtgagatatcttcatcgacattgttctgcggccttctgggaagcgaaatcccatcgatggatctatacatccctgctgaaagggaatagcaatttatgcaggtatcatcccgtcccgccgactatctgtgtcactccttgggggagtttgctcaaggattactctccactctccacttgagatccagactcaccctcgcccttcgtttcggtccagcgctttgatctttcctttccgtcctcgttttttctttttttttggtatttcgagttcgtaaatatttcataagtatttaattgtatggttctggactgtattttatttgtgtggggctattgctatctgaactccctcttcgccacttgaaaatatcaaataacaaatattgatcgcgagtgtgacaatgatttatttgccttacacctaccgcgctcgagatcttatcaagcagataacgatctggaaattataatatttgacttacggtctgaaagtcaataggccgcgttatctggctgaggttggggctttgattaaatatttaatttacctgcagagttgatttagacagaaagcgtctgacttttacagacgaccatttttgtcaaaatgtttcgtagctcgaaagagatgttattctattatcagattcgactctaaattgactctaaaggcttaaggataaaggtataattttcaatctgcaaaggaatatgcaattttcgtgttttctccaataattatgatgctcctgttgatagtcaatttcaaagtttgtaccgataggctactggtttttgtttttgaaaatgtttctccttcctcttggctatgtcaatttgataaatgtttgccccttgtctgcgtggatgccacaaatatttgtgtttgtgtttgtttttcgtgagcagttgtgaaaaaagcgaaacggacacgggatcgccgggcatctcccggcatgactaaacaaatttatagcccactgggagcgcagacttcttcaaaatgccgccaatgttgctcaacttcctgtgcaaagtgtgtgcgttttggtgtgagtgtgtttgccttacaattggcacagcaaacggggaagacatcgtggtggtgtggaacgaagatggggaaggggttacggggcagacaagcgatttcattcatgaattcatatgtatcttatagatacaacgagctctgtcgcgagtacatgggctgcatcgatagtgcggcattgccataaatgagatttcagcctgtgcgatttcagtcgtcgggcttagggcaaataataaataaatatcggcggacagtcggatgcagctatgagatactctaagtcaaaacaaaaagtcgaatgatttgcggtgcacacatgcaaacacgtctcagcaagtaaaaatagatgaaagtgttttctttggaaatgcattttatttctggaggaattccgtaaacaaaatcccaaaatacgttaaattccatatgtatatagaataataatatttaactgtaaaaatcattttctatagcttaacaaaatctagaagatttgacaatcatggggaagtacacgttgggcgccatatgtttaccatgtaagtatgaggctaatacgtaaagttaagttgcttttgctactcttcatcagcaaacaagcttaatcacccattcgatataccctcaagtagatctcattggttgactaagtaattctcagcttcatttggtatgcatatcatgaatgaaaacgtcatccttttgaagacaacgtagacctcccagcagcagaaatgaaattttttccagagaagtaaataaacaaaagcaataataataataatcgcgttcggtaatttgcatactcgccaaaaaagagaagcaaacgcactgcgagccctcgccagcttcgttagacgattttaatgtcttaatatatttcgttaaattgagtcattaaaataaatcgccatcgacgatgatgatgacgacgacgacgaccacaaaagacgctgacgatgtcggcgccatcacgatcgatcgtttgccacaactttccagtggagttcaggatggggcagagtcaaaagcacgttacaaccgagccccgagagactttacgagaaataattgagatgcacacacacacacacacacacacactcacactaaagcggagaggcaaaaacaagaggaaaaccaactcgatggggaaacgagatggggcgggggaatgagggggaacaacaacagagcaagacacgccacgcggtcgccaaggaactgcaactgcaacaatgatgaagacatcaagctgtaaaaagcatcagcgaagcagcgagaaaacttgaggcggtccacacagaaaaactgagttttcctcaaaatgtttactgcacttccatctttgaaatatgttactaaccctaaggataaactatcgtaaagttcgcaagtttaactaggaaatcaattctgtctggaaatcaattcttacttttgccatgtaagcgttattatttgtaaacggttgtttctttttcagtgtagcacagtttggaagtcactgcgcgagcagagtcagcaacaacaaagcgcgtgcgtcagtaaaattttttccttggctcttttctttttttccgctttttgggccacccgcattcaatggcccgatcccaacccgaaaaacgatcactggctgcttcatttgcatgggtgggaataacagcagcaaactgaaatgcttttggcaacgaaaatggatataagactgcatgctgctctttttagagttcacaactatattggaaatattaccttctgaactataccttcaagatcaataaaaaaaaatctatataaatagtaatgaaaatatgtgcgcccttcatttattgacatttaattagactaaacgcttgctaatcaatctcatagtgcagagccaaaaagcaaattgtttcgaaattatatagattactcattacgtcacgcatgcttctaatcaatctgcgaagaattcccaaccgaagtcgccccacaactcgtatcacagagcatctgaggagcgttgactggggcggtggggcattggggcgatggaggggtggggcggctccgaaaagagcggctggaagggggtggccaatggcagtccagccagcagcatcacgtacgaaatgactctcgcggagacctcggcgcccacccatgttggaaggcaacacacaaccacacacacagatacgaacccacaccagcagaatgctgggcaagttgttgctggcgttgtttattatttttgctgcggctgccaaagctttctgctttttgccttttcggctgctttcgactgctggacggaactcctgctgctgctgctgcccagtttttgcctagctgtttttggcgctcgccgcagttgcagttgcagttgttattgttcggtttgcggtttcggaccagccgcgcacagtagcgccaaagtaatgaagttgtctgtggatatgtccgtctggagttggatcggtcggtttgggatcggcgaaacgagtacgaaagtcctgctgtgtgtctacgtctgcgcagcgaaaatagatgtggattgatggcggtgcacagagaataaatactaacaagattggtaaaacatccaatttgttgtagttttagactgcagcgaaagggttattccgtctacttttacggcgaatagtttcataaacaaatgtctatatttggaggtaaatcctccacgctttttatgtccagagaacgaaatagcaaaattagcatataagccgattggcgtggatttcaactaatcactgtaattaataggctgcctggcaagcgaacatcagacaactatattaaccagggaatcgaacgaaagaaaacgaaacgaatgaaatgaaatcgaaacgaccggcgaagaagacatcggcgacgaaaaaaacgcgaaaaatattgcgagagatattggcaataaaatttattgaaatctgtcccggcgacttaatggccgcattaaacaaaagccgctgctcttcggatttacagtcgaacttctacatcatggtttttagttaagtgtctcaatattctaatgacaagaattgtacaatataacaatttcaaattttaaaaagattgtaaatttacttaatacttcaaatcttttgcttaatttaaagtaaaagggattactaacaaaagtttcgaaagagccagattttccatttaaacttataaaggatcctccgaatacgattcaagaatattattgaattcaacacatggctatccttcacagtgaaagttcactgtagttgggcactcaccttatctatctgatcgagcgccacttgggcgtccacccagctggtgcgtatgtaaagatccgagaataatttctcatcgaccacatcgccgtgtgtgtccggaacgcgtgggaggctgtcgcggtccattatggttatgtttatagccagattccggacggaatcgcgtggcggagatgtgcagatgggagtgtgctgcggaatcggtctttctacagtgcctgccgttcgtctgcgtcctgagaactgagacttgggagacagtgtgcggattgttcgtggactttcggttcgattaattgttattggaatctcgtattttgtttggctgcattttgcactgcattccgcatttttatttttaattattttgtattttaaatcaagagacgctctctcccgcgctctctcgctcactcactgagcacgctgtgtatctgagctctcgttgtgttgttttgttgtgattgctggcttcgcttttgctgggttttttcgacgattaaaacgcggttttcgggttttatcttgggcacaatttctcaggggaatttgacagaattttcacagatcttttacacatggaaaagcggcagtcggacgactcacgtattcggttttctctctcgcctttcgctcttttacctttactttactttgcacttggcgacgcacacacacaaacactggctggttggctggcttttgttgttgcctggcatttaatccatgaacttcgcctcgcatccgtgaggtacaatatcttagcttttccacgagttctgtgatatctatcttgttagtataccacacacagagagtgccagtagtcggaaatacgaataacaagtcgtcgcgctccgcacttacaaccgtttcgttcgaggatcgcacgcagtctgagagatgtatctgtatctcgtggatgcggcacgccagccaggccaacaacttcattaggcgagcgcgcgccgctgtttctctctctcactctctcttgcccagcgggcgtctgtgtgcactgttttgcgcctgtgtgcgtgggcgacactcaacacacaacacagacgctctccctactctcactcgctctcttgtttcgtgtgcggccattttggtttgagaacgc

SEQ ID NO: 4067 - DNA, 3861 bp, DROSOPHILA
atggaccgcgacagcctcccacgcgttccggacacacacggcgatgtggtcgatgagaaattattctcggatctttacatacgcaccagctgggtggacgcccaagtggcgctcgatcagatagataagggcaaagcgcgtggcagccgcacggcgatctatctgcgatcagtattccagtcccacctcgaaaccctcggcagctccgtgcaaaagcacgcgggcaaggtgctattcgtggctatcctggtgctgagcaccttctgcgtcggcctgaagagcgcccagatccactccaaggtgcaccagctgtggatccaggagggcggccggctggaggcggaactggcctacacacagaagacgatcggcgaggacgagtcggccacgcatcagctgctcattcagacgacccacgacccgaacgcctccgtcctgcatccgcaggcgctgcttgcccacctggaggtcctggtcaaggccaccgccgtcaaggtgcacctctacgacaccgaatgggggctgcgcgacatgtgcaacatgccgagcacgccctccttcgagggcatctactacatcgagcagatcctgcgccacctcattccgtgctcgatcatcacgccgctggactgtttctgggagggaagccagctgttgggtccggaatcagcggtcgttataccaggcctcaaccaacgactcctgtggaccacactgaatcccgcctctgtgatgcagtatatgaagcagaagatgtccgaggaaaagatcagcttcgacttcgagaccgtggagcagtacatgaagcgtgcggccattggcagtggctacatggagaagccctgcctgaacccactgaatcccaattgcccggacacggcaccgaacaagaacagcacccagccgccggatgtgggagccatcctgtccggaggctgctacggttatgccgcgaagcatatgcactggccggaggaactgattgtgggcggagcgaagaggaaccgcagcggacacttgaggaaggcccaggccctgcagtcggtggtgcagctgatgaccgagaaggaaatgtacgaccagtggcaggacaactacaaggtgcaccatcttggatggacgcaggagaaggcagcggaggttttgaacgcctggcagcgcaacttttcgcgggaggtggaacagctgctacgtaaacagtcgagaattgccaccaactacgatatctacgtgttcagctcggctgcactggatgacatcctggccaagttctcccatcccagcgccttgtccattgtcatcggcgtggccgtcaccgttttgtatgccttctgcacgctcctccgctggagggaccccgtccgtggacagagcagtgtcggcgtggccggagttctgctcatgtgctttagtaccgccgccggattgggattgtcagccctgctcggtatcgttttcaatgccgccagcacccaggtggttccgtttttggcccttggtctgggcgtcgatcacatcttcatgctgaccgctgcctatgcggagagcaatcggcgggagcagaccaagctgattctcaagaaagtgggaccgagcatcctgttcagtgcctgcagcacggcaggatccttctttgcggccgcctttattccggtgccggctttgaaggtattctgtctgcaggctgccatcgtaatgtgctccaatttggcagcggctctattggtttttccggccatgatttcgttggatctacggagacgtaccgccggcagggcggacatcttctgctgctgttttccggtgtggaaggaacagccgaaggtggcaccaccggtgctgccgctgaacaacaacaacgggcgcggggcccggcatccgaagagctgcaacaacaacagggtgccgctgcccgcccagaatcctctgctggaacagagggcagacatccctgggagcagtcactcactggcgtccttctctctggcaaccttcgcctttcagcactacactcccttcctcatgcgcagctgggtgaagttcctgaccgttatgggtttcctggcggccctcatatccagcttgtatgcctccacgcgccttcaggatggcctggacattattgatctggtgcccaaggacagcaacgagcacaagttcctggatgctcaaactcggctctttggcttctacagcatgtatgcggttacccagggcaactttgaatatcccacccagcagcagttgctcagggactaccatgattcctttgtgcgggtgccacatgtgatcaagaatgataatggtggactgccggacttctggctgctgctcttcagcgagtggctgggtaatctgcaaaagatattcgacgaggaataccgcgacggacggctgaccaaggagtgctggttcccaaacgccagcagcgatgccatcctggcctacaagctaatcgtgcaaaccggccatgtggacaaccccgtggacaaggaactggtgctcaccaatcgcctggtcaacagcgatggcatcatcaaccaacgcgccttctacaactatctgtcggcatgggccaccaacgacgtcttcgcctacggagcttctcagggcaaattgtatccggaaccgcgccagtattttcaccaacccaacgagtacgatcttaagatacccaagagtctgccattggtctacgctcagatgcccttttacctccacggactaacagatacctcgcagatcaagaccctgataggtcatattcgcgacctgagcgtcaagtacgagggcttcggcctgcccaactatccatcgggcattcccttcatcttctgggagcagtacatgaccctgcgctcctcactggccatgatcctggcctgcgtgctactcgccgccctggtgctggtctccctgctcctgctctccgtttgggccgccgttctcgtgatcctcagcgttctggcctcgctggcccagatctttggggccatgactctgctgggcatcaaactctcggccattccggcagtcatactcatcctcagcgtgggcatgatgctgtgcttcaatgtgctgatatcactgggcttcatgacatccgttggcaaccgacagcgccgcgtccagctgagcatgcagatgtccctgggaccacttgtccacggcatgctgacctccggagtggccgtgttcatgctctccacgtcgccctttgagtttgtgatccggcacttctgctggcttctgctggtggtcttatgcgttggcgcctgcaacagccttttggtgttccccatcctactgagcatggtgggaccggaggcggagctggtgccgctggagcatccagaccgcatatccacgccctctccgctgcccgtgcgcagcagcaagagatcgggcaaatcctatgtggtgcagggatcgcgatcctcgcgaggcagctgccagaagtcgcatcaccaccaccacaaagaccttaatgatccatcgctgacgacgatcaccgaggagccgcagtcgtggaagtccagcaactcgtccatccagatgcccaatgattggacctaccagccgcgggaacagcgacccgcctcctacgcggccccgccccccgcctatcacaaggccgccgcccagcagcaccaccagcatcagggcccgcccacaacgcccccgcctcccttcccgacggcctatccgccggagctgcagagcatcgtggtgcagccggaggtgacggtggagacgacgcactcggacagcaacaccaccaaggtgacggccacggccaacatcaaggtggagctggccatgcccggcagggcggtgcgcagctataactttacgagttag

SEQ ID NO: 4068 - protein, 1286 aa, DROSOPHILA
MDRDSLPRVPDTHGDVVDEKLFSDLYIRTSWVDAQVALDQIDKGKARGSRTAIYLRSVFQSHLETLGSSVQKHAGKVLFVAILVLSTFCVGLKSAQIHSKVHQLWIQEGGRLEAELAYTQKTIGEDESATHQLLIQTTHDPNASVLHPQALLAHLEVLVKATAVKVHLYDTEWGLRDMCNMPSTPSFEGIYYIEQILRHLIPCSIITPLDCFWEGSQLLGPESAVVIPGLNQRLLWTTLNPASVMQYMKQKMSEEKISFDFETVEQYMKRAAIGSGYMEKPCLNPLNPNCPDTAPNKNSTQPPDVGAILSGGCYGYAAKHMHWPEELIVGGAKRNRSGHLRKAQALQSVVQLMTEKEMYDQWQDNYKVHHLGWTQEKAAEVLNAWQRNFSREVEQLLRKQSRIATNYDIYVFSSAALDDILAKFSHPSALSIVIGVAVTVLYAFCTLLRWRDPVRGQSSVGVAGVLLMCFSTAAGLGLSALLGIVFNAASTQVVPFLALGLGVDHIFMLTAAYAESNRREQTKLILKKVGPSILFSACSTAGSFFAAAFIPVPALKVFCLQAAIVMCSNLAAALLVFPAMISLDLRRRTAGRADIFCCCFPVWKEQPKVAPPVLPLNNNNGRGARHPKSCNNNRVPLPAQNPLLEQRADIPGSSHSLASFSLATFAFQHYTPFLMRSWVKFLTVMGFLAALISSLYASTRLQDGLDIIDLVPKDSNEHKFLDAQTRLFGFYSMYAVTQGNFEYPTQQQLLRDYHDSFVRVPHVIKNDNGGLPDFWLLLFSEWLGNLQKIFDEEYRDGRLTKECWFPNASSDAILAYKLIVQTGHVDNPVDKELVLTNRLVNSDGIINQRAFYNYLSAWATNDVFAYGASQGKLYPEPRQYFHQPNEYDLKIPKSLPLVYAQMPFYLHGLTDTSQIKTLIGHIRDLSVKYEGFGLPNYPSGIPFIFWEQYMTLRSSLAMILACVLLAALVLVSLLLLSVWAAVLVILSVLASLAQIFGAMTLLGIKLSAIPAVILILSVGMMLCFNVLISLGFMTSVGNRQRRVQLSMQMSLGPLVHGMLTSGVAVFMLSTSPFEFVIRHFCWLLLVVLCVGACNSLLVFPILLSMVGPEAELVPLEHPDRISTPSPLPVRSSKRSGKSYVVQGSRSSRGSCQKSHHHHHKDLNDPSLTTITEEPQSWKSSNSSIQMPNDWTYQPREQRPASYAAPPPAYHKAAAQQHHQHQGPPTTPPPPFPTAYPPELQSIVVQPEVTVETTHSDSNTTKVTATANIKVELAMPGRAVRSYNFTS

SEQ ID NO: 4069 - DNA, 3132 bp, DROSOPHILA
taaaaaattagttgttagtttatacaccgcgcataaacaacctaactagagcatgcataaagtgattaaacatattatggaataaagccgattcattacaaatgaaaaaccaaaatgtgactaggttcgtttaaatttctggctatatatctattagcctgactcaacttcaaaaaatattaaaaataaaccaattagtttatggattcaaccagattttatttgcaatcttttaatggggcgtttaataattttgatagagcaaatcctttttttaagtgtagtggtatgttaatactaaacagacatttttttttggtattttaatgcggctaagcaaaacgcgttagcttatttttcacaacatattgttttggctagatctataaacaaaacaataataatgtcgctggtggcagattatagcgactcctccgaatccgatgaagacagcagtggccaattttccgaagacggggaaacaaagaggtgaccttccttatcgcctgctgtatgacataggattccaattcttgtgcatttccagtgcggcaccagccaaaaatgagaagactcctcctcccaagttgcccagtgctagccaagctttttcccaaggagctggaaagggagatgtgtttaacaatcccttcctggaggccgagctgcataaaaccgcgtcgctggagcggcacgtgaagatggtcgacaacgacgcgcaccaaaagttgaagaatggccgtaagatttgctggaactttagaaggggacgctgccgctttggcaccagttgccagtatgctcacgattccgacttgtcggtggatgaggcggcggagaagagtgcattaccggatcaatcagtgcctgtggtcgtagaagctgcaccgggtaatttcaacaggcgtaagcgcccgggtctgggcgatgctctggagccgggcaaacgggttatgaagtcctacaaacagcaaaatccgcaaaatccatttgcccggcgttagaccacgcctgcatccgtgatgcgcagcagacagtgctcaccatcagggccatatgtgttcgagatgacgtaaatgaaacgcaggccatcgtcctggagggtgaagtcctcttcctctggaagctccaccgacaatctgagcgtggcaaccgagctccagtaggatcccaacatgggctccaactgctgtcgtgtcacttcctcatcgtcgccattttgctctccatcatcaccacaactatctattaagataaagttgtaaatagttttaattccgtaatttacaagtgaaactagcacatacctttattgttttcaaagaatgacacattcccaatgacaaaagccacgcccctgagagctagtttccggatcttgcaagccaattctgtcagcactgactttctgacgtcccgcatcctacggccgcgatagaaagcgaagcaagcggcaagcgaatcaataaggaccaacttcgtttgcatggaagcatgtgtttcagcggtcaattgatgatcaaaggattttagcagatcatttatatcagcaccagtggcagcctgcaccacccggattcctttcatggccctttcactggcttcttcatccacttccctggcccgaagcatgtcctgtattctcttacaggagaattcccgcttggtgtctatgaataatactgcctggctatgcttccagacgaaatttagggccaacgtgtacaacagctgggtcttgcctacgcctggttgaccacagagttcccagactctgcctggcttaaagggctgctctacggagtccaacagtttgtccaacctggtgtgtggtctgagctataaaatccgaagtcctggtacaatcataaaaagacttactcttcgattcctgtatcgtaattgaagtccggagtgccttcatcaactgaaccttttggcaacagagacaattccttcttcaattcccgaacagattgtatgtttatggcccatagctcgtggagtttcttctcatccgcatcataaaagtcgatcaaggagcatatgttgttcttacggagtaaatttaattggtattcggatagcaatcttcccgtgcatgtttgcaaaatcataggcctgaggtccattttgggcgcctttatttatttatattcttttcaacaacgtatcgatatcgaactatcgtcgatgatagtttgtccacattataaataatcgataacagtgcggctaaatttaaatttcaccaatcaggaaaataaattgaaatgcatttcaaaaattacgaaaatatgtttaatgttttaaatcttatatttttaaccatatgtacttgccaaagaaactacataaaggtaaagaaatttcaaattagagtagttttgtgtactaattaaagagtcgatcatttattaactaaactaagttggcactcgattcacaacatgcatattaatgagtgtttatctattgttttgcagccacaactcagctcttacattagatacggcacgttgtgccaataaaaaaaagtccctaagaggaaatgctcagtacgaaactgactcacgtgtggggatcacaaaaaaactacagtgttccctcgatatcaacaatttaaattggtcatgcaatataaacgaaagtttctgaataacaccagttggtacgctaaggataaaataggaaattgtaataaataaaaagttaataatttattacggaactacttttgctcttttacgataagaggcttcacaataggagagcatacttcatactgcatgtacatatgccttctgagtgagagctcccacacatacataagtgtatcccgtctctttatctgaaatcttgtcgcctctcgttaaaggcaatgaatccatttcaagactcagttgagttacagagatgaacgaagaacctcacgcccacgaaaatttggttgccaaagctcagagatccggcgatgcggatccggaagttgccagcacagctagcgagaagcagcgcagttccggtgcgtcagctattgcagttggtacagaatttccaggcaatcctcaggcttcaagaccccaatcactgggcatgtatctactcgaaccatttattttaatcctgctg

SEQ ID NO: 4070 - DNA, 960 bp, DROSOPHILA
atggacctcaggcctatgattttgcaaacatgcacgggaagattgctatccgaataccaattaaatttactccgtaagaacaacatatgctccttgatcgacttttatgatgcggatgagaagaaactccacgagctatgggccataaacatacaatctgttcgggaattgaagaaggaattgtctctgttgccaaaaggttcagttgatgaaggcactccggacttcaattacgatacaggaatcgaagaagcagccctttaagccaggcagagtctgggaactctgtggtcaaccaggcgtaggcaagacccagctgttgtacacgttggccctaaatttcgtctggaagcatagccaggcagtattattcatagacaccaagcgggaattctcctgtaagagaatacaggacatgcttcgggccagggaagtggatgaagaagccagtgaaagggccatgaaaggaatccgggtggtgcaggctgccactggtgctgatataaatgatctgctaaaatcctttgatcatcaattgaccgctgaaacacatgcttccatgcaaacgaagttggtccttattgattcgcttgccgcttgcttcgctttctatcgcggccgtaggatgcgggacgtcagaaagtcagtgctgacagaattggcttgcaagatccggaaactagctctcaggggcgtggcttttgtcattgggaatatagttgtggtgatgatggagagcaaaatggcgacgatgaggaagtgacacgacagcagttggagcccatgttgggatcctactggagctcggttgccacgctcagattgtcggtggagcttccagaggaagaggacttcaccctccaggacgatggcctgcgtttcatttacgtcatctcgaacacatatggccctgatggtgagcactgtctgctgcgcatcacggatgcaggcgtggtctaa

SEQ ID NO: 4071 - protein, 184 aa, DROSOPHILA
MKALRTSITIQESKKQPFKPGRVWELCGQPGVGKTQLLYTLALNFVWKHSQAVLFIDTKREFSCKRIQDMLRAREVDEEASERAMKGIRVVQAATGADINDLLKSFDHQLTAETHASMQTKLVLIDSLAACFAFYRGRRMRDVRKSVLTELACKIRKLALRGVAFVIGNIVVVMMESKMATMRK

SEQ ID NO: 4072 - DNA, 4089 bp, DROSOPHILA
accatgtgatcttccagcaatgcagccaactgctcggcaaactccacttgggacaccgtcttcagggagggtttcgccacactgtgaaaaaaggaggaaggcactcgttacactcacattcaactggtgcaggcgctcacccacctgttggctccccacaaaaagacgggcgtttgctccgccacggcagccccaatgacgcacaacgcaatcagcgatttccacaacatcgcgctggattcgcttacttcggtgggggtttaatggaaacaaaggagaacgaaaaatgcataagtaaggaaccaaggagaacgcaagaggcactaaaaaccaaccgaaaagtgaactgaaactacaaacgaaaaatggtggtgaaaattttcgctttgccttgctcgacgtcgcctattccagtgagaaaaaaaaccttatgacggtcatgtgatgcgcaccagctgaccgcagtgctgtctaaaaataccaaaagcgtgagattaggaaaatactagaaaaaaattattcgactctgagagcatttagtaaagcctaattggatatttgcaccaggaactgacattaactgggtttcttttcaaaattaatacttataagaaagtatagtttgtcaaataaggttcatatcttcggtgtccaattagcgcagtcacacacctttccagctggaaactgtcaacggaaccggttccgttaattccacatgttgattctttaaaacccgtatgttctatttcgcactgcttactaatagtttaattaaatatctaaagaaattcgggttttatactgattgcttttataagctcgatttgaaccgagtttttatttcagtctttccagttagtaattttacgcagttctagcacggccacactgtcccgcaggaaaacaatgtttgttatgattttactgcgggaattgtgtgtgaaatgtgccatttgaggacctgagaatgcgattacgccgccgttggccgcgaaggatgcggcgtgccatggaacaactgcgtctccagtcccgccggaagctgctggcgctcacgagtgagttaccttgctcaccagccccattacttaactaatgttctttttttttcaattttagtgactggaggactctgcctggctatctgggtagttgccaactatctgtccgcatcggaggagggccaaaccggcggcttcagcagcgcctgcactgccatcgatgcggtttacacgtgggtcaatggctcggatcccaactttattgaggacatccggcgattcgatgacaagtacgatccctcgcggttcgatgacaagaatgagctgcggtactctctgaggtccctggaaaaacacgccgcatggatcaggcatgtgtacatagtaaccaatggccagattccaagttggctggatctcagctacgaaagggtcacggtggtgccccacgaagtcctggctcccgatcccgaccagctgcccaccttctccagctcggccatcgagacatttctgcaccgcataccaaagctgtccaagaggttcctctacctcaacgacgacatattcctgggagctccgctgtatccggaggacttgtacactgaagcggagggagttcgcgtgtaccaggcatggatggtgcccggctgcgccttggattgcccctggacgtacataggtgatggagcttgcgatcggcactgcaacattgatgcgtgccaatttgatggaggcgactgcagtgaaactgggccagcgagcgatgcccacgtcattccaccaagcaaagaagtgctcgaggtgcagcctgccgctgttccacaatcaagagtccaccgatttcctcagatgggtctccaaaagctgttcaggcgcagctctgccaattttaaggatgttatgcggcaccgcaatgtgtccacactcaaggaactacgtcgcattgtggagcgttttaacaaggccaaactcatgtcgctgaaccccgaactggagacctccagctccgagccacagacaactcagcgccacgggctgcgcaaggaggattttaagtcttccaccgatatttactctcactcgctgattgccaccaatatgttgctgaatagagcctatggctttaaggcacgccatgtcctggcgcacgtgggcttcctaattgacaaggatattgtggaggccatgcagcgacgttttcaccagcaaattctggacactgcccatcagcgcttccgagccccaacagatttgcagtacgcattcgcttactactccttcctaatgagcgaaaccaaagtaatgagtgtagaggaaatcttcgatgagttcgacacggacggttcggccacctggtcggatcgagaggtgcgaacctttctcactcgcatctatcagccgccacttgactggtctgccatgcgctacttcgaggaggtggttcaaaactgcacaagaaatctgggcatgcatttaaaagtggacacagtcgaacactccacgctggtctacgagcgatacgaggactctaatttggttagtacttatgattatatcttacagatttatattaattgctgactgctcttttagcctacaataaccagggatttggttgtccgatgtccacttctggccgaagctttggcggcaaactttgcagtccgacccaaatataacttccatgtcagcccaaaaagaacttcgcacagcaattttatgatgctcacatcgaatctcacggaggtggtggagtcactggaccgattgcgtcggaatccgcgcaagtttaactgcatcaacgacaatctggatgccaatagaggcgaagacaacgagatggtgcgccatctgctcgaggacttttacctctccttctttccgagacgcagcaagttcgagctgccgccgcaatatcgtaatcggttcgagtcctggcgggactttcagcgctggaagagaagaaagcgggcggttctcgtgattggatatggagtgagtctgctgcttgtggtctgtctgctgcgattcatgtgccaccacaaggcgaagctggtgaggcgctgtgtgcagcgcttgtaggatcgatttcgtgaagttctctcccttctgcaatgttgtgatatgttgtgaacatttatgtaaattggccatttctgcaagcgatcatagtcaaatctagttgtaggccatgtgtaaggctatttttctagttctttaggtgcatgctagaggctacgtttagaaatagtcattaagaatggatgcgtagtgaaattttttagaatattttgtggtccagcttttgcagtcgacctgttttgtgttcagtttcataatatctaagtttctatattactatttctaagtttggctttacaatgatatttgctcaccttaaaagtactgaactgaaatattctaaatacctagtttaattttgtttacaaaatacgtaactcgaacatacacaatgtacacatattgatataatggagtacgccttaaatgatatttatacattttgctagtgaatgttcttcattctaaacaaaataaaccatttctattgatttccaatgctctagaaactgcgaacatttattaaattagttttttttattatgttcactggctggctgctgtccaaactacagattgctgtcagcacttagcaccagttccggatttcagattccccggcgcgtcgatgattaccgcagaatttgaccgcccgctgagcggtgggcgttgccgaacaattcactggtggctctcgagcactctaactacgtcatcacattttcgcccggttttttacgcttgcggccaggggacagtgggtggttagtaattacggccgtgggtggctacccacgtccgagttcgccgattcgtctctggaattatggccacaaaaaacccagactccgcactttgcggcccggaagccggtgggcggaactggagcgagtccagacagactgacacgggtctccttggtccccttttcggggggcgtggcacgagcttgggcaatagctccccagcgtcgtgtacatatgatgatgatttgctcttt

SEQ ID NO: 4073 - DNA, 1971 bp, DROSOPHILA
atgcggcgtgccatggaacaactgcgtctccagtcccgccggaagctgctggcgctcacgatgactggaggactctgcctggctatctgggtagttgccaactatctgtccgcatcggaggagggccaaaccggcggcttcagcagcgcctgcactgccatcgatgcggtttacacgtgggtcaatggctcggatcccaactttattgaggacatccggcgattcgatgacaagtacgatccctcgcggttcgatgacaagaatgagctgcggtactctctgaggtccctggaaaaacacgccgcatggatcaggcatgtgtacatagtaaccaatggccagattccaagttggctggatctcagctacgaaagggtcacggtggtgccccacgaagtcctggctcccgatcccgaccagctgcccaccttctccagctcggccatcgagacatttctgcaccgcataccaaagctgtccaagaggttcctctacctcaacgacgacatattcctgggagctccgctgtatccggaggacttgtacactgaagcggagggagttcgcgtgtaccaggcatggatggtgcccggctgcgccttggattgcccctggacgtacataggtgatggagcttgcgatcggcactgcaacattgatgcgtgccaatttgatggaggcgactgcagtgaaactgggccagcgagcgatgcccacgtcattccaccaagcaaagaagtgctcgaggtgcagcctgccgctgttccacaatcaagagtccaccgatttcctcagatgggtctccaaaagctgttcaggcgcagctctgccaattttaaggatgttatgcggcaccgcaatgtgtccacactcaaggaactacgtcgcattgtggagcgttttaacaaggccaaactcatgtcgctgaaccccgaactggagacctccagctccgagccacagacaactcagcgccacgggctgcgcaaggaggattttaagtcttccaccgatatttactctcactcgctgattgccaccaatatgttgctgaatagagcctatggctttaaggcacgccatgtcctggcgcacgtgggcttcctaattgacaaggatattgtggaggccatgcagcgacgttttcaccagcaaattctggacactgcccatcagcgcttccgagccccaacagatttgcagtacgcattcgcttactactccttcctaatgagcgaaaccaaagtaatgagtgtagaggaaatcttcgatgagttcgacacggacggttcggccacctggtcggatcgagaggtgcgaacctttctcactcgcatctatcagccgccacttgactggtctgccatgcgctacttcgaggaggtggttcaaaactgcacaagaaatctgggcatgcatttaaaagtggacacagtcgaacactccacgctggtctacgagcgatacgaggactctaatttgcctacaataaccagggatttggttgtccgatgtccacttctggccgaagctttggcggcaaactttgcagtccgacccaaatataacttccatgtcagcccaaaaagaacttcgcacagcaattttatgatgctcacatcgaatctcacggaggtggtggagtcactggaccgattgcgtcggaatccgcgcaagtttaactgcatcaacgacaatctggatgccaatagaggcgaagacaacgagatggtgcgccatctgctcgaggacttttacctctccttctttccgagacgcagcaagttcgagctgccgccgcaatatcgtaatcggttcgagtcctggcgggactttcagcgctggaagagaagaaagcgggcggttctcgtgattggatatggagtgagtctgctgcttgtggtctgtctgctgcgattcatgtgccaccacaaggcgaagctggtgaggcgctgtgtgcagcgcttgtag

SEQ ID NO: 4074 - protein, 652 aa, DROSOPHILA
MEQLRLQSRRKLLALTMTGGLCLAIWVVANYLSASEEGQTGGFSSACTAIDAVYTWVNGSDPNFIEDIRRFDDKYDPSRFDDKNELRYSLRSLEKHAAWIRHVYIVTNGQIPSWLDLSYERVTVVPHEVLAPDPDQLPTFSSSAIETFLHRIPKLSKRFLYLNDDIFLGAPLYPEDLYTEAEGVRVYQAWMVPGCALDCPWTYIGDGACDRHCNIDACQFDGGDCSETGPASDAHVIPPSKEVLEVQPAAVPQSRVHRFPQMGLQKLFRRSSANFKDVMRHRNVSTLKELRRIVERFNKAKLMSLNPELETSSSEPQTTQRHGLRKEDFKSSTDIYSHSLIATNMLLNRAYGFKARHVLAHVGFLIDKDIVEAMQRRFHQQILDTAHQRFRAPTDLQYAFAYYSFLMSETKVMSVEEIFDEFDTDGSATWSDREVRTFLTRIYQPPLDWSAMRYFEEVVQNCTRNLGMHLKVDTVEHSTLVYERYEDSNLPTITRDLVVRCPLLAEALAANFAVRPKYNFHVSPKRTSHSNFMMLTSNLTEVVESLDRLRRNPRKFNCINDNLDANRGEDNEMVRHLLEDFYLSFFPRRSKFELPPQYRNRFESWRDFQRWKRRKRAVLVIGYGVSLLLVVCLLRFMCHHKAKLVRRCVQRL

SEQ ID NO: 4075 - DNA, 2925 bp, DROSOPHILA
caatccatcggcggttaaggcacaaattgtggcggctctcaaaggcatgacgcacaatctcaattacggcgatcgggtgacgcaaattctgctcaaacaccccgtgtgggccgagttcaaggatcagcgacacgatcttttcatcgccgatactacaatacgtggctatctgaccggtaggtggatgattcttatagtactgcctcatatgtatatataactttatccttttgaaggagtcaatccaacggctgggtacctgacagcgggtcctgcgcaaagcgtagaagttctcacctcaccgccacccatcgatcgcgatgatccttcggcccgtccacccatcgactagcgacgtgttatccgccggaccaaggctaaagcttagtctggtattcaaggtaacgctagcatgaagccttcgattgccacggaatcagaaaacggaaacggaattgcacgggttgcccccaattattgtattaaactttattttattttgtacactcgcagccaattgtacgtatcgtgaaaaaggctggtacggtaatcgttagccagcatattattaatatgtaacaaagtttcattttttatatttataagaaaaccaactgtataaaaaattagttgttagtttatacaccgcgcataaacaacctaactagagcatgcataaagtgattaaacatattatggaataaagccgattcattacaaatgaaaaaccaaaatgtgactaggttcgtttaaatttctggctatatatctattagcctgactcaacttcaaaaaatattaaaaataaaccaattagtttatggattcaaccagattttatttgcaatcttttaatggggcgtttaataattttgatagagcaaatcctttttttaagtgtagtggtatgttaatactaaacagacatttttttttggtattttaatgcggctaagcaaaacgcgttagcttatttttcacaacatattgttttggctagatctataaacaaaacaataataatgtcgctggtggcagattatagcgactcctccgaatccgatgaagacagcagtggccaattttccgaagacggggaaacaaagaggtgaccttccttatcgcctgctgtatgacataggattccaattcttgtgcatttccagtgcggcaccagccaaaaatgagaagactcctcctcccaagttgcccagtgctagccaagctttttcccaaggagctggaaagggagatgtgtttaacaatcccttcctggaggccgagctgcataaaaccgcgtcgctggagcggcacgtgaagatggtcgacaacgacgcgcaccaaaagttgaagaatggccgtaagatttgctggaactttagaaggggacgctgccgctttggcaccagttgccagtatgctcacgattccgacttgtcggtggatgaggcggcggagaagagtgcattaccggatcaatcagtgcctgtggtcgtagaagctgcaccgggtaatttcaacaggcgtaagcgcccgggtctgggcgatgctctggagccgggcaaacgggttatgaagtcctacaaacagcaaaatccgcaaaatccatttgcccggcgttagaccacgcctgcatccgtgatgcgcagcagacagtgctcaccatcagggccatatgtgttcgagatgacgtaaatgaaacgcaggccatcgtcctggagggtgaagtcctcttcctctggaagctccaccgacaatctgagcgtggcaaccgagctccagtaggatcccaacatgggctccaactgctgtcgtgtcacttcctcatcgtcgccattttgctctccatcatcaccacaactatctattaagataaagttgtaaatagttttaattccgtaatttacaagtgaaactagcacatacctttattgttttcaaagaatgacacattcccaatgacaaaagccacgcccctgagagctagtttccggatcttgcaagccaattctgtcagcactgactttctgacgtcccgcatcctacggccgcgatagaaagcgaagcaagcggcaagcgaatcaataaggaccaacttcgtttgcatggaagcatgtgtttcagcggtcaattgatgatcaaaggattttagcagatcatttatatcagcaccagtggcagcctgcaccacccggattcctttcatggccctttcactggcttcttcatccacttccctggcccgaagcatgtcctgtattctcttacaggagaattcccgcttggtgtctatgaataatactgcctggctatgcttccagacgaaatttagggccaacgtgtacaacagctgggtcttgcctacgcctggttgaccacagagttcccagactctgcctggcttaaagggctgctctacggagtccaacagtttgtccaacctggtgtgtggtctgagctataaaatccgaagtcctggtacaatcataaaaagacttactcttcgattcctgtatcgtaattgaagtccggagtgccttcatcaactgaaccttttggcaacagagacaattccttcttcaattcccgaacagattgtatgtttatggcccatagctcgtggagtttcttctcatccgcatcataaaagtcgatcaaggagcatatgttgttcttacggagtaaatttaattggtattcggatagcaatcttcccgtgcatgtttgcaaaatcataggcctgaggtccattttgggcgcctttatttatttatattcttttcaacaacgtatcgatatcgaactatcgtcgatgatagtttgtccacattataaataatcgataacagtgcggctaaatttaaatttcaccaatcaggaaaataaattgaaatgcatttcaaaaattacgaaaatatgtttaat

SEQ ID NO: 4076 - DNA, 867 bp, DROSOPHILA
atctataaacaaaacaataataatgtcgctggtggcagattatagcgactcctccgaatccgatgaagacagcagtggccaattttccgaagacggggaaacaaagagtgcggcaccagccaaaaatgagaagactcctcctcccaagttgcccagtgctagccaagctttttcccaaggagctggaaagggagatgtgtttaacaatcccttcctggaggccgagctgcataaaaccgcgtcgctggagcggcacgtgaagatggtcgacaacgacgcgcaccaaaagttgaagaatggccgtaagatttgctggaactttagaaggggacgctgccgctttggcaccagttgccagtatgctcacgattccgacttgtcggtggatgaggcggcggagaagagtgcattaccggatcaatcagtgcctgtggtcgtagaagctgcaccgggtaatttcaacaggcgtaagcgcccgggtctgggcgatgctctggagccgggcaaacgggttatgaagtcctacaaacagcaaaatccgcaaaatccatttgcccggcgttagaccacgcctgcatccgtgatgcgcagcagacagtgctcaccatcagggccatatgtgttcgagatgacgtaaatgaaacgcaggccatcgtcctggagggtgaagtcctcttcctctggaagctccaccgacaatctgagcgtggcaaccgagctccagtaggatcccaacatgggctccaactgctgtcgtgtcacttcctcatcgtcgccattttgctctccatcatcaccacaactatctattaagataaagttgtaaatagttttaattccgtaatttacaagtgaaactagcacata

SEQ ID NO: 4077 - protein, 180 aa, DROSOPHILA
MSLVADYSDSSESDEDSSGQFSEDGETKSAAPAKNEKTPPPKLPSASQAFSQGAGKGDVFNNPFLEAELHKTASLERHVKMVDNDAHQKLKNGRKICWNFRRGRCRFGTSCQYAHDSDLSVDEAAEKSALPDQSVPVVVEAAPGNFNRRKRPGLGDALEPGKRVMKSYKQQNPQNPFARR

SEQ ID NO: 4078 - DNA, 3853 bp, DROSOPHILA
cgtgggttggtggtcaacggcgagattctcgacatctacagctacatgtcggtgcatctgtcggagattatcaaggactgcaagccatcctgcgtcccatcgccctgtcgcaatggcgcccagtgcaaggagctctggagcagctttaagtgcgtctgcaacaatccctgggcacatatcggcgaattctgcgagacaagtgagtgaattatatgtagttccttcattgaaatactggaatcctatgtacccaaagtatattaacagcttaaacttgatttaaagtaatataatagttcagactacttttaagtgcttattttacttatgttcataaatcaaatcacctttctttgcagacatcaacgaaaaggctcttaccttcatcaaccgtgaatcctttctgatgcgaaattatctgagtgtgggtgccacacctgttatcctaatgcacggtataaatggcgaacgggatgtcctaaagggaatccttaaccaagatctactgatcaatttacgaacttacgacacgaatgccctggtgctttatgccaacgatcattataataactttgtgcacctctacattagtctgaaccgggagattgtttttctttacaattacggtgatgaaattgtaaatcttacgctgctagatgacaccttaatggcgtctttaaaaagcattcaagtggccatcgtgcgaggagagcaggaaactaggatgcatgtgaacgagcacagtgtgagcatcgataggggaactctgctccttgatgagtatgccaacaagccttggagtaatccggaaaaaggtaagtccgcaaaatatattatatatattatttattttacttttgctcctttcgtataatgttatttaacaacaactattgagtccaagtgctattcgtttattttcatacatttttcttagcacttcactgaaccagttaatatatagtatcgaatgacccaaccctccccaaatctactttcgtcacttccatcggctgcccattttggatgttttactatgagtgttgctgctgctattttggtgttgttcatcctgggcggccaactcctcatcgatgagcagctcaaagttgcccaaagcatcggcactgggaaccttattccaacgcacatcgggcactccatcggggggtaggaccacggacagtatgttgtcaatcagtttgtattttagtatcctgtcgtttactgtagttgatgtgagtgacggtgaggcattcacctccactagccaaggtttcaaggcattgtctatgatgatgtcgtagccataacactcaaaacaatgcctatcactggccatcacaggagccacagctcttaaggagtgtactataagccaggatatggctccaaacaaacgatccgtaacctcttttccccgagttccttccaaatagagggccagattttgtacagaccacttgccaccatgtagggtattgtattcgccaccatgtttctgcacactcacatttgtcagatggacgtacatattatccagttccgtaacactagtatcgtattttacagtacaaaaacggcagaatccctgcttaaaaagataagctttcaggggtctgaacgaagcgactagaacatatagacgaagatcaaattttttaccaccaatcaatagtggattgtctatgtatctggatatcacatacgattccttggctatttgtggatgaaaaggacccttggcctctcttgaccacttcttgagtttggatagtttgtttataaggaatatacccgctccttgggattttccacagggtttcataatccacgtactcagcggaaacttgcgatactcctccacgaacatattataatcggctggcaggacaaaagttgttggcacaaaatccaaataaagatatctggtgccactggagttattggactctgttttctccgccaatggattgccatccctctcgagatccttgcgataacgcttgatgttcttgaccagtaaatccttgcgtgataattcatagtgattgggaaaatgattgatcatctggttatcgtgcatcctataaccactatccacactgaatatattccggcaggtttgcactccggcccaatagaaatgccaatcatcatcgccattcacctgatgccagccacgtttctcgaaattgttgaccaaaaccgatttatccaggtccgtgcagaagccaattttcagtttatcgtgtccctgggcaccaccactggcaccaccgccgctatttgcgccactatttgagttgccattcgtcacggattgatttgcaccgaccgacgtgcgaccgtacatgattgtaccgctcgttgtggttcttgtaccgctcgagcggaccgtcggatgcagactgtcgatccgccacgcctgcgtccattgactcatgtcccaaacaacggccatgttgccaacgttccagtttattgaaccaacaaagccgaaatttattcaccacccttttttgccttcttgtggcgttaaaatgtggggcatggttgccaggcggcactccttttgtatttctatataaaattatttattttcgtttttgttttgttttttttttggtgtgggaaagtcgaaagaggcgaaaagcgctgcaccaaaattttcaaatagtttagcaagttgagctgcaaaaatgccaaaaatttaccccctcacaaaatctgtgcactgtgtgatggccaaattatgtgcacttgaattttttctcctcagcttttcaggggttcttttattttttcgctttattcggcaaatagtgtgtgtgtgtttgaaagtggacgttcagctcggtagaaaacggttggaaaaaaaacaaacgacatgcgaatgtataaagttttgctctatggcataaaaacaacgagttgctttgtagtttgttgatatttgaaagcgttcaaagtttttatttcgcttttgctcactcaatatgtaaattgaacggcatttcaatggtagatagtgtgcggaaattgttgttaaacgagggaaatgcatatagagttgattatgatctgaacggatttttttataatcctgtctgcatatgcaaattttttgacaaatacaaattttaaacaaatcggtatttgcatgttagcttgtttactggtttctgacattcaatacaggaattttcaggatctatatttgcaagtataacatgatgttattattattagtctcagagtattttaagtctgttattcttaatgctggttacctacatatatatgaaaactatatatattgctttgttatgaaacacacgaagcagccacatcattaaaatagagttaccattttcgaaagcccttccactcaaccggccttcaattacacgaattgctagcattttggcaacaatatttcactaggactgcacttcaaaagccgctcataactcaccttgaaattgaatttaattgaaaagttcagtgcacggagctcaactcggcaattggcaaaaggataaaatcaatcaaatcgttcgtaactcatttgccagcgatttgccggcaaacatttcaattagacaaacttaaactcgaaattgatgggcttaaacctcaaacggccgggcttggtcgaaccgggttcgaaaccggctctgcgtccgacagaccggctaaaacccgaaatgccacggcaatgaaggctcatttccgcacacacacacacaaacagaaatgcgcgccaacataaagcaatctgaaccaacaagtgcactgaaaaaaataagtcttataaatagaaaataataccttcacttagaattagcat

SEQ ID NO: 4079 - DNA, 1700 bp, DROSOPHILA
gaacgtccactttcaaacacacacacactatttgccgaataaagcgaaaaaataaaagaacccctgaaaagctgaggagaaaaaattcaagtgcacataatttggccatcacacagtgcacagattttgtgagggggtaaatttttggcatttttgcagctcaacttgctaaactatttgaaaattttggtgcagcgcttttcgcctctttcgactttcccacaccaaaaaaaaaaatggccgttgtttgggacatgagtcaatggacgcaggcgtggcggatcgacagtctgcatccgacggtccgctcgagcggtacaagaaccacaacgagcggtacaatcatgtacggtcgcacgtcggtcggtgcaaatcaatccgtgacgaatggcaactcaaatagtggcgcaaatagcggcggtggtgccagtggtggtgcccagggacacgataaactgaaaattggcttctgcacggacctggataaatcggttttggtcaacaatttcgagaaacgtggctggcatcaggtgaatggcgatgatgattggcatttctattgggccggagtgcaaacctgccggaatatattcagtgtggatagtggttataggatgcacgataaccagatgatcaatcattttcccaatcactatgaattatcacgcaaggatttactggtcaagaacatcaagcgttatcgcaaggatctcgagagggatggcaatccattggcggagaaaacagagtccaataactccagtggcaccagatatctttatttggattttgtgccaacaacttttgtcctgccagccgattataatatgttcgtggaggagtatcgcaagtttccgctgagtacgtggattatgaaaccctgtggaaaatcccaaggagcgggtatattccttataaacaaactatccaaactcaagaagtggtcaagagaggccaagggtccttttcatccacaaatagccaaggaatcgtatgtgatatccagatacatagacaatccactattgattggtggtaaaaaatttgatcttcgtctatatgttctagtcgcttcgttcagacccctgaaagcttatctttttaagcagggattctgccgtttttgtactgtaaaatacgatactagtgttacggaactggataatatgtacgtccatctgacaaatgtgagtgtgcagaaacatggtggcgaatacaataccctacatggtggcaagtggtctgtacaaaatctggccctctatttggaaggaactcggggaaaagaggttacggatcgtttgtttggagccatatcctggcttatagtacactccttaagagctgtggctcctgtgatggccagtgataggcattgttttgagtgttatggctacgacatcatcatagacaatgccttgaaaccttggctagtggaggtgaatgcctcaccgtcactcacatcaactacagtaaacgacaggatactaaaatacaaactgattgacaacatactgtccgtggtcctaccccccgatggagtgcccgatgtgcgttggaataaggttcccagtgccgatgctttgggcaactttgagctgctcatcgatgaggagttggccgcccaggatgaacaacaccaaaatagcagcagcaacactcatagtaaaacatccaaaatgggcagccgatggaagtga

SEQ ID NO: 4080 - protein, 487 aa, DROSOPHILA
MAVVWDMSQWTQAWRIDSLHPTVRSSGTRTTTSGTIMYGRTSVGANQSVTNGNSNSGANSGGGASGGAQGHDKLKIGFCTDLDKSVLVNNFEKRGWHQVNGDDDWHFYWAGVQTCRNIFSVDSGYRMHDNQMINHFPNHYELSRKDLLVKNIKRYRKDLERDGNPLAEKTESNNSSGTRYLYLDFVPTTFVLPADYNMFVEEYRKFPLSTWIMKPCGKSQGAGIFLINKLSKLKKWSREAKGPFHPQIAKESYVISRYIDNPLLIGGKKFDLRLYVLVASFRPLKAYLFKQGFCRFCTVKYDTSVTELDNMYVHLTNVSVQKHGGEYNTLHGGKWSVQNLALYLEGTRGKEVTDRLFGAISWLIVHSLRAVAPVMASDRHCFECYGYDIIIDNALKPWLVEVNASPSLTSTTVNDRILKYKLIDNILSVVLPPDGVPDVRWNKVPSADALGNFELLIDEELAAQDEQHQNSSSNTHSKTSKMGSRWK

SEQ ID NO: 4081 - DNA, 7204 bp, DROSOPHILA
tagctttaaagtttgttgagaaatcgacacgggttttcaagctgagctttataaattgagcttttgattaagctttacaccagactacaaatatctatattgcacataaaaatatccagatatttaccaactatgtatatttgatttttttgtttgcctttaaattacatacattaacataaatatacacgtgcaaatagattagggcatttatgttctggccatatctgcgattgcctttgatggaaaaggtgtatatattgtccattagggtacgcggaaaggaaactagttcagagctatatagaaatagaggcacaaagacattttttttatagtgagagaggcaaaatgaattgtcgacataaatttatgcaatcatttagattcgattctcatgcaaatccaatcaactgaaatcaaaatagaaataaaacaaaatctattgtttcaccaggcagcatatcttggccagtcgactgcatagaggtgagctgcccaaaacacattcattggatccgtttttggcccacctcatttgtgacctatggataaaaggctgcgtgtatgttatgtttttgttatgattattttttactcagactgaggcgggccttagtaatgtttaaattcggcaatcaatgtcaatattagcgagtggactcctaaatcaaatgtgggcagtccactgccggcatgtgcgtctgttttttggccaactgtaggtcagagaggattagccttagcccatctcgtcggctcgtgacccaatgcaccgacccatagaaacctattagctgatccccataaatcagcgcacttctcctggtgaaattggcaagcttaagagagtcaaatgaccgcagcagggccttcaaaaaaatgtctacaagtagcattaaattaaaataatttatggcaaactttcggatcaaactctacggaggagctcggctcggcataaaattaacggagaccgttaaaagcccgctgattacagaaataaatttcggatgatgtctgtgcgaatttcgcgggcttgtggctatgcaaagcgagtgagtgggttcaaagtggggctgctggagttcaatgatccggtgccacccgcctctttggcaattattgctatcaaacattatgaaccataatttttaggctttcccgaagcactgcgcaaaatcagaactgagaattttcagaacagtattaatttttcaatttaaattgttctactaaataagaatcgaacaattttaatcactaaggcagtgaaatataattcaattaatcaattaatttaattataatcaaaagtcatttatgtatgaaatatatcgaatgtactctgatttctttaggtgtatttattatttaatgactttccagatggccaacatagagctacaactctgtactgaaagggttctgagtttcgggatcataactaatccgatctcatgtaactccgccttgcgtcatccgttaaacatagcctaaaaaaatcgacgagcattcgatgctcggatgattaattttcagcacttggcagccacataattaattttagacagcccacaaccgagaatacatattcaagaacgatcgcactttattttctatcagccatcaaacagaaagcccctcgatgagccgcaggcagccccaaaataagaatcgaattagaatcagaatcagaattacatgaaaggaacttgccaaatttcggctgccacgcgtttccattatttattggccacgagccgagtgttaaaagtgtgcggaattttatttttcatcttttttgttgccctgttgcttggcgttgatttttgtatatttataatttagctcttttcggatttgttttgtttttttttttttagagctctggagatgcgcttcatgacggtggtggcactttctagtcgccggctccgaagagtggggcgatttgaaaacgggtttccagaatgatttatcatatattttagttaaacgaaaaaagagcataacaggctaaaagaacgttaagtttatcgtaaaagactaaaacgtgtacttggctagtgagtgttagagtcttttgaaacagactttcttttacgctgtaaaaaaagcaacagactatattttatttgataaattttgatggagagcagaaacatgtaaagaaattgttctaaaatttaattaagataaatacaaataaaagaaacataaactgttaataaatacctttacttcccagccaactaaccttgtaatatgtaatataattttgataataatacgatgcccttaccatatgcaagctttcagataagattccattttatataaactacaatgcgggatagggaatcctccccaattagagtatcttgaaaactaaattaactagcgcgtgtgactatgccggacaaaatacaaagactaagacaaaggaaaggcggcagccacgagaaagaagttgccgcctgttaagctcacatatatggcaaaaatcgaatggccataatattaattagaatagaatttgcataaattaagccaacgcgaaatggtctttggtttttgttagacagagcgacgcgacctgtgggattatgcaaaggcagtctgaatctggtatatacagcgattcggaaactccatttggggagaccgatcgagcgcgcccggccattaaccatagtatacattatccgataacacaatcagtgggacggagatctcctttcgccgatccgctctcctgtccgttttctttttgtgggttacgctaattcggggcccacgcttacttattaagccgggctgacaatttaaatgttgtctgtggccgttgcgttgggattttgtcccattctacgggacgactatatgggatcccaactgccattcactaatttgcatatttctctatttttcggcataagcatcgattccgaaatggaactcttaagtgttcggaccggctcaccgaactactgatggatagtaataataagcagatggggctatcgtgatctattgactggcagcttgcgtgtagaacatctatgggcaactggaccataatcagaatagaaatacatacacacatatgtggaatatgctagaactcgctatgttgccagtgaataaaatgtaaattggcaaagccataaattcagctcgttaatactcgcagttttttgagtatttttaagtgctgcacacatacaggaaattaagtgatttatctcacgcgtacaatggcaggccaaactagaattgtaaggctctcaacctttatgcatttgggaataggaaaactgatatagttgctatttgataccgaccaaagtgtttatggtcgccgcgttaattagccaaactggtgctattaaggtccgtcttctcagattggtggcgattggtggcgcgtgacaaccatccatcaccggcgcaatccccacaaccacctccattcatctaaaacttcgggcaaccccatcgatcatggccttgactttcacggctgtactttgacccgagttatatagcgatttttcgatgaatcgattggcggttgattagtcatcgtttatccttcactttacggaaccgattagttcttagcacctctaacgagccttgcttcatggctatttattttagcttcgatgttgcaaatacaccaaataaagcatgtactccccctctccgccaaagttaaaccattaatcatttgctgcactttgactcttaacaaattgattagcttgacttgatggcctgccttctttttttaaacgcattaatatcttcaatttaatcattcaatcctattttatcaactggcgcatgcgtttaaaattaaactaactcataaataagcgaaaataaatactccttatatgcaggtggaaacagattaacttgatttattcggacatcccttgcatgtccatgtttaattttggaaacaattggtgagaggtttttaaccagaagtgacacaaaaaatcacttgcagattaaatgtcacatctggatgatattgaaaaatgcttaagctgggattaagtgtgctgtgtcaaccaaattggtcgattaataattataagaaaacatgtttttaaaagtaagctgtacctattacgatttcaaatcaatgttttattaaaacttaaattttatttttaaataacaattatatattttagacatatccatactgttgtcttttttaatgtcaataaatattattagccatttcaaacttagtaattgataagcgcgcatccgcacaaagcggattgttcttagaattcacaatgggatcttctgaagatctcgtcatcctatatccggcattcggtttacaaacttatacaattcgtacgcatcaggcataattatatcatatttccaaaaattgaatggctcgcttggtcagttcctatttgttgattaatgaacggcgaacgacatcgccacaatgggaagaggctgcgatcgaaataatcgactttttgagtggcgattcggaaagctattgaagtgagcgaatttgattgaaacatataactcatcatttgaatttatatcgagcgcaattccaatagcggcttgaatgaaaccaggcaggtggagcgaacacaaagaggtgtaaacaagacgagagccaagttaatacggatatatgtatatgtttatatatatttgtatgtgagtatctttgcgcgctcgacttgtccaaaacgttgatgtccatcaaatcttttgcatatgattaaataaaacaattaagagaatccgtgcgaacgattttggccattaaacattttttttttagccatcaactgctccgaagctatagcttgtgcgaatgtaagcgtcgcagtcgccgtctatcgtgttggccaagctgcgtttgagccgcaaaagagcggcttagaacccgtagcttagccaaaccaaagccgaagtcgtgcgaatttacagacgcttgcgccggcagcgacgtctttttgggcagaggcgcaaaaaacgccagctctgtaatagccagcgaagagcggagaatctgtataaataccaaaaggttctgcgtattcctcattagagtttcggttttactgctgtgaacaagcaactcatcggacaatatggtacgattcgacaatttaggagccatcgaatcgccactgaaggactaaactaaacaaatttcccaactgtctcttgcagaaactcttcctggtcgcttttgccgtgatcgcagccgtggctgccgatgtcagccacctgccctccaacgagtacctgcctcccgtccaggagcagcagatcatcgccggacccagcaacgagtacctgcctcccgtgcaggccgagtctgcccccgcccatgagctggccgatgatggctaccggtacaagacccacaagcgcgtggtggtccgccgccaccgccgtgacgtcaacgagctcttcaacgagtacctgccccccttcgcagctccttccaacgagtacctggctcctgctgagggtgctcctgagaccatcttggccgatgatggataccgttacaagacccacaagcgcgtggtaacccgccgtcaccgtcgtgatgtgagccacttgccctccaacgagtacctgcccccagtccaggctgctgctccttccaacgagtatctgcccccagtgtccgcccccgtccaggttgctgccccagctcccgctccagttcagatcgccgcccctgtccagctggccgcccccgctcctgtcgtggttgaggctgagcccgcccatgagctggccgatgacggttaccgttacaagacccatcgtcgcgttgtttaccgccgccaccgccgtgacgtcaacgagctctccaacgagtacctgccccccttcgcagctccttccaacgagtacctggctcccgctgagactgctcctgagaccgacttggccgttgatggataccgctacaagacccacaagcgcgtggtaacccgccgtcaccgtcgtgatgtgaacgagctctccaacgagtacttgcctcccgtgcagtctgctccctctgccgagtaccttgccccccaggaaaacaccgtcgaggcggctcccgcccatgtcctggctgatgatggatacgtctacaagacccacaagcgcgttgtgttgcgccgccactaaatcatccgataaaggcttcactaggtgatcgaattgtgctcatttttgagtgcagaccctactattagaatacctctttttcattcaaatacaataatacgataacgaatccatacattcagctctttttaattttattatgttgggtgtacgagctgggtgataaaaggttatatgtatagaattgactgaaggaggaatatattcggataaaacataaatctttgcggataatatataaaccagagaataataaaaaacgacaaagtttttaaacatgtattaacctatttaaaaataataatttaatgtaataatataaaaaggttttagggctagaatatattcattatttcacgatctaattatacacataagaacgtgggattagagaagcaatatacacttgacacataatcgaaattgaaatctatttatgccgaagcttccgcaatctcatcttcaaaaagttcaagcctgcttaacgcttttagaccatttacctacaaaagtaagggtatgttaactttcttggatggtgtgtctttttaatatgccgttattaatttaataggtttttatgacctaaacgcttatgtaatttattaaaatgttattttatagtggatatattatttatatacgatttgcaattaaatatagaaacgttttgttagcagaatctagttcgaggaatagaattaattaccccgttttattaatgttttccttcgactcttcataaaaggtaatttttccaaaagtgtattcagttcattttgttcaggttttctttcagccggtgatatacaatcgctttcgacagtcacatctatgtattgtttcggcattgaggtcgtgatttatttccgcaatttgattgctttttcggcagtcatttcgcttcttaccaactgtttttagccttttctccgctccgctatcgaacatctgcttttattacccgaagtcatagaacccgattagtaccagttgatta

SEQ ID NO: 4082 - DNA, 1021 bp, DROSOPHILA
aaataaatttcggatgatgtctgtgcgaatttcgcgggcttgtggctatgcaaagcgaaaactcttcctggtcgcttttgccgtgatcgcagccgtggctgccgatgtcagccacctgccctccaacgagtacctgcctcccgtccaggagcagcagatcatcgccggacccagcaacgagtacctgcctcccgtgcaggccgagtctgcccccgcccatgagctggccgatgatggctaccggtacaagacccacaagcgcgtggtggtccgccgccaccgccgtgacgtcaacgagctcttcaacgagtacctgccccccttcgcagctccttccaacgagtacctggctcctgctgagggtgctcctgagaccatcttggccgatgatggataccgttacaagacccacaagcgcgtggtaacccgccgtcaccgtcgtgatgtgagccacttgccctccaacgagtacctgcccccagtccaggctgctgctccttccaacgagtatctgcccccagtgtccgcccccgtccaggttgctgccccagctcccgctccagttcagatcgccgcccctgtccagctggccgcccccgctcctgtcgtggttgaggctgagcccgcccatgagctggccgatgacggttaccgttacaagacccatcgtcgcgttgtttaccgccgccaccgccgtgacgtcaacgagctctccaacgagtacctgccccccttcgcagctccttccaacgagtacctggctcccgctgagactgctcctgagaccgacttggccgttgatggataccgctacaagacccacaagcgcgtggtaacccgccgtcaccgtcgtgatgtgaacgagctctccaacgagtacttgcctcccgtgcagtctgctccctctgccgagtaccttgccccccaggaaaacaccgtcgaggcggctcccgcccatgtcctggctgatgatggatacgtctacaagacccacaagcgcgttgtgttgcgccgccactaa

SEQ ID NO: 4083 - protein, 335 aa, DROSOPHILA
MMSVRISRACGYAKRKLFLVAFAVIAAVAADVSHLPSNEYLPPVQEQQIIAGPSNEYLPPVQAESAPAHELADDGYRYKTHKRVVVRRHRRDVNELFNEYLPPFAAPSNEYLAPAEGAPETILADDGYRYKTHKRVVTRRHRRDVSHLPSNEYLPPVQAAAPSNEYLPPVSAPVQVAAPAPAPVQIAAPVQLAAPAPVVVEAEPAHELADDGYRYKTHRRVVYRRHRRDVNELSNEYLPPFAAPSNEYLAPAETAPETDLAVDGYRYKTHKRVVTRRHRRDVNELSNEYLPPVQSAPSAEYLAPQENTVEAAPAHVLADDGYVYKTHKRVVLRRH

SEQ ID NO: 4084 - DNA, 10982 bp, DROSOPHILA
atttatatggtgacacataacatacctacgcatacgaaacattattactatcaccatcattgccctagttgcgaggattagccggaggtagtgcagcatccgtatcatagcatactacatttgtgtaaaatgcgaatcgtcttattgttttgtttgttttatttgcctctgctggcgagattgttttatcttggaattattattctcgtatgcaaacacactctgccatcattatttgtatttagataacaatacgtacgcttaatgcaatgcgaaatcagaaataaagtttttaatggtagttaagttcagacgacgtgttttattggctgaataaattctgtgtaagtgcttttgtgatacaatgaaaatgttatgctactagtatttgccttcattgaatcactggtctttgtaaataaatacgaataaaagctttgtttttacatttccttttttaacggtaaaaaatcgtatccccaaccggcaatgtttttctttttttttaatattcaaactatcgatagttatcaactatggtattccttattgtttagtgatcacatattaaacttaaaaataatgatatacagataaaagtgtcgtgcgttcatattctacataaaattattagcaattatttaatcgttatgaaaagcgaaacgtataaactggtaattggtatgggaaaaattgggaaaaagctggaatcaggtttaattgcaatttggttttataaaatgttttatggcacaaacaaacatcctgactcaaaagtgaattaagcttgaaacttaaatactccgagaataccgtgaatatgcgtttaccaattgctgctgaacgggaccactatcgatagaaccttacaaactatcgaatcgctgcaagactattgccatcgatacttgcacctctatttattagtgttgtgtagccgtgttactgctaaattgtttattgcaaaaattccgcaaacgagagatattaggaatagaagacaatataacaattgggcaaaatgtgttagatgtttaaggtaagccaccgccagggctgcagctcggcggagccgtatccaacggtccgcgctctgggggccgcagcattccgcactcgtcacgtttactccccttttctggtctttgttggggctccgttggcacttctgctgataagtgcccaagtcgacttaattaatcagtgccctggagtcgggggcaagtcaattggatatttggaaaccgctgggaacgtgaaccagctgcgcgcccgaaagaccagtcatgaattgccgcggctctgatttgactcccgttcccacactccatatctcactcactttcagttgctgactaatactgggtggaaggtaatcagttggaatcgtcacaagaaacgatgctgccgcctaaggaaaacgtcgatctggagtgcttcctggtgaccaagcactcctggaagggcaggtataagcgcatcctctccatcggcacggccggcatatccacctacaatccggacaagcttgacctgactaacaggtggtcctattcggacatcgtagcagcagcaccctcaaagaccacaaatgtgagtttataagatcctacggagagctcggaactaaataaattgatctttcagataccccatgacttcgtgattaccatcaaaaaggataagaaactagatacaatcaagttatcgtcggaatatcggaacgatatcctaagctctatattaaagtactacaaagagtttgcggacaagccgaaaaatgctcaggttggtttttgagtctcgctttaaatcctatactaatttggaaacacttctccaacatttcatgtgtgattcagatgtttctaattaacatttaaatatgcaatatgaattctaatctgtcaaaattttaattttgaatactatctaaattttgtagcgctttagtgcttacaaataccactggtcgggcatcagtcttcccacagtactggaggtcacgccctgttctctggaccagctcgatcccaccaccaacgacgtgctggccagctatatgtacaaggatatcgagggaataataggtagctatgcacattcgactcgcttgcatcaattaatgtgtcttgttttgtcctcatgtgcctcaattacaattcaatatgatcgctccgtgttttgttcttttttttatttttggttacttgccgcactcatctttcttccgcacacgttttaagcaggcatctcggactatgagggaggaatcgtgatggcctacggcggattcagtcgcctccatttgtttaaggcgctgaatcaccacgaaatcgtgcagaacatagcacagagatcggctcagtttctgggcatcgaaaccaaaatactcaagagtcagatcactctggagcagttcgagaggcagcggttcggcaagtttaggtaagttcatgtgaaacgcaataaagaatttgtagaaaaaaaaagccatataatatttcagtggtgaccagtttcaaacctcgtcgaccgaattctcggttcataagataacgccccgccatccggatccggtgaagcgtatactctgcctcaccgaggtaacgctgctggagcgggatcctcaaacctacagcgtctgcaccctgcgtccgctcactgatgtgtttgccttagttagagacaaggacaatcttcagcgcttcagcatcgagtacaagaatggaatcgtgcgcaactacagcaccaacgaccgcgactcattgttggccactgttctggatgctgtccgctccagtggcaatcaggatgtgcacgtccgcattggcaacacgccgcgagggaaacggtatgtgccattgaacagctcggtggacgaggagacggaggcgaatttgatgcgcctggttatcaacaattttcaaaacccctctaagcggtatgagatcttggagcgctttaatgccaatgtgcctcacagtggcctcaactacagtgtaactcaggatgtaggttaacctaatgctcggattccggttcaacctaactaatgtttcgtttcacagagcttgtttgctgaaaacaaagataaacttatcctgagtgccctgcaagcgttggctcaaaaggagctggacagccctacggcccagctgagcaacttggagctggaggctatctttcacgctcttactcgtcttctcgctagcaaagttggatacgcagcctttacgaatctcccggggtaatatattctagtttcgtactaatagcattgttaatgtttgaatacatttcagctttcgtgagattatcggtacaaaggtggtggctgctttaagacgcaaggatttggctgtgacatactccgccattgacatgattaactcgctaatgcattctgtgaattctgaccatgatttaaaacaggagcaacttaacaagtcatccattctgtcatcaaaatcgtttctggaaactttgctcaacatgtggacaacccatgtggtaatgtaaccattctagagtgcggtcaattcgttttgtaactatttatgatttcagagccatggcagtggtgctctggtactctcagccatgctggacttcatgacctttgccttgtgtgtgccttacagcgagaccactgacggcaagcagttcgatactctgctggagctggttgccgatcgtggacgctatttgtacaaactgttccagcatccctcgctggcgatcgtgaagggagctggattggtgctgcgggccattattgaagaaggcgagctgcaagtggctcagcaaatgcaagcattggctttggatgaggctgcgctgtgccgccacttactggtggcactgtatacgccctccaatgatcccacacagaccacgcaacgtcagttgtcgcggcatttgatcgggctgtggctaacagatagtgaggaggccatggaactctttaaacgcatattcgtgagttattcgaaatgtccaattcaatcaagtttgtcatattatttaaaattaccagcccgctggcctgttaacctttttggaatctgaggagactgttccagagtcggatgtcgaggaggacaagctaaactttcgtgacaatctcaaatttgcaatacaacattccaacaaaactcgcaagaatgtgatagagaagcatttacaaggcattaagcattggggcatgaacctaattgagaaacaggacggagcggctcaggcgctaaagaatcgccctgttgtgctgagaaatcgacgccagaagaaaaagacatctgatgttgtagtgaatctgcccttcttcttttacagctttgccaaagatcacagtctccccaatttaatatggaatcacaaggtattcatacattacatttttaatattaattgatagattccaataaaatattttcgcagacccgcgaagaactgcgtatgtgtttggagaatgagctgcggcaatttcttaatgatcgtgacttagctggtcaaatgattgtggcatggaattatcaggaattcgaggttgcctatcaatgtttagctgacgaaattaaaattggtgactactacattcgtttgatactggagaaggacgactggccgcaaaatctagtaaaggatccgtaagtttccttaattgctttagttaattatggatgtaaacatagttatctctctaggattgaactctttaatgcattgtatagacgtgtgttgtgccgacaacgcgtaaatgatgaccaaatgacggtgttttccctccaggctttggctaaggtttaccgacgttaccacgccgagattggcaagttcaacgatatgtcttacattctgcagctcagtgatagggtgagtccaacacaaaaattttaagttagggctctccattaatacttcacgtccctttagtgcctttcaccttcaatgcgcgatgcactgatcaacctaatatcttgcctggtgctagagaaatcgaacagtcgagcccttatcgatcacgtgcaatgcctagtagatctcatcactttagcccatttacacaagggacgggcgcagctcaataccaaaacaaatgttattgaagcgggtcccaatatgggtacatacgaagaaaaggattggtactacaacattgagaaggatggccaaaagccggagcgtcagggacctattacatactcggaactcaaggaattgtggcagaagggattaatcacaccaaagacccgatgctgggctattggcatggatggttggcgatcgcttcagcagatcccacagctaaaatggtgtctaattgccaaaggcacaccgctttacgacgagactgaattgtcctcaaagatcctagacattttgataaagtgcactagcttctttccgagtcgcacccaaaatggcgtggcagttcttattccaggtccaaagttgtctcgcaaactttcggagttcatctgcttgccgcatgtggtacaagtttgccttacccacgatcccggattgctggagcgcgtagctacgctgctctaccagattatggaggacaatccggagatgcctaaggtgtacctaacgggagtcttctacttcatgctcatgtacacaggtagcaacattttacctataactcgattcctcaagatgacgcatatgaagcagggattccgcagcgaggaggtaataattttacatcattttttacatacatgaggatgttgatctacattttcatttcattgacagacctcccagtctggcatcatgcaccgcagcatactcggtcagcttctccccgaggctatggtatgtttcctggaaaattacagcgcggaaaagtttgcagaaattttcctaggcgagtttgacacccctgaggtgatatggagctcagagatgcgacgtctactaatagagaaaatagcggcgcacatcgcagactttacgcctcgacttcgtggacatacaatggcaaggtacccgtacttagccattccagtgatcagctatccacagctggagaacgagctcttctgtcacatctattacctgcgtcacttgtgcgatacccaaaagttccccaactggcccatttctgatcccgtacagcttctaaagcacacactcgacgcttggcgcaaggaggtagagaagaaacctcctcagatgactatccaacaggcttaccaggacctagggatcgaccttaccaagactcctaagccagatgagtcgatgattcgcaagagctattataagctggcgcaaatgtatcatcccgataaaaatccgaatggtcgcgaaatatttgaaaaagttaatcaggtacgtaaatggtaatcaacatggtaatccattctaaaattcaacggttgttttcaggcgtatgagtttctttgctcgcggaacgtgtggagctcgggtgggccagatcccaataatattgtgctgatacttcgcacacagagcatactctttgagcgatatccggatggtaagtgtttcctaagtttttctttttaaattataaaactatttattcatttctgtttatagttttgcgaccctacaagtacgcaggctacccgcaactcattaagaccattcgtctggagacgcgagatgatgagctcttttcaaaggaagcccaactactaacagctgcctctgaattgtgctaccatacggtccactgctctgccttaaatgccgaggaactgcggcgggaggaaggtattgaggcgctcttggaggcatacacccgttgcgtgtctatcctgggcgtggactcgaagccagactcgctgcactaccaagtcatatcgaacgtaactcgctgcttcgaagtagcctgtaactttgagaaatgcaaacagaagatcatccagctgccacagttactctctgacgtttgccgtgtggtctattttaagcacacgctatcggtaagcctggtgaccagtctcgctgccaataactatgacctgcaatgccaactatcgcggaatggcgttctctggtccctactgcttttcatcttcgaatatgactacacgttggacgaaagcggtgtggatgtgagcgataagtcaaaccagcagcaactggccaacaaccttgcaaagatggcggtgctcggttgcatcgccttagctggttacagcatggagctgcgtcagaaaccggtgactggaagcgagacaaactcaccagcggctaaggcgccaccagtcataaaaccaaagccatcggtgtccgcagcctcaagctcaacgtacacccagaacgctcacaatcccctgcaaagcaaacagctggccattacgagcggaaaggaaaaggagtcagacacctcatctggtagcagcgacaccgctagttccacacccaccgaaagtgagcaacagcaacagcttacgaagacgagaaccagtgccatccagcaaaagtacattgttacgggagaggctaaaaactctctaatcaaacaggtgctcgatcgtctgctcacgcgttacatttccaaccagttggccacggttcgggacagtgatgtgcttaagttgctcacggcaaacactcgtaatccctacctcatctgggataatggaactcgcgctcagcttaaggatttcctcgagcagcagcgaacggcatccgccaaggagacgcatgaggacattgctcaggtctctgagctggtttccagctttgagttcgatgcacacaagtaagtgattagaacatggaaaaggttgtatataacgctaattaataataataatccttcagggacgagctgcagatcggcggtatatttatacgcatctacaacgatatgccaactcatcctattgctcagcccaagctcttcatcatggacctgctggagtacctaaagcacgcttatcagtttctgcagtacaaaaagaacccggcatcaactgccgctcctgtcaacgctactcctaaaatgggaaatgatggcatcctgacccccactttggcgcctaatcatcctcagcttcagcaggcttcgacgggaaaatcgggcactacgtttgacgaggttctaactgcttataaccgatcaaagagtcggaagaagctggagacggatgcgctgacggaacagcagttggccttacagcagagcaaatacgactttagcagcgatggaaagattgagcttcacattactatggtgcttaaagcattgattgcggtgatcaaggcaaacgccgaggtggaaattcaatgcatcggaaactttgatatgatatttggtttcttggccagcaacatattcccggatgtaagcatttggttttataatcccttggaaatttaatagactttctgatattttagaactctactgtcaaagcggtggccttggaggtggtttctttggtttcgcgcaacaaggagtgcgtctcggaggtggcagcctgtgagatccttggcaactatctggtggcccttaaggacccagagcttcgtgccagccaagtaaaggtgttggagactctgtcgggactgatgaacgtgcaggagatgattaaggaggcccaggccaagggagccactatctacctgctggatatgttttgcaactcgcgtaatccgcaaatccgtgagatgtgcgccggtattttggccaagatgacggctgatcgcctgagcgggcccaaggtgcggatcactgtgtcaaagttcttgccagcgcttttcatagatgctatggtggagtcgccagcgacgtccgtgcagctctttgagtctatacacgagcatccggaactgatttggaacgataccacgcggtcgaatgtgtgtgatgctgtggccgatacgtgtcaaaggtatttaacaacaaaatgcatttcgttgtctttttaattttcatgttttcttttcgcacagattctatcagctgcaaaaggcgaattcccggcatgtgtggaaagatccggaaatacttaaggatatcgtgtccaatgaaatcgttgtggccggcgtctacctccgactgttcgtcagcaatccagcttggacacttcgcaagccaaagcaattcctttccgatcttttggactttgtagtcgaacagatcggcaagagctcctcagagcaggacgtactagacctgtccaccactgcgttggtggagctcctacgttcgcagcctaaccttgcggacgacatccctgtgcttgggcatataccaaagctgttcaatctgctctcagtgcagccgaaaaacacgctatcagtattacatcagctctcgctgtctgaggttggctactatcaacatttcgattggggattcgcttaagtttagtatattatgtttcagttctgcgtgagtgccatctcacagacggaatgtgtggcgccattaaaaaagtgcatggagcacaatcgggattgcatcgagaaggcctgcgaggctctaagccgcctctttaagcaccagcatgtgagttgcattctaaaaggaattactttgatttaaagtttaaagacaactttaaacatgactgttattaccaatcccaaaatgcataatttgttatctattaggattcgttgatcagtcaatctctggaggtgggacttataccttttctgctgggactactggacagccgtctggagttcgtggacaatccatcggcggttaaggcacaaattgtggcggctctcaaaggcatgacgcacaatctcaattacggcgatcgggtgacgcaaattctgctcaaacaccccgtgtgggccgagttcaaggatcagcgacacgatcttttcatcgccgatactacaatacgtggctatctgaccggtaggtggatgattcttatagtactgcctcatatgtatatataactttatccttttgaaggagtcaatccaacggctgggtacctgacagcgggtcctgcgcaaagcgtagaagttctcacctcaccgccacccatcgatcgcgatgatccttcggcccgtccacccatcgactagcgacgtgttatccgccggaccaaggctaaagcttagtctggtattcaaggtaacgctagcatgaagccttcgattgccacggaatcagaaaacggaaacggaattgcacgggttgcccccaattattgtattaaactttattttattttgtacactcgcagccaattgtacgtatcgtgaaaaaggctggtacggtaatcgttagccagcatattattaatatgtaacaaagtttcattttttatatttataagaaaaccaactgtataaaaaattagttgttagtttatacaccgcgcataaacaacctaactagagcatgcataaagtgattaaacatattatggaataaagccgattcattacaaatgaaaaaccaaaatgtgactaggttcgtttaaatttctggctatatatctattagcctgactcaacttcaaaaaatattaaaaataaaccaattagtttatggattcaaccagattttatttgcaatcttttaatggggcgtttaataattttgatagagcaaatcctttttttaagtgtagtggtatgttaatactaaacagacatttttttttggtattttaatgcggctaagcaaaacgcgttagcttatttttcacaacatattgttttggctagatctataaacaaaacaataataatgtcgctggtggcagattatagcgactcctccgaatccgatgaagacagcagtggccaattttccgaagacggggaaacaaagaggtgaccttccttatcgcctgctgtatgacataggattccaattcttgtgcatttccagtgcggcaccagccaaaaatgagaagactcctcctcccaagttgcccagtgctagccaagctttttcccaaggagctggaaagggagatgtgtttaacaatcccttcctggaggccgagctg

SEQ ID NO: 4085 - DNA, 7255 bp, DROSOPHILA
acaatataacaattgggcaaaatgtgttagatgtttaagttgctgactaatactgggtggaaggtaatcagttggaatcgtcacaagaaacgatgctgccgcctaaggaaaacgtcgatctggagtgcttcctggtgaccaagcactcctggaagggcaggtataagcgcatcctctccatcggcacggccggcatatccacctacaatccggacaagcttgacctgactaacaggtggtcctattcggacatcgtagcagcagcaccctcaaagaccacaaatataccccatgacttcgtgattaccatcaaaaaggataagaaactagatacaatcaagttatcgtcggaatatcggaacgatatcctaagctctatattaaagtactacaaagagtttgcggacaagccgaaaaatgctcaggcgctttagtgcttacaaataccactggtcgggcatcagtcttcccacagtactggaggtcacgccctgttctctggaccagctcgatcccaccaccaacgacgtgctggccagctatatgtacaaggatatcgagggaataatagcaggcatctcggactatgagggaggaatcgtgatggcctacggcggattcagtcgcctccatttgtttaaggcgctgaatcaccacgaaatcgtgcagaacatagcacagagatcggctcagtttctgggcatcgaaaccaaaatactcaagagtcagatcactctggagcagttcgagaggcagcggttcggcaagtttagtggtgaccagtttcaaacctcgtcgaccgaattctcggttcataagataacgccccgccatccggatccggtgaagcgtatactctgcctcaccgaggtaacgctgctggagcgggatcctcaaacctacagcgtctgcaccctgcgtccgctcactgatgtgtttgccttagttagagacaaggacaatcttcagcgcttcagcatcgagtacaagaatggaatcgtgcgcaactacagcaccaacgaccgcgactcattgttggccactgttctggatgctgtccgctccagtggcaatcaggatgtgcacgtccgcattggcaacacgccgcgagggaaacggtatgtgccattgaacagctcggtggacgaggagacggaggcgaatttgatgcgcctggttatcaacaattttcaaaacccctctaagcggtatgagatcttggagcgctttaatgccaatgtgcctcacagtggcctcaactacagtgtaactcaggatagcttgtttgctgaaaacaaagataaacttatcctgagtgccctgcaagcgttggctcaaaaggagctggacagccctacggcccagctgagcaacttggagctggaggctatctttcacgctcttactcgtcttctcgctagcaaagttggatacgcagcctttacgaatctcccgggctttcgtgagattatcggtacaaaggtggtggctgctttaagacgcaaggatttggctgtgacatactccgccattgacatgattaactcgctaatgcattctgtgaattctgaccatgatttaaaacaggagcaacttaacaagtcatccattctgtcatcaaaatcgtttctggaaactttgctcaacatgtggacaacccatgtgagccatggcagtggtgctctggtactctcagccatgctggacttcatgacctttgccttgtgtgtgccttacagcgagaccactgacggcaagcagttcgatactctgctggagctggttgccgatcgtggacgctatttgtacaaactgttccagcatccctcgctggcgatcgtgaagggagctggattggtgctgcgggccattattgaagaaggcgagctgcaagtggctcagcaaatgcaagcattggctttggatgaggctgcgctgtgccgccacttactggtggcactgtatacgccctccaatgatcccacacagaccacgcaacgtcagttgtcgcggcatttgatcgggctgtggctaacagatagtgaggaggccatggaactctttaaacgcatattccccgctggcctgttaacctttttggaatctgaggagactgttccagagtcggatgtcgaggaggacaagctaaactttcgtgacaatctcaaatttgcaatacaacattccaacaaaactcgcaagaatgtgatagagaagcatttacaaggcattaagcattggggcatgaacctaattgagaaacaggacggagcggctcaggcgctaaagaatcgccctgttgtgctgagaaatcgacgccagaagaaaaagacatctgatgttgtagtgaatctgcccttcttcttttacagctttgccaaagatcacagtctccccaatttaatatggaatcacaagacccgcgaagaactgcgtatgtgtttggagaatgagctgcggcaatttcttaatgatcgtgacttagctggtcaaatgattgtggcatggaattatcaggaattcgaggttgcctatcaatgtttagctgacgaaattaaaattggtgactactacattcgtttgatactggagaaggacgactggccgcaaaatctagtaaaggatccgattgaactctttaatgcattgtatagacgtgtgttgtgccgacaacgcgtaaatgatgaccaaatgacggtgttttccctccaggctttggctaaggtttaccgacgttaccacgccgagattggcaagttcaacgatatgtcttacattctgcagctcagtgataggtgcctttcaccttcaatgcgcgatgcactgatcaacctaatatcttgcctggtgctagagaaatcgaacagtcgagcccttatcgatcacgtgcaatgcctagtagatctcatcactttagcccatttacacaagggacgggcgcagctcaataccaaaacaaatgttattgaagcgggtcccaatatgggtacatacgaagaaaaggattggtactacaacattgagaaggatggccaaaagccggagcgtcagggacctattacatactcggaactcaaggaattgtggcagaagggattaatcacaccaaagacccgatgctgggctattggcatggatggttggcgatcgcttcagcagatcccacagctaaaatggtgtctaattgccaaaggcacaccgctttacgacgagactgaattgtcctcaaagatcctagacattttgataaagtgcactagcttctttccgagtcgcacccaaaatggcgtggcagttcttattccaggtccaaagttgtctcgcaaactttcggagttcatctgcttgccgcatgtggtacaagtttgccttacccacgatcccggattgctggagcgcgtagctacgctgctctaccagattatggaggacaatccggagatgcctaaggtgtacctaacgggagtcttctacttcatgctcatgtacacaggtagcaacattttacctataactcgattcctcaagatgacgcatatgaagcagggattccgcagcgaggagacctcccagtctggcatcatgcaccgcagcatactcggtcagcttctccccgaggctatggtatgtttcctggaaaattacagcgcggaaaagtttgcagaaattttcctaggcgagtttgacacccctgaggtgatatggagctcagagatgcgacgtctactaatagagaaaatagcggcgcacatcgcagactttacgcctcgacttcgtggacatacaatggcaaggtacccgtacttagccattccagtgatcagctatccacagctggagaacgagctcttctgtcacatctattacctgcgtcacttgtgcgatacccaaaagttccccaactggcccatttctgatcccgtacagcttctaaagcacacactcgacgcttggcgcaaggaggtagagaagaaacctcctcagatgactatccaacaggcttaccaggacctagggatcgaccttaccaagactcctaagccagatgagtcgatgattcgcaagagctattataagctggcgcaaatgtatcatcccgataaaaatccgaatggtcgcgaaatatttgaaaaagttaatcaggcgtatgagtttctttgctcgcggaacgtgtggagctcgggtgggccagatcccaataatattgtgctgatacttcgcacacagagcatactctttgagcgatatccggatgttttgcgaccctacaagtacgcaggctacccgcaactcattaagaccattcgtctggagacgcgagatgatgagctcttttcaaaggaagcccaactactaacagctgcctctgaattgtgctaccatacggtccactgctctgccttaaatgccgaggaactgcggcgggaggaaggtattgaggcgctcttggaggcatacacccgttgcgtgtctatcctgggcgtggactcgaagccagactcgctgcactaccaagtcatatcgaacgtaactcgctgcttcgaagtagcctgtaactttgagaaatgcaaacagaagatcatccagctgccacagttactctctgacgtttgccgtgtggtctattttaagcacacgctatcggtaagcctggtgaccagtctcgctgccaataactatgacctgcaatgccaactatcgcggaatggcgttctctggtccctactgcttttcatcttcgaatatgactacacgttggacgaaagcggtgtggatgtgagcgataagtcaaaccagcagcaactggccaacaaccttgcaaagatggcggtgctcggttgcatcgccttagctggttacagcatggagctgcgtcagaaaccggtgactggaagcgagacaaactcaccagcggctaaggcgccaccagtcataaaaccaaagccatcggtgtccgcagcctcaagctcaacgtacacccagaacgctcacaatcccctgcaaagcaaacagctggccattacgagcggaaaggaaaaggagtcagacacctcatctggtagcagcgacaccgctagttccacacccaccgaaagtgagcaacagcaacagcttacgaagacgagaaccagtgccatccagcaaaagtacattgttacgggagaggctaaaaactctctaatcaaacaggtgctcgatcgtctgctcacgcgttacatttccaaccagttggccacggttcgggacagtgatgtgcttaagttgctcacggcaaacactcgtaatccctacctcatctgggataatggaactcgcgctcagcttaaggatttcctcgagcagcagcgaacggcatccgccaaggagacgcatgaggacattgctcaggtctctgagctggtttccagctttgagttcgatgcacacaaggacgagctgcagatcggcggtatatttatacgcatctacaacgatatgccaactcatcctattgctcagcccaagctcttcatcatggacctgctggagtacctaaagcacgcttatcagtttctgcagtacaaaaagaacccggcatcaactgccgctcctgtcaacgctactcctaaaatgggaaatgatggcatcctgacccccactttggcgcctaatcatcctcagcttcagcaggcttcgacgggaaaatcgggcactacgtttgacgaggttctaactgcttataaccgatcaaagagtcggaagaagctggagacggatgcgctgacggaacagcagttggccttacagcagagcaaatacgactttagcagcgatggaaagattgagcttcacattactatggtgcttaaagcattgattgcggtgatcaaggcaaacgccgaggtggaaattcaatgcatcggaaactttgatatgatatttggtttcttggccagcaacatattcccggataactctactgtcaaagcggtggccttggaggtggtttctttggtttcgcgcaacaaggagtgcgtctcggaggtggcagcctgtgagatccttggcaactatctggtggcccttaaggacccagagcttcgtgccagccaagtaaaggtgttggagactctgtcgggactgatgaacgtgcaggagatgattaaggaggcccaggccaagggagccactatctacctgctggatatgttttgcaactcgcgtaatccgcaaatccgtgagatgtgcgccggtattttggccaagatgacggctgatcgcctgagcgggcccaaggtgcggatcactgtgtcaaagttcttgccagcgcttttcatagatgctatggtggagtcgccagcgacgtccgtgcagctctttgagtctatacacgagcatccggaactgatttggaacgataccacgcggtcgaatgtgtgtgatgctgtggccgatacgtgtcaaagattctatcagctgcaaaaggcgaattcccggcatgtgtggaaagatccggaaatacttaaggatatcgtgtccaatgaaatcgttgtggccggcgtctacctccgactgttcgtcagcaatccagcttggacacttcgcaagccaaagcaattcctttccgatcttttggactttgtagtcgaacagatcggcaagagctcctcagagcaggacgtactagacctgtccaccactgcgttggtggagctcctacgttcgcagcctaaccttgcggacgacatccctgtgcttgggcatataccaaagctgttcaatctgctctcagtgcagccgaaaaacacgctatcagtattacatcagctctcgctgtctgagttctgcgtgagtgccatctcacagacggaatgtgtggcgccattaaaaaagtgcatggagcacaatcgggattgcatcgagaaggcctgcgaggctctaagccgcctctttaagcaccagcatgattcgttgatcagtcaatctctggaggtgggacttataccttttctgctgggactactggacagccgtctggagttcgtggacaatccatcggcggttaaggcacaaattgtggcggctctcaaaggcatgacgcacaatctcaattacggcgatcgggtgacgcaaattctgctcaaacaccccgtgtgggccgagttcaaggatcagcgacacgatcttttcatcgccgatactacaatacgtggctatctgaccggagtcaatccaacggctgggtacctgacagcgggtcctgcgcaaagcgtag

SEQ ID NO: 4086 - protein, 113 aa, DROSOPHILA
MLPPKENVDLECFLVTKHSWKGRYKRILSIGTAGISTYNPDKLDLTNRWSYSDIVAAAPSKTTNIPHDFVITIKKDKKLDTIKLSSEYRNDILSSILKYYKEFADKPKNAQAL

SEQ ID NO: 4087 - DNA, 4037 bp, DROSOPHILA
tattgtaaacacatacggatacatagtcattaagctatctttatatcaaacaaaacaaaagataaatcttttttatttcgttttattattattactgcccgtttttcgaagtgtagtcttgaggtctggtctcgtgtcttgtcgcctcgctccgattgtcacagctgttttttctggcgggtttggtgggatgaactgagaaactgaaagccctggactggtggcttgtcaagtgccttgttctgctcatcgaaagatgctaccgtttcctgagtgccctgcatgtcgccaagtcgcgaatttgctattttcgaggggttggtctggtgcataaatttacctttaattgctagacagaattgaggtgtgagccttttactcgatcggcaacttcacacaaatgcggcgaaatgctgttctcattttgaaattgtttagcttggggttaaaaagctcagtaattgtgtttagattacgaggcaaaacagaaaacgagctgcatttttaataggcaacaatgtactgtccaatgacaagtacaataatcaaacgaaagagtagacatctttttgcaatggctttataaataattaagattataattactttagtaattatacttaactagcaaaactggtatttcagcacacatttaaacttataccaatactcattttattcaccacatcgatcgctcactgtatgtacacactttcaatatcagcacttgctcactcgacttggtcactttgactatctgtcagaacaaaaagtccgctttgaatgcgaatcgcataccgcgacttgcaacactcggactcataatcaaaaaacgactcatatgtttcaaccaaaaccagttccccggagaggaacgtgctgagagccggagaatccgattatacagagaatatactatacgtatagttttaaaaactgaactgaaattgcgcttggctggtcaagcggccggttatcatcgctcggcccaaaacagttgatctacaaaagctgcggcatcaacaacgcagaaagtgaaaccgaattaaaacagctaactctgaactttgattcgaggctaatccgcggatttaatcacccgcaaaaggtcatcacaacagtagccagagcatgtggctgaccttgatcacgggagctctgatcttgctcctcacctgggactttggacgcaagcgccaacgagtcctcgcctttgagaagtccgcgatcccaggtcccatttccattccgatcctgggctgtggtctccaggctctgcacttgggagcagagagtgagttgaatcgatcacgaaaataatacttatattttagaaaactaacacttctaacacctttttcagacattatcggatgggtgggagaaaagttcgacaagtatggcaagacctttcgtttttggatattgggggagtccctgatctacacgaaggacctgcagtactttgagaccatcttgagtagcaccactctcctggaaaagggtcaactctacgagtatctgcgacctttcctaaacgacggcctgcttgtcagcacgggtcgaaaatggcacgccagaaggaagattttcacacacgcattccacttcaaagtccttgaacactatgtggagatcatggatcgacatagtagcgtcatggtggataatctgcgaaaggtggccgatggtaagacagcggtggatatgctcaagtatgtgtcgctggcagctcttgacgtgataacaggtgagtcgagatgagattaggataatttaaggcttcaatgaaaataaattaaacttgacttttaaataggtcgcacctgaattccgagaattggttctgtttactagacatgtataatttactgcagtaaacaacatgcttatatttagtattgacttattcaatcttttttgcagaggctgccatgggtgtacaggtgaatgcccagaacgaccccgattttccctacatcaaggcgctgaaaaggtgggcattacatatagtaaactgaaacttgccaagactttccccacttccactccctatagtgtggtctatatccaaccggatcgcatgttcaggttctcgaggcgctacaactggctgttcccgctggcggcacctttgctgcaccggcaactgctgagcgatatccgcgtcatgcacgacttcaccgacaaggtcatcagcgagcggcgagaaaccgtgcggcgggctaaggccgacggcacctatcgaccgctgagtgggtgcactgactcagcaggaagtcatatgtaatcactgctgacttttgtctaatctcttgcaggtctgggtgatgccgagatcggtagcaagtcgcagatggctctgctggacatcctgctgcagtcgagcatcaacaatcagcccctgtccgatgcggatatacgcgaagaggtcgacacctttatgttcgagggcgacgacaccaccagcagtggtgtgtcccacgccctctacgccatcgccaggcatcccgaggttcagcagcgcatcttcgaggagttgcagcgtgtcctgggcccggacgcctctgctccagtgacccaagcccagttacaggacctaaagtacctggactgcgtgatcaaggagaccatgcgactgtatcctccagtgcctgccatcggtaggcacgcgcagaaggagctagagatcggagacaagaccattcccgccaacacaagcatttacctggttctctactacgcccatcgggatgcgaactactttccagatcccctcagcttcaggccagagcgattcttggaggaccaagagcaaggccacaatacctttgcctatgtgcccttcagtgcgggacccaagaactgcattggccagaagtttgccgttctggaaatgaaggtcctgatcagcaaggtcctcaggttctatgaactgctgccccttggagaggagctcaaacccatgttgaacttcatcctgcgctcagcttcgggcattaatgttggtctaaggcccaggaaggcattgcgttgaggtttcggtttaaggtaaatgggatgttcgtgatacttagtaatagtaagcattattatctaatcgttaagtacttataacactgttgatttattggtaaataaccgtagcgtctattaaataattgatattgacatattttccaaacacaaccgtattttattgatgatccatgtatatgattattagcttaattactctagggtgaaacctgttaatagttcttaaataaatcacttactcatccgcctttcattacaaccccttaatcgcaatgcgactcgccgagccattgtttcaatatttgcgatgtttataaaattaggcccccaaacaaaaggtatttgaacagcggatgagcgtggcgcgccataaagaatcccgagtttatcaacgtaaaatactgtatttacctaaggccaatattaaccagctacttagaaagcgttcacaccgcggaaagttattcgcggccattgtgaagtgctctccagcgtcatataaaatatgaatgagagctgtaaatggaaaaagaactggaattcacggaagcagtaaattctccgagatcccaattcaatcattccagcagcctgctgtttatctatggtttataattgaccaaaagataatgcgccaaggcaatagaaaagttttgcaaaacagataagagcatcgcgaaaggaaatcacataacattcttatcaacgcgcctgtcagccgcatcgggtttgcatataaaagaccactacgccggaggcagtgcgtcaaaagagcttctgtctccggtgaatggtgtatatctgcaatgtgtcccgagatgtcgtccgtgaaaatcctggcctcgctggccatgatcggtttattggttttgtctcctgcggagggtatcagccgaccattgcctccatacgtgggtctgcccacccaggatggcctcacgcgtctgttccttaattcacgggtcacgcagacagatcccttcgcctcggtggcatgt

SEQ ID NO: 4088 - DNA, 1664 bp, DROSOPHILA
atctacaaaagctgcggcatcaacaacgcagaaagtgaaaccgaattaaaacagctaactctgaactttgattcgaggctaatccgcggatttaatcacccgcaaaaggtcatcacaacagtagccagagcatgtggctgaccttgatcacgggagctctgatcttgctcctcacctgggactttggacgcaagcgccaacgagtcctcgcctttgagaagtccgcgatcccaggtcccatttccattccgatcctgggctgtggtctccaggctctgcacttgggagcagagaacattatcggatgggtgggagaaaagttcgacaagtatggcaagacctttcgtttttggatattgggggagtccctgatctacacgaaggacctgcagtactttgagaccatcttgagtagcaccactctcctggaaaagggtcaactctacgagtatctgcgacctttcctaaacgacggcctgcttgtcagcacgggtcgaaaatggcacgccagaaggaagattttcacacacgcattccacttcaaagtccttgaacactatgtggagatcatggatcgacatagtagcgtcatggtggataatctgcgaaaggtggccgatggtaagacagcggtggatatgctcaagtatgtgtcgctggcagctcttgacgtgataacagaggctgccatgggtgtacaggtgaatgcccagaacgaccccgattttccctacatcaaggcgctgaaaagtgtggtctatatccaaccggatcgcatgttcaggttctcgaggcgctacaactggctgttcccgctggcggcacctttgctgcaccggcaactgctgagcgatatccgcgtcatgcacgacttcaccgacaaggtcatcagcgagcggcgagaaaccgtgcggcgggctaaggccgacggcacctatcgaccgctgagtctgggtgatgccgagatcggtagcaagtcgcagatggctctgctggacatcctgctgcagtcgagcatcaacaatcagcccctgtccgatgcggatatacgcgaagaggtcgacacctttatgttcgagggcgacgacaccaccagcagtggtgtgtcccacgccctctacgccatcgccaggcatcccgaggttcagcagcgcatcttcgaggagttgcagcgtgtcctgggcccggacgcctctgctccagtgacccaagcccagttacaggacctaaagtacctggactgcgtgatcaaggagaccatgcgactgtatcctccagtgcctgccatcggtaggcacgcgcagaaggagctagagatcggagacaagaccattcccgccaacacaagcatttacctggttctctactacgcccatcgggatgcgaactactttccagatcccctcagcttcaggccagagcgattcttggaggaccaagagcaaggccacaatacctttgcctatgtgcccttcagtgcgggacccaagaactgcattggccagaagtttgccgttctggaaatgaaggtcctgatcagcaaggtcctcaggttctatgaactgctgccccttggagaggagctcaaacccatgttgaacttcatcctgcgctcagcttcgggcattaatgttggtctaaggcccaggaaggcattgcgttga

SEQ ID NO: 4089 - protein, 510 aa, DROSOPHILA
MWLTLITGALILLLTWDFGRKRQRVLAFEKSAIPGPISIPILGCGLQALHLGAENIIGWVGEKFDKYGKTFRFWILGESLIYTKDLQYFETILSSTTLLEKGQLYEYLRPFLNDGLLVSTGRKWHARRKIFTHAFHFKVLEHYVEIMDRHSSVMVDNLRKVADGKTAVDMLKYVSLAALDVITEAAMGVQVNAQNDPDFPYIKALKSVVYIQPDRMFRFSRRYNWLFPLAAPLLHRQLLSDIRVMHDFTDKVISERRETVRRAKADGTYRPLSLGDAEIGSKSQMALLDILLQSSINNQPLSDADIREEVDTFMFEGDDTTSSGVSHALYAIARHPEVQQRIFEELQRVLGPDASAPVTQAQLQDLKYLDCVIKETMRLYPPVPAIGRHAQKELEIGDKTIPANTSIYLVLYYAHRDANYFPDPLSFRPERFLEDQEQGHNTFAYVPFSAGPKNCIGQKFAVLEMKVLISKVLRFYELLPLGEELKPMLNFILRSASGINVGLRPRKALR

SEQ ID NO: 4090 - DNA, 4824 bp, DROSOPHILA
ttttctcattaacaaaaatatgggttattattgcagccaagctgtggcgtgtgcgcagtcacttgacaattcttacggaatatctataaaaatgtcaggatgtgcacacttttgtacaccaacgattggtgctaactacggatctgagcgagcgctaattccacttgctaattttaaattagtcgccagattttttacacccttgatcgaaatgggtcttgtggccgcaatctactcgaaacccgaatggaactcaatttacgcacaaatttagtggcccaacggagcagaacgaaatccctggaattctgggtggattcaagccgaccgtatcgcatgaattgtcatcgggccaattaaaatgaatgtaaaaaatgatcaaaatcaaaataccattataattatagcgattttattcttgcataagcttaaatttccattccgcgattttcaatttatttaactgataacaaaaaacagtggacacatacacctgtataaccattacttgtggtacgaaacgtgcacagatacacatttacttcatcagttgttcctctcggtaagtttgcccattggtcagtggaaccactaaccactttttagactcccatggctctggctcgtgctactcatttgcacaattcaaagatgaaatcaaaccaaacatccaaactacgcttctcacgttttccctacccaactttcggtgagttgagctggtaaggtagggctccagatccaatttagcccgtccggcggctaaatggagcattctttgggcttggaatcgaatctggctaagcgggagtgcggcatattttcccatattttccgccggggaatgcaatttcacgtgaatccaactgatgcggctctagatgaacaactgttcgccagcgcgactgtttaccctagtgtgtgctcatgtgttgccgcttcctctgccgccgagagacccgctataaaagcgcacggatttcgcggtagccgctcatttcgagaacgaaactctatttgtatcgtcgccgtcggagtggaagtgaaattcggtttcgtgtttccgactactgtggcaatcaagcgcttgaattataatcgaatttggcattagtaacccataaatctgatcgccagagctaggcgcgagggggttgctactacggttacgtgacaagtgttgcaatgagccagtgaggaggaggagaagaagccaacaagttcggtcatttgaagctagatattcaagaacttgtccaccaaggaaatagccatggtcgagaaggcgtccaatgcgtttacactggaaaagctccgaaatctgcaatgggaaaaggtgtttcgtatgttttacattgaaccggttgtgtttatgctgctcttctcgcacacgttatcgggtgagttaccctccccagtgcctcggtgcccaagtcctccgaatccaccagctagaacgtatcaccaattcggcatcttgttcaggcaccatccagcgcaaccaggtcatctaccagacgtgcacagtgatattccactacaacgagagcgactgcaagcagctggatgtgaagaacgccagtgcggaaatcaatgtgggttacagtacggcggaagccaccagtccactaccgagatctgatcctactcatccgctttgcaggccattgagacggaactgcagccgtatgtggccaatctgttcctggcccgcaccctcctggagagcattgttccagccttctgcggcctgttcatcggttcctggtcggatcactatggacgcaagcccctgctcattgtttccatgataggtgagacctgttttattaacttctacctgatcgtgctaactaacgattgttgcacaatcaatagcgcggagaaacgtaaacacaatcgagcttctctaatttgtaatcacttctatagcttctttatatatacaaaagtttaaagcttcagcttagagagaagggaaaatgggtgtcagacttgttatttgagtgcaaaatatattaaacgactctaagctcaaatatattagatgtacaataagggagcgtgaaaaagaacggaaatagctatcagaagactttgtaatacatttccatatttcttatcctgcgcaggattctcggcatcattcctcatgatggccgccatctgcgagttgtccagctactatgtggtcaatccctggtggtacatcatggctgcagtgccccactccctgctcggtggcaattgcgtcttctcggtggccgccttctgcttcatctcggacatcacggattgcaagtcgcgtccgtaccgcatgatcttcatggagtcgcttttctttattggactgacaagtggatctctgctctctagctttgtgtacgcggctgtgggatcagcggcgaccattgggatttccggctgcatcgttactttcgcaacgctctttatcatcttctttgtgccggagagcttgcacttccataaggaacaggaaacgaagaacgcgataactgcaaatgtcgaaaaggagtgcatcgacagcaaagtgcctataaccgcctgtgacctccagttggaccgcgttgcgattgactgcccgccgaacttcatgaacgatgaggagccagggaaggataagaggatggagctgcccacaccggcaacgcctgcgatgagcttcgacgacgacctgttggcgaagtacgtggagcggctgccacagaaggcggaggagcgcaagcgccaggaggcggaagagcaggccaagaaggcgggtctgttcagtatggtacacatcagggacatgatcagcacctgcttcaagcgtcgcgatcatcacgcgcgcgccatcatctggctggttacgctggccatgtttctgtccatctttgtattcggtaaggctccgtattatcttccttttaataccatagctaatgaagtacaatcgcttttagatggagtgatgacagtgatgtacctattcgtgcgcgagaaattccactggactgtgcgggactacacattctttgaaacggtcagccacctggtgcccatgattggcgcactcattggtttccttattctgcggaaggtgagctttttaaatggcgcccaccgtggggcatacgatatgcttttaaggttatcctttcgttataggtctttcgcctgtcggtggtgaccctggcactgcttgccttcttttcggagattctgaacaatctggccaagggctttgcaacgatgccctggcacatgtacctttcggtgaccttgggcgtcttccgctccatctcaggccccatgtgccgcacaatagtatcgaacatagtgcctccctcggatctgggtgagtttcctgattggttaaaaccagaactccagctgtttatttttaggaaaattaactaatttgcctctcccgaaccgcaggcaagattttctccatcaagaatgttttgcagtcattcgcaccgttcggtaagcgaggctagtgtcgtttgattgttgattactttactcactctttggctgctaattacagtggctgcacccttgtacaccctcatctataagcgatccctgaccacctatcccggtctgttcaacttcgtcagctcgttcctgtacctgctttcgttcgtgtttatcgggtaagcttagcgccctgaaccggcactactacaatgggaggaagaaagcccctctccaacctgctaatttatcacacattcaacccccccccccctccttacagatatgtgttgcggatcaaatacaggtacaagcagcactacgccaaggttctgaagtgaggcggctatagcaaaaaattagcacgtgatcatcacaaccaatcgagcaataaagatttacaagtttagcgaatttaaagatgcgaatccggaaagcaggcgcttaactatgagggatcatcagttataaatggaacgaatgaatctttgtttgacttgtttatttatatgttaaattatttgtaattttgtttaaaaagtgtaactagctatatagctgtacttctagagtagacaattaaaaagtcgcacatctcgccgttacattagttgagtatcgggtatctaaatctctaattgtacccattaatcgtagtagtgtaaaagggtatactagatttgttgaagattatgtaacaggaacaacgatgaggaagtgtttccgaccttatattgtgtacttatacctagatcgggaactataaaacttaaggttaggcatctcgcacgcccgctgaaaatgtttagaattttttttcttcattcatcattttaattttattgtttgttttgccaattcctagagaagtgtcataaacattttggtcacgttcactcttaaatgcatttttgaaatttctccgtcgtttcactagttgagtaatagtcgaggaactcgatgatagcgttcctcttaagtaaaataattgttatagtgtttatttagagctaacgcaattaaataccactgaaatatttatatatatatacatatttatttaacctaagtctttggcgaatgttttatggctgaactgtaaactcctattctactgcttgctatttatgcttatccttattggcatagcaaacacatctccgcaataatacttatatatgtaaattatcattttagtagattttccatatatttattagcgtaagtttattaattacaatagggcttgcgcggtctgcacttaatgagacgaatagtaagtacgtggcgatgaccgacgcttctaatcttccaaaatcgactgacttaagtatagcaaga

SEQ ID NO: 4091 - DNA, 1974 bp, DROSOPHILA
cgagaacgaaactctatttgtatcgtcgccgtcggagtggaagtgaaattcggtttcgtgtttccgactactgtggcaatcaagcgcttgaattataatcgaatttggcattagtaacccataaatctgatcgccagagctaggcgcgagggggttgctactacggttacgtgacaagtgttgcaatgagccagtgaggaggaggagaagaagccaacaagttcggtcatttgaagctagatattcaagaacttgtccaccaaggaaatagccatggtcgagaaggcgtccaatgcgtttacactggaaaagctccgaaatctgcaatgggaaaaggtgtttcgtatgttttacattgaaccggttgtgtttatgctgctcttctcgcacacgttatcgggcaccatccagcgcaaccaggtcatctaccagacgtgcacagtgatattccactacaacgagagcgactgcaagcagctggatgtgaagaacgccagtgcggaaatcaatgccattgagacggaactgcagccgtatgtggccaatctgttcctggcccgcaccctcctggagagcattgttccagccttctgcggcctgttcatcggttcctggtcggatcactatggacgcaagcccctgctcattgtttccatgataggattctcggcatcattcctcatgatggccgccatctgcgagttgtccagctactatgtggtcaatccctggtggtacatcatggctgcagtgccccactccctgctcggtggcaattgcgtcttctcggtggccgccttctgcttcatctcggacatcacggattgcaagtcgcgtccgtaccgcatgatcttcatggagtcgcttttctttattggactgacaagtggatctctgctctctagctttgtgtacgcggctgtgggatcagcggcgaccattgggatttccggctgcatcgttactttcgcaacgctctttatcatcttctttgtgccggagagcttgcacttccataaggaacaggaaacgaagaacgcgataactgcaaatgtcgaaaaggagtgcatcgacagcaaagtgcctataaccgcctgtgacctccagttggaccgcgttgcgattgactgcccgccgaacttcatgaacgatgaggagccagggaaggataagaggatggagctgcccacaccggcaacgcctgcgatgagcttcgacgacgacctgttggcgaagtacgtggagcggctgccacagaaggcggaggagcgcaagcgccaggaggcggaagagcaggccaagaaggcgggtctgttcagtatggtacacatcagggacatgatcagcacctgcttcaagcgtcgcgatcatcacgcgcgcgccatcatctggctggttacgctggccatgtttctgtccatctttgtattcgatggagtgatgacagtgatgtacctattcgtgcgcgagaaattccactggactgtgcgggactacacattctttgaaacggtcagccacctggtgcccatgattggcgcactcattggtttccttattctgcggaaggtctttcgcctgtcggtggtgaccctggcactgcttgccttcttttcggagattctgaacaatctggccaagggctttgcaacgatgccctggcacatgtacctttcggtgaccttgggcgtcttccgctccatctcaggccccatgtgccgcacaatagtatcgaacatagtgcctccctcggatctgggcaagattttctccatcaagaatgttttgcagtcattcgcaccgttcgtggctgcacccttgtacaccctcatctataagcgatccctgaccacctatcccggtctgttcaacttcgtcagctcgttcctgtacctgctttcgttcgtgtttatcggatatgtgttgcggatcaaatacaggtacaagcagcactacgccaaggttctgaagtga

SEQ ID NO: 4092 - protein, 533 aa, DROSOPHILA
MLLFSHTLSGTIQRNQVIYQTCTVIFHYNESDCKQLDVKNASAEINAIETELQPYVANLFLARTLLESIVPAFCGLFIGSWSDHYGRKPLLIVSMIGFSASFLMMAAICELSSYYVVNPWWYIMAAVPHSLLGGNCVFSVAAFCFISDITDCKSRPYRMIFMESLFFIGLTSGSLLSSFVYAAVGSAATIGISGCIVTFATLFIIFFVPESLHFHKEQETKNAITANVEKECIDSKVPITACDLQLDRVAIDCPPNFMNDEEPGKDKRMELPTPATPAMSFDDDLLAKYVERLPQKAEERKRQEAEEQAKKAGLFSMVHIRDMISTCFKRRDHHARAIIWLVTLAMFLSIFVFDGVMTVMYLFVREKFHWTVRDYTFFETVSHLVPMIGALIGFLILRKVFRLSVVTLALLAFFSEILNNLAKGFATMPWHMYLSVTLGVFRSISGPMCRTIVSNIVPPSDLGKIFSIKNVLQSFAPFVAAPLYTLIYKRSLTTYPGLFNFVSSFLYLLSFVFIGYVLRIKYRYKQHYAKVLK

SEQ ID NO: 4093 - DNA, 6112 bp, DROSOPHILA
ttcgcgctaaacgatttcaaattgaatgctgaacaaccagcgccggcagaggctcgacagagcgtcgctctgcatccccgagattccgatttcgattccgaacccaaatccgaagccgaatcaaagtcagaaacagaatcttttcctgaagcagtacgacgtcgactgcgccggagctccagtttataaaccctcgtccaccagacggcagcgttcactttacaatcagcggtcgagcaggcaacaaacgtgaagaaagtgcacatagtaccataccacatatatgtgcataccatatcatcgagttctggacgcggtcataaaatatcatttgtgaaacgtaacgagattacaaaaggaattccagttccagatttctaaattagttttgattcgcgaaatagaaaacgtgcacagttgattttatcataacttgaagcgcgaaattcacatttgcataaccagaagaagcgcgtccgaggcgattatataattgcagtgtatttcgattgagcaagagcatctccaacttcagctgcacaatgacgggttacaaggtggccaatggcaatggacacagcaatggaaatggaaacacgaagggaacaaatggaaccaatggacacagcaatggacacaagtcggcggactacaccgcccaggagaatcccacgtaagtggggagagttgttggttcgaagttcgagccgacataaaaagggggtattatatcggaggccctcacgccagcggctcgttaactacaatcagctttaattgaaacttccaatagttctggcttcaatgcttcgcggcttcgccttaaccccactgcactgcaccacctgtccttctgcacgcccctctcccttccttccatgctaaagcttttgtgacccgcttttcaaggggccaaatcgatatggccttggctatccagtaggccctgccagtagcctcactctatgactgaatcagtcatttaggaaactcgcttcggcctacaggaaaccaaattcaggcacagactccatccaaaattcgctgcctagtacgtagttgtaagggctaagacctccaactaacccgcagaatgtgctcccgcgactgttgctccggaccaggtggctccaatcgaggcaacacttgctcggacaagaagggcgccaaggccggcagtctcactggcgagaagatcatacccactccacagagcctgctgtaagttgattttggtgtccaattaggcctatccttagctgtcagtctggttcgttcgttcgttcgatacccaaaaactatatccctcggccccaaaatgtgtaacgccaattgctgttcgaatcccaaaggcaaggctggcaccaaaaccgccatcaataatacaaattggccagatatcataccaactccagaaagtctgctgtaagtccaaactttgtttacttcgggcaatctaaatcaaaattcaagtgacggagctggatcgtgtccttgatctttccgccgctatcaagaaacgagctcaacttagatctcttgaatttgaatatagacattccagtattccaggcttatcaattttcgtcagtcgacgctggctactcattaaaatcccattcgaagaatctttaatctgcatatgattatatggagtggtttcgcctaggtagaaatacacagtagaaaacgtatatgtattcgaaagagtcaagtgttcaggaaatatttttttaattaactaatttcctcattattttagagttaatatttttagagcacgttttaagcagctgggcgctcttcagagtgccttgttttaattatttatattttctctgtgtaccaaacattttgctgataaaaaagccaagattgccaactgcttatgtaagtgtttaatggccaagttaactgggaaatcggctcccgctgattggctgcgcaaaacgggtgtgttccctgatcttgacataggcctccacttcgtaatctttgcctcagatacgggtaattggccaatggttcgataaagaacgcaactaaaacatgttgccgcattgattaatttcgaaactagtttccattccgatggaatcacaatgctgaatattgatgaagcggcgaaaaagccgcgtcgcgtgtttagatcaaatttccataaatgtctggctactgaaagaccaatttattaaggaattgtgaataaagttcccaattagtgcaagttatgcgtgattatatgttcccgtcttaatgacgcactttatgtttactgttcgaaggccagcttttgttttttccatgtaatactgataatgcttagcatcgtctcatgcccggcttatcaaatcatttgaactgatccgaaaacaaacacgtgggaggtcgtgagttcagttttggtaacaacatcttaacataactcgacttgcagttcaagttcgagcaatttaacccagaaccaggtgaattctttatggctctaatagcacttaattgctgttttcaagttactcgataatagcaagcgagtcatgacaatgttaccacattcttttgattgccaagaaaaaccataaatgatagggggtccttatctggatgccttcatatccgtttatcacaaacctttgccaacctactcagcaacaaatcttttccacaattgcagcggaaatggaaaaatccaatgcgagcttacgcacgaagagctaagagcccttcgggttctcaacgaagacacgtttgtagaccaattcttctgagttctgtttctctgtgttcaattgtcatttactttattattaaaatacatgtattcacagtactgtgattggcataaggctgataagaatcttcaagaagacactttcagttcttcaaagatattcttatccataaattcgatttttgtttttgtcctttttaagaatatctatgtaattcgataatgaattcatgtgtccatgatctctaaagtttttagtcttctgagttctcactgtataatatttgtgttgttttcttatcatatcatcgaactgattgtacataaatgaattatttgttttgataaaacttcgattggtgaattgaatctaattatattcctgtgtgtggaacttcatcaattggtaaatgtatcttttttgttccctctgggaattccattcttcatttcattgtttaccatcgtggcgagtagataaaaaggatctctggcctgttaacatgtacccacccaaatttatcgcagttcactcgtatattgtttacacttttattagttcaaagatcaccctgcaatactcacccaaacaagatgtaaaactaattttggttttcgacaggtatccctatgaggtcatcgaggagatcgccgacttcattaccaaggggtccggcatgcgccccaagatcggcatcatctgcggctctgggctaggctcattggccgatatgatccaggacccgaagatcttcgagtatgagaagatccccaacttcccggtatctacagttgagggccatgccggacgactggtggtcggcacactcgagggcgccactgtgatggcgatgcagggcaggttccacttctacgagggctatccgctggccaagtgctcaatgccggttcgcgtgatgaagctgtgcggtgtggaatacctgttcgccaccaatgcggctggtggaatcaatccacggttcgcggtgggcgacatcatgctgatgcatgaccatgtcaacatgctgggctttgccggaaattctccgctccagggacccaatgacccacgcttcggaccccgctttcccgccctggtgaactcgtacaacaaggacctaatcaacaaggccatcgagatcgccaaggccatgggcatagagtccaacattcacgtcggcgtatactcctgtctgggtggtcccaactacgagaccatcgccgagctgaaggccctgcgcatgatgggcgtggatgcggtgggcatgtccaccgtacatgaggtcatcactgcacggcactgcgacatgaaggtattcgccttcagcctcatcacaaataagtgcgccaccgagtacagcgataagaaggacgatgaggccaaccacgatgaggtgagttcctagagtcctactagttgattaaattaagccactaactttcatgtttatcaccatctaggttatggctgtggccaagaacaggcaaaaggcctgctgcgaactggtctcccgactcatccgggaaatccacttggcatccgcttaagtagcgaagcgaagaagtagcgttggattctaaatttaaaaatagttaattctctgagctcgcatctaagactcacatgacacggattgtccaaaatcttacagtataggcctagggaatagtttaactaaattatgtaaaataaactagctatatcacaatttcagcacattttgtttgttgttgggtaaacttttaaaaaagtctacgatttgattgcatacttttgcgcggcgaacagaaattccagaacagttcaaggtgatcattcccctggtcacccaaataaaaaaaaacccaacggaaagttaaaatataatgaaatgttatttaataaaaattaaatatgcgcaataatttttaacatattataaacacaaatacatagttataaaattagggaaataaagctaacattaaaatgatttcgaattgaaaacaatgacataacgagagagctcgttggctttttggtgtttgcagagattgaacaaatgcaatttcgttaaatcgataaaatattaaataaaataatggtaaaacaactcaacttaatattatgtacaggtatacgatataatagaagaactccaaactccgcacagctaccgaatgaagcgagttgaaatttattgcctggcatcgtgcacttgcatagtagtcgttacatatataaaggctatgtaatatgtgtaaaatagagagtacatagggatatgcgcacgtgtgtatatgatatactaaataggcctatagaatacgatagttcagatctgtgtctgtgtccgttgcaaaagcatcgccgcctacaaaaagtgcttataaaagtgcttggtttgtgttttgtgattgtgttcaagtctataaagttgcattgtgcctgcctctctcctaaaacagccctcgctccttcttcagcttggtctgtttccagatgggcagctgctcgaattccgcccggctgcatcccagtgccgcctggaagtcctccgcattaaggtagacctccaggcgggtgggctccacaccttcgggcagcggtcgggctttcaggacttccaggggatactcggtctgcgtcatttgtgccagcattgtggcgatcgatatggaagcatcagttcgcccatcctgcagggggaacaaaaacaataaatattctgcatatcatttgctacttcccaacttacttcttcgttgatttctcttacatccggacgttctgtccagtcgggaaacagcgccttaaaggccagtggctccaggcctgcccacacaacctggcctttgatgccatggaagggttcattctcgttctcgccgtgcttggcacgccaatagtcaacggctgtctcgagggcagcacgtctctctgagatccagcgatttactccagcgcgattttcgttggtgggactgcttcgctcatcggtgtttactatgagaaaagtaaaaaggttaattactatccaaacgcatcgttgactatacagtacgtactcttcacatcttccagaggccaccatcccatccagagccacaactcatcgccgtcgtccagcaaaaagatagtcggctgccttgcattgtacagctgcgactggctgaagggatacggactatgcagatcctggcagcgcagcggatcgctcagttcgagggctttgaaaacaccctgagtgctggagaagttgaagatccttatttggtaatcgaacgacttggtggacttaagcaggctgccatattcatttctttcatccttcaatcccagggccttcttgcactgatcgtcgtcggaaccctcctccacctcagttaggttggcagttt

SEQ ID NO: 4094 - DNA, 1913 bp, DROSOPHILA
cctacaggaaaccaaattcaggcacagactccatccaaaattcgctgcctagtacgtagttgtaagggctaagacctccaactaacccgcagaatgtgctcccgcgactgttgctccggaccaggtggctccaatcgaggcaacacttgctcggacaagaagggcgccaaggccggcagtctcactggcgagaagatcatacccactccacagagcctgctgtatccctatgaggtcatcgaggagatcgccgacttcattaccaaggggtccggcatgcgccccaagatcggcatcatctgcggctctgggctaggctcattggccgatatgatccaggacccgaagatcttcgagtatgagaagatccccaacttcccggtatctacagttgagggccatgccggacgactggtggtcggcacactcgagggcgccactgtgatggcgatgcagggcaggttccacttctacgagggctatccgctggccaagtgctcaatgccggttcgcgtgatgaagctgtgcggtgtggaatacctgttcgccaccaatgcggctggtggaatcaatccacggttcgcggtgggcgacatcatgctgatgcatgaccatgtcaacatgctgggctttgccggaaattctccgctccagggacccaatgacccacgcttcggaccccgctttcccgccctggtgaactcgtacaacaaggacctaatcaacaaggccatcgagatcgccaaggccatgggcatagagtccaacattcacgtcggcgtatactcctgtctgggtggtcccaactacgagaccatcgccgagctgaaggccctgcgcatgatgggcgtggatgcggtgggcatgtccaccgtacatgaggtcatcactgcacggcactgcgacatgaaggtattcgccttcagcctcatcacaaataagtgcgccaccgagtacagcgataagaaggacgatgaggccaaccacgatgaggttatggctgtggccaagaacaggcaaaaggcctgctgcgaactggtctcccgactcatccgggaaatccacttggcatccgcttaagtagcgaagcgaagaagtagcgttggattctaaatttaaaaatagttaattctctgagctcgcatctaagactcacatgacacggattgtccaaaatcttacagtataggcctagggaatagtttaactaaattatgtaaaataaactagctatatcacaatttcagcacattttgtttgttgttgggtaaacttttaaaaaagtctacgatttgattgcatacttttgcgcggcgaacagaaattccagaacagttcaaggtgatcattcccctggtcacccaaataaaaaaaaacccaacggaaagttaaaatataatgaaatgttatttaataaaaattaaatatgcgcaataatttttaacatattataaacacaaatacatagttataaaattagggaaataaagctaacattaaaatgatttcgaattgaaaacaatgacataacgagagagctcgttggctttttggtgtttgcagagattgaacaaatgcaatttcgttaaatcgataaaatattaaataaaataatggtaaaacaactcaacttaatattatgtacaggtatacgatataatagaagaactccaaactccgcacagctaccgaatgaagcgagttgaaatttattgcctggcatcgtgcacttgcatagtagtcgttacatatataaaggctatgtaatatgtgtaaaatagagagtacatagggatatgcgcacgtgtgtatatgatatactaaataggcctatagaatacgatagttcagatctgtgtctgtgtccgttgcaaaagcatcgccgcctacaaaaagtgcttataaaagtgctt

SEQ ID NO: 4095 - protein, 328 aa, DROSOPHILA
MCSRDCCSGPGGSNRGNTCSDKKGAKAGSLTGEKIIPTPQSLLYPYEVIEEIADFITKGSGMRPKIGIICGSGLGSLADMIQDPKIFEYEKIPNFPVSTVEGHAGRLVVGTLEGATVMAMQGRFHFYEGYPLAKCSMPVRVMKLCGVEYLFATNAAGGINPRFAVGDIMLMHDHVNMLGFAGNSPLQGPNDPRFGPRFPALVNSYNKDLINKAIEIAKAMGIESNIHVGVYSCLGGPNYETIAELKALRMMGVDAVGMSTVHEVITARHCDMKVFAFSLITNKCATEYSDKKDDEANHDEVMAVAKNRQKACCELVSRLIREIHLASA

SEQ ID NO: 4096 - DNA, 3349 bp, DROSOPHILA
gatacggacgcggaggtggccacgcgactccagaagatcgaaaagtccttggccaatgagcgagtgcacacgaacgagctgcaaaagtcgctgcaggccacctacagtgtggtggacacactcaagagtcggctaagcacgctggtaaggattagagttgaacttctatatttgaatattcatactttaacgattacttcgtatgccctcaggaaaagcaggctcaggatgtcagtcgactgcagacgaatctctacaagacagagtcccggacgaacaagctggagggtatgctgaacctgctgctgaagtgccggaatggccccaatgccaattgcccctaaacagaactgcatttccccacgctattattaaatgttagttaacttaattgaccactccgttcatgtgtagctagatgctcctgcttgtaagccattcccgaatgcgagtcgagtgcctctgtagtctgtagaattagcccacggatcgggctattagtacttaagcgagaacgtgtgtcataaatgtatcgagatgtgaagttttagacgtaagcgcaccaccgcactctgcaccgctcttcatgtgggtggtgcagtgattagtttctgcatgtatctgtatataattttaatgtatatgagaaatcactgcacgaataaatgcattttctgattttaatgggtctttcatgggatatttaacaaaggaaatctatttatctggaagttatcatgaaaaaaaaggtaaagtgctgcaatatttacttttatatattggctacaacttaacgcgcaacataaaatttggttatttttccttttaaatgcaataatggtgagtcaacaactatttttatgacctcggctgtaagctgaccttttagcggggattcccaccagcggagacaatcgataactgtaagaataatatcgagtgtgggcaaggctgcgcaatattcgctagtatcgaactgattgccatctctatcaccaataacaaacaaataattggactgcacaatagaattattatcagtataaatataggggacaagaccagcatgattggaaccatgccaccgtagtttcattcacaacaacaaagcactactcactggaaacatcccgaaaagcaagcagtgacgtcactggcaaaacaaagcaaaaactgcgcagaaaaaccagggaaatctgttaagcaaggtccatcgttaaaaaggggcggggggtgttacagaaactgatcccccagatttcacttttaccacaattaaaactgattaaaaatcaaagcgctgcgagttcaaagtattcagttcacgatgacgcgcgatgagaaactgccacttaaacaggcggaggtctccatccaaaggtttcaggatgtggcggtaggttatttactatatcttctgaagagcggaactaattccttaacactcataggtgccccaccatctgagcctactgaaaaaccatcgcagcaatatagaaaaaagcctggcgctcggcgactggcaaaaaatcaaaaaggaggaactcaatgctatgagggtcattaagcagatcaagaatctacttctggaaatggatgcactgcgagaaaaagtacgggaggaggatctggaacgtttcgacgacctaatgaaacctggcagggatactgccttcgctggcatgaaggaatttgcgggtaagtttgaaatgccatctaaattctttcggctttaccaacacacctactgtatttttagagctccaactcaaatcacccacctccactttgagttctcagtacgacgacgatctggacaatcagccacaggaggtggatatgaacagtctacccgcacaccgccacatgccccagctgcaactcaatttccagctggaggaacaccaattggcgcagaggcaagcctgcctggatcagatggagaacctgcaacaggagatctacgatctgcacgggatgttccagggaatgcgtcaactgactgcagagcaatcagtggcggtggaaaagatagcagacaatgcggaggaagctctggagaatgtccagcagggcgaattgaatctgcgccgggcgctcacctacaagaaggccatgtaccccgtagtcggagctcttctgggcacctgtgtgggaggacccattggtctggtggcgggcatgaaagctggaggattggcggcagtaggatgtggcatcctcggcttcaccggtggctctgtgctaaaggccaatcccaatgtaatgcatggcaacatcgaggaggagcaggtggaaccggatagcgagtcaactgagagactggagctaaaagagaagccagaatgacccgcaggaggaagtgcccgatccgcatccacggctctggccaccacgcacatatggtcggcgaacacacgacgtttggaggcagccaccaacggagtgatttgcagcgtgcgcagctattgttccgttcagtagaaatttgaccacgattttagttcaatatccccattttgtgattttccacgtgcaatagagctaatgagcataatgtaactgcactttagtttaagcgttggatacttgttgttcacatgacaccgcaaatgtgtgtagattttaaggctttaatatgcaataataactcgtagctttaaaaaagtaatgatactatttgattgccatgttgagaagttcagactatatctgggtttttcagaacttgtttgggctttaatatgcaatatatactcttagctataacatctttgtagaaaaagcctacaaaatctcctaaactaagcgaggacttataaactacgataagataccagatgggtaacccagccccggatttataggggaacattaaccgtggtccaggcctgtttgaagttcttcttctgcgagtgctgcttctttcttagacgcttggcggtcttcttcttcttgaaccacgcaggataattgccgtactgatctttgagggtcttgctgttgaaaatgtgctccacgcccgtgttctcgttggtcaccttgactttctcgcccttctccagactctcctggtgctcgtagatcaattcctgctcctccttggatttggcctcctgttttaggaatacaatttcttctttaataaggatataaaatacgtaacaagaatgaaggtagtatcgcgataaactaagccggtttttcgcatattacatgcatacaatacatataatacattaggtaaattggtatatttgtaggtgggtatatcacataactaacccttttgagctccttggcggtcttaatttcgaccacatcgcttatatccttcatgatctcattt

SEQ ID NO: 4097 - DNA, 1233 bp, DROSOPHILA
aacaaacaaataattggactgcacaatagaattattatcagtataaatataggggacaagaccagcatgattggaaccatgccaccgtagtttcattcacaacaacaaagcactactcactggaaacatcccgaaaagcaagcagtgacgtcactggcaaaacaaagcaaaaactgcgcagaaaaaccagggaaatctgttaagcaaggtccatcgttaaaaaggggcggggggtgttacagaaactgatcccccagatttcacttttaccacaattaaaactgattaaaaatcaaagcgctgcgagttcaaagtattcagttcacgatgacgcgcgatgagaaactgccacttaaacaggcggaggtctccatccaaaggtttcaggatgtggcggtgccccaccatctgagcctactgaaaaaccatcgcagcaatatagaaaaaagcctggcgctcggcgactggcaaaaaatcaaaaaggaggaactcaatgctatgagggtcattaagcagatcaagaatctacttctggaaatggatgcactgcgagaaaaagtacgggaggaggatctggaacgtttcgacgacctaatgaaacctggcagggatactgccttcgctggcatgaaggaatttgcggagctccaactcaaatcacccacctccactttgagttctcagtacgacgacgatctggacaatcagccacaggaggtggatatgaacagtctacccgcacaccgccacatgccccagctgcaactcaatttccagctggaggaacaccaattggcgcagaggcaagcctgcctggatcagatggagaacctgcaacaggagatctacgatctgcacgggatgttccagggaatgcgtcaactgactgcagagcaatcagtggcggtggaaaagatagcagacaatgcggaggaagctctggagaatgtccagcagggcgaattgaatctgcgccgggcgctcacctacaagaaggccatgtaccccgtagtcggagctcttctgggcacctgtgtgggaggacccattggtctggtggcgggcatgaaagctggaggattggcggcagtaggatgtggcatcctcggcttcaccggtggctctgtgctaaaggccaatcccaatgtaatgcatggcaacatcgaggaggagcaggtggaaccggatagcgagtcaactgagagactggagctaaaagagaagccagaatga

SEQ ID NO: 4098 - protein, 301 aa, DROSOPHILA
MTRDEKLPLKQAEVSIQRFQDVAVPHHLSLLKNHRSNIEKSLALGDWQKIKKEELNAMRVIKQIKNLLLEMDALREKVREEDLERFDDLMKPGRDTAFAGMKEFAELQLKSPTSTLSSQYDDDLDNQPQEVDMNSLPAHRHMPQLQLNFQLEEHQLAQRQACLDQMENLQQEIYDLHGMFQGMRQLTAEQSVAVEKIADNAEEALENVQQGELNLRRALTYKKAMYPVVGALLGTCVGGPIGLVAGMKAGGLAAVGCGILGFTGGSVLKANPNVMHGNIEEEQVEPDSESTERLELKEKPE

SEQ ID NO: 4099 - DNA, 6880 bp, DROSOPHILA
ctgatgctgattgcacttttgcgtaatgctatcaaagttgtttacaggaataatactatgctattgccatcaaagtcactgcgactaagcgcacacgacaaatatgtgcccccccatgaagtgataagctctttcatgttgcatccttatcagtgttgattttattttcacacttttttcaggcttattgttttgctaaagatctcattattaggttaagtacttacgggtgcgactgggatctgcttggcaaatcccttatcgcagtgatgaatgggttgctgggtgattcaaaagcgattccatattacaacagaccaaatcgtgttgatcccaaggtgtctgatgacctggtaaaactttccgactagccaactgataagccaagtcagaggttagtgtacgaattatagaaaattctcggcaagtggcatgtttttgaaaatgatttaaaaatagattcacagattattttgcttggcgaatattgtgtttcttaaaacaattgacaaatgacaatatttctctataaagttgacttaattcacttgtgcttcccaggtgtttctcaaagagctataccatatcatatcagaagtccataaaaatcttatcgtaaacacttttgcgaaatcatttatggtcctctctcacgtttcttatcgaatgtgtaactaaaagagttgttttccttctccgtcacacactttcttttaaatatttaaatttgctcaattcaattagttaggagcaacgattccggcaatattcgcgctaaacgatttcaaattgaatgctgaacaaccagcgccggcagaggctcgacagagcgtcgctctgcatccccgagattccgatttcgattccgaacccaaatccgaagccgaatcaaagtcagaaacagaatcttttcctgaagcagtacgacgtcgactgcgccggagctccagtttataaaccctcgtccaccagacggcagcgttcactttacaatcagcggtcgagcaggcaacaaacgtgaagaaagtgcacatagtaccataccacatatatgtgcataccatatcatcgagttctggacgcggtcataaaatatcatttgtgaaacgtaacgagattacaaaaggaattccagttccagatttctaaattagttttgattcgcgaaatagaaaacgtgcacagttgattttatcataacttgaagcgcgaaattcacatttgcataaccagaagaagcgcgtccgaggcgattatataattgcagtgtatttcgattgagcaagagcatctccaacttcagctgcacaatgacgggttacaaggtggccaatggcaatggacacagcaatggaaatggaaacacgaagggaacaaatggaaccaatggacacagcaatggacacaagtcggcggactacaccgcccaggagaatcccacgtaagtggggagagttgttggttcgaagttcgagccgacataaaaagggggtattatatcggaggccctcacgccagcggctcgttaactacaatcagctttaattgaaacttccaatagttctggcttcaatgcttcgcggcttcgccttaaccccactgcactgcaccacctgtccttctgcacgcccctctcccttccttccatgctaaagcttttgtgacccgcttttcaaggggccaaatcgatatggccttggctatccagtaggccctgccagtagcctcactctatgactgaatcagtcatttaggaaactcgcttcggcctacaggaaaccaaattcaggcacagactccatccaaaattcgctgcctagtacgtagttgtaagggctaagacctccaactaacccgcagaatgtgctcccgcgactgttgctccggaccaggtggctccaatcgaggcaacacttgctcggacaagaagggcgccaaggccggcagtctcactggcgagaagatcatacccactccacagagcctgctgtaagttgattttggtgtccaattaggcctatccttagctgtcagtctggttcgttcgttcgttcgatacccaaaaactatatccctcggccccaaaatgtgtaacgccaattgctgttcgaatcccaaaggcaaggctggcaccaaaaccgccatcaataatacaaattggccagatatcataccaactccagaaagtctgctgtaagtccaaactttgtttacttcgggcaatctaaatcaaaattcaagtgacggagctggatcgtgtccttgatctttccgccgctatcaagaaacgagctcaacttagatctcttgaatttgaatatagacattccagtattccaggcttatcaattttcgtcagtcgacgctggctactcattaaaatcccattcgaagaatctttaatctgcatatgattatatggagtggtttcgcctaggtagaaatacacagtagaaaacgtatatgtattcgaaagagtcaagtgttcaggaaatatttttttaattaactaatttcctcattattttagagttaatatttttagagcacgttttaagcagctgggcgctcttcagagtgccttgttttaattatttatattttctctgtgtaccaaacattttgctgataaaaaagccaagattgccaactgcttatgtaagtgtttaatggccaagttaactgggaaatcggctcccgctgattggctgcgcaaaacgggtgtgttccctgatcttgacataggcctccacttcgtaatctttgcctcagatacgggtaattggccaatggttcgataaagaacgcaactaaaacatgttgccgcattgattaatttcgaaactagtttccattccgatggaatcacaatgctgaatattgatgaagcggcgaaaaagccgcgtcgcgtgtttagatcaaatttccataaatgtctggctactgaaagaccaatttattaaggaattgtgaataaagttcccaattagtgcaagttatgcgtgattatatgttcccgtcttaatgacgcactttatgtttactgttcgaaggccagcttttgttttttccatgtaatactgataatgcttagcatcgtctcatgcccggcttatcaaatcatttgaactgatccgaaaacaaacacgtgggaggtcgtgagttcagttttggtaacaacatcttaacataactcgacttgcagttcaagttcgagcaatttaacccagaaccaggtgaattctttatggctctaatagcacttaattgctgttttcaagttactcgataatagcaagcgagtcatgacaatgttaccacattcttttgattgccaagaaaaaccataaatgatagggggtccttatctggatgccttcatatccgtttatcacaaacctttgccaacctactcagcaacaaatcttttccacaattgcagcggaaatggaaaaatccaatgcgagcttacgcacgaagagctaagagcccttcgggttctcaacgaagacacgtttgtagaccaattcttctgagttctgtttctctgtgttcaattgtcatttactttattattaaaatacatgtattcacagtactgtgattggcataaggctgataagaatcttcaagaagacactttcagttcttcaaagatattcttatccataaattcgatttttgtttttgtcctttttaagaatatctatgtaattcgataatgaattcatgtgtccatgatctctaaagtttttagtcttctgagttctcactgtataatatttgtgttgttttcttatcatatcatcgaactgattgtacataaatgaattatttgttttgataaaacttcgattggtgaattgaatctaattatattcctgtgtgtggaacttcatcaattggtaaatgtatcttttttgttccctctgggaattccattcttcatttcattgtttaccatcgtggcgagtagataaaaaggatctctggcctgttaacatgtacccacccaaatttatcgcagttcactcgtatattgtttacacttttattagttcaaagatcaccctgcaatactcacccaaacaagatgtaaaactaattttggttttcgacaggtatccctatgaggtcatcgaggagatcgccgacttcattaccaaggggtccggcatgcgccccaagatcggcatcatctgcggctctgggctaggctcattggccgatatgatccaggacccgaagatcttcgagtatgagaagatccccaacttcccggtatctacagttgagggccatgccggacgactggtggtcggcacactcgagggcgccactgtgatggcgatgcagggcaggttccacttctacgagggctatccgctggccaagtgctcaatgccggttcgcgtgatgaagctgtgcggtgtggaatacctgttcgccaccaatgcggctggtggaatcaatccacggttcgcggtgggcgacatcatgctgatgcatgaccatgtcaacatgctgggctttgccggaaattctccgctccagggacccaatgacccacgcttcggaccccgctttcccgccctggtgaactcgtacaacaaggacctaatcaacaaggccatcgagatcgccaaggccatgggcatagagtccaacattcacgtcggcgtatactcctgtctgggtggtcccaactacgagaccatcgccgagctgaaggccctgcgcatgatgggcgtggatgcggtgggcatgtccaccgtacatgaggtcatcactgcacggcactgcgacatgaaggtattcgccttcagcctcatcacaaataagtgcgccaccgagtacagcgataagaaggacgatgaggccaaccacgatgaggtgagttcctagagtcctactagttgattaaattaagccactaactttcatgtttatcaccatctaggttatggctgtggccaagaacaggcaaaaggcctgctgcgaactggtctcccgactcatccgggaaatccacttggcatccgcttaagtagcgaagcgaagaagtagcgttggattctaaatttaaaaatagttaattctctgagctcgcatctaagactcacatgacacggattgtccaaaatcttacagtataggcctagggaatagtttaactaaattatgtaaaataaactagctatatcacaatttcagcacattttgtttgttgttgggtaaacttttaaaaaagtctacgatttgattgcatacttttgcgcggcgaacagaaattccagaacagttcaaggtgatcattcccctggtcacccaaataaaaaaaaacccaacggaaagttaaaatataatgaaatgttatttaataaaaattaaatatgcgcaataatttttaacatattataaacacaaatacatagttataaaattagggaaataaagctaacattaaaatgatttcgaattgaaaacaatgacataacgagagagctcgttggctttttggtgtttgcagagattgaacaaatgcaatttcgttaaatcgataaaatattaaataaaataatggtaaaacaactcaacttaatattatgtacaggtatacgatataatagaagaactccaaactccgcacagctaccgaatgaagcgagttgaaatttattgcctggcatcgtgcacttgcatagtagtcgttacatatataaaggctatgtaatatgtgtaaaatagagagtacatagggatatgcgcacgtgtgtatatgatatactaaataggcctatagaatacgatagttcagatctgtgtctgtgtccgttgcaaaagcatcgccgcctacaaaaagtgcttataaaagtgcttggtttgtgttttgtgattgtgttcaagtctataaagttgcattgtgcctgcctctctcctaaaacagccctcgctccttcttcagcttggtctgtttccagatgggcagctgctcgaattccgcccggctgcatcccagtgccgcctggaagtcctccgcattaaggtagacctccaggcgggtgggctccacaccttcgggcagcggtcgggctttcaggacttccaggggatactcggtctgcgtcatttgtgccagcattgtggcgatcgatatggaagcatcagttcgcccatcctgcagggggaacaaaaacaataaatattctgcatatcatttgctacttcccaacttacttcttcgttgatttctcttacatccggacgttctgtccagtcgggaaacagcgccttaaaggccagtggctccaggcctgcccacacaacctggcctttgatgccatggaagggttcattctcgttctcgccgtgcttggcacgccaatagtcaacggctgtctcgagggcagcacgtctctctgagatccagcgatttactccagcgcgattttcgttggtgggactgcttcgctcatcggtgtttactatgagaaaagtaaaaaggttaattactatccaaacgcatcgttgactatacagtacgtactcttcacatcttccagaggccaccatcccatccagagccacaactcatcgccgtcgtccagcaaaaagatagtcggctgccttgcattgtacagctgcgactggctgaagggatacggactatgcagatcctggcagcgcagcggatcgctcagttcgagggctttgaaaacaccctgagtgctggagaagttgaagatccttatttggtaatcgaacgacttggtggacttaagcaggctgccatattcatttctttcatccttcaatcccagggccttcttgcactgatcgtcgtcggaaccctcctccacctcagttaggttggcagttt

SEQ ID NO: 4100 - DNA, 2133 bp, DROSOPHILA
tcgagcaggcaacaaacgtgaagaaagtgcacatagtaccataccacatatatgtgcataccatatcatcgagttctggacgcggtcataaaatatcatttgtgaaacgtaacgagattacaaaaggaattccagttccagatttctaaattagttttgattcgcgaaatagaaaacgtgcacagttgattttatcataacttgaagcgcgaaattcacatttgcataaccagaagaagcgcgtccgaggcgattatataattgcagtgtatttcgattgagcaagagcatctccaacttcagctgcacaatgacgggttacaaggtggccaatggcaatggacacagcaatggaaatggaaacacgaagggaacaaatggaaccaatggacacagcaatggacacaagtcggcggactacaccgcccaggagaatcccacgtatccctatgaggtcatcgaggagatcgccgacttcattaccaaggggtccggcatgcgccccaagatcggcatcatctgcggctctgggctaggctcattggccgatatgatccaggacccgaagatcttcgagtatgagaagatccccaacttcccggtatctacagttgagggccatgccggacgactggtggtcggcacactcgagggcgccactgtgatggcgatgcagggcaggttccacttctacgagggctatccgctggccaagtgctcaatgccggttcgcgtgatgaagctgtgcggtgtggaatacctgttcgccaccaatgcggctggtggaatcaatccacggttcgcggtgggcgacatcatgctgatgcatgaccatgtcaacatgctgggctttgccggaaattctccgctccagggacccaatgacccacgcttcggaccccgctttcccgccctggtgaactcgtacaacaaggacctaatcaacaaggccatcgagatcgccaaggccatgggcatagagtccaacattcacgtcggcgtatactcctgtctgggtggtcccaactacgagaccatcgccgagctgaaggccctgcgcatgatgggcgtggatgcggtgggcatgtccaccgtacatgaggtcatcactgcacggcactgcgacatgaaggtattcgccttcagcctcatcacaaataagtgcgccaccgagtacagcgataagaaggacgatgaggccaaccacgatgaggttatggctgtggccaagaacaggcaaaaggcctgctgcgaactggtctcccgactcatccgggaaatccacttggcatccgcttaagtagcgaagcgaagaagtagcgttggattctaaatttaaaaatagttaattctctgagctcgcatctaagactcacatgacacggattgtccaaaatcttacagtataggcctagggaatagtttaactaaattatgtaaaataaactagctatatcacaatttcagcacattttgtttgttgttgggtaaacttttaaaaaagtctacgatttgattgcatacttttgcgcggcgaacagaaattccagaacagttcaaggtgatcattcccctggtcacccaaataaaaaaaaacccaacggaaagttaaaatataatgaaatgttatttaataaaaattaaatatgcgcaataatttttaacatattataaacacaaatacatagttataaaattagggaaataaagctaacattaaaatgatttcgaattgaaaacaatgacataacgagagagctcgttggctttttggtgtttgcagagattgaacaaatgcaatttcgttaaatcgataaaatattaaataaaataatggtaaaacaactcaacttaatattatgtacaggtatacgatataatagaagaactccaaactccgcacagctaccgaatgaagcgagttgaaatttattgcctggcatcgtgcacttgcatagtagtcgttacatatataaaggctatgtaatatgtgtaaaatagagagtacatagggatatgcgcacgtgtgtatatgatatactaaataggcctatagaatacgatagttcagatctgtgtctgtgtccgttgcaaaagcatcgccgcctacaaaaagtgcttataaaagtgctt

SEQ ID NO: 4101 - protein, 329 aa, DROSOPHILA
MTGYKVANGNGHSNGNGNTKGTNGTNGHSNGHKSADYTAQENPTYPYEVIEEIADFITKGSGMRPKIGIICGSGLGSLADMIQDPKIFEYEKIPNFPVSTVEGHAGRLVVGTLEGATVMAMQGRFHFYEGYPLAKCSMPVRVMKLCGVEYLFATNAAGGINPRFAVGDIMLMHDHVNMLGFAGNSPLQGPNDPRFGPRFPALVNSYNKDLINKAIEIAKAMGIESNIHVGVYSCLGGPNYETIAELKALRMMGVDAVGMSTVHEVITARHCDMKVFAFSLITNKCATEYSDKKDDEANHDEVMAVAKNRQKACCELVSRLIREIHLASA

SEQ ID NO: 4102 - DNA, 6881 bp, DROSOPHILA
tctgatgctgattgcacttttgcgtaatgctatcaaagttgtttacaggaataatactatgctattgccatcaaagtcactgcgactaagcgcacacgacaaatatgtgcccccccatgaagtgataagctctttcatgttgcatccttatcagtgttgattttattttcacacttttttcaggcttattgttttgctaaagatctcattattaggttaagtacttacgggtgcgactgggatctgcttggcaaatcccttatcgcagtgatgaatgggttgctgggtgattcaaaagcgattccatattacaacagaccaaatcgtgttgatcccaaggtgtctgatgacctggtaaaactttccgactagccaactgataagccaagtcagaggttagtgtacgaattatagaaaattctcggcaagtggcatgtttttgaaaatgatttaaaaatagattcacagattattttgcttggcgaatattgtgtttcttaaaacaattgacaaatgacaatatttctctataaagttgacttaattcacttgtgcttcccaggtgtttctcaaagagctataccatatcatatcagaagtccataaaaatcttatcgtaaacacttttgcgaaatcatttatggtcctctctcacgtttcttatcgaatgtgtaactaaaagagttgttttccttctccgtcacacactttcttttaaatatttaaatttgctcaattcaattagttaggagcaacgattccggcaatattcgcgctaaacgatttcaaattgaatgctgaacaaccagcgccggcagaggctcgacagagcgtcgctctgcatccccgagattccgatttcgattccgaacccaaatccgaagccgaatcaaagtcagaaacagaatcttttcctgaagcagtacgacgtcgactgcgccggagctccagtttataaaccctcgtccaccagacggcagcgttcactttacaatcagcggtcgagcaggcaacaaacgtgaagaaagtgcacatagtaccataccacatatatgtgcataccatatcatcgagttctggacgcggtcataaaatatcatttgtgaaacgtaacgagattacaaaaggaattccagttccagatttctaaattagttttgattcgcgaaatagaaaacgtgcacagttgattttatcataacttgaagcgcgaaattcacatttgcataaccagaagaagcgcgtccgaggcgattatataattgcagtgtatttcgattgagcaagagcatctccaacttcagctgcacaatgacgggttacaaggtggccaatggcaatggacacagcaatggaaatggaaacacgaagggaacaaatggaaccaatggacacagcaatggacacaagtcggcggactacaccgcccaggagaatcccacgtaagtggggagagttgttggttcgaagttcgagccgacataaaaagggggtattatatcggaggccctcacgccagcggctcgttaactacaatcagctttaattgaaacttccaatagttctggcttcaatgcttcgcggcttcgccttaaccccactgcactgcaccacctgtccttctgcacgcccctctcccttccttccatgctaaagcttttgtgacccgcttttcaaggggccaaatcgatatggccttggctatccagtaggccctgccagtagcctcactctatgactgaatcagtcatttaggaaactcgcttcggcctacaggaaaccaaattcaggcacagactccatccaaaattcgctgcctagtacgtagttgtaagggctaagacctccaactaacccgcagaatgtgctcccgcgactgttgctccggaccaggtggctccaatcgaggcaacacttgctcggacaagaagggcgccaaggccggcagtctcactggcgagaagatcatacccactccacagagcctgctgtaagttgattttggtgtccaattaggcctatccttagctgtcagtctggttcgttcgttcgttcgatacccaaaaactatatccctcggccccaaaatgtgtaacgccaattgctgttcgaatcccaaaggcaaggctggcaccaaaaccgccatcaataatacaaattggccagatatcataccaactccagaaagtctgctgtaagtccaaactttgtttacttcgggcaatctaaatcaaaattcaagtgacggagctggatcgtgtccttgatctttccgccgctatcaagaaacgagctcaacttagatctcttgaatttgaatatagacattccagtattccaggcttatcaattttcgtcagtcgacgctggctactcattaaaatcccattcgaagaatctttaatctgcatatgattatatggagtggtttcgcctaggtagaaatacacagtagaaaacgtatatgtattcgaaagagtcaagtgttcaggaaatatttttttaattaactaatttcctcattattttagagttaatatttttagagcacgttttaagcagctgggcgctcttcagagtgccttgttttaattatttatattttctctgtgtaccaaacattttgctgataaaaaagccaagattgccaactgcttatgtaagtgtttaatggccaagttaactgggaaatcggctcccgctgattggctgcgcaaaacgggtgtgttccctgatcttgacataggcctccacttcgtaatctttgcctcagatacgggtaattggccaatggttcgataaagaacgcaactaaaacatgttgccgcattgattaatttcgaaactagtttccattccgatggaatcacaatgctgaatattgatgaagcggcgaaaaagccgcgtcgcgtgtttagatcaaatttccataaatgtctggctactgaaagaccaatttattaaggaattgtgaataaagttcccaattagtgcaagttatgcgtgattatatgttcccgtcttaatgacgcactttatgtttactgttcgaaggccagcttttgttttttccatgtaatactgataatgcttagcatcgtctcatgcccggcttatcaaatcatttgaactgatccgaaaacaaacacgtgggaggtcgtgagttcagttttggtaacaacatcttaacataactcgacttgcagttcaagttcgagcaatttaacccagaaccaggtgaattctttatggctctaatagcacttaattgctgttttcaagttactcgataatagcaagcgagtcatgacaatgttaccacattcttttgattgccaagaaaaaccataaatgatagggggtccttatctggatgccttcatatccgtttatcacaaacctttgccaacctactcagcaacaaatcttttccacaattgcagcggaaatggaaaaatccaatgcgagcttacgcacgaagagctaagagcccttcgggttctcaacgaagacacgtttgtagaccaattcttctgagttctgtttctctgtgttcaattgtcatttactttattattaaaatacatgtattcacagtactgtgattggcataaggctgataagaatcttcaagaagacactttcagttcttcaaagatattcttatccataaattcgatttttgtttttgtcctttttaagaatatctatgtaattcgataatgaattcatgtgtccatgatctctaaagtttttagtcttctgagttctcactgtataatatttgtgttgttttcttatcatatcatcgaactgattgtacataaatgaattatttgttttgataaaacttcgattggtgaattgaatctaattatattcctgtgtgtggaacttcatcaattggtaaatgtatcttttttgttccctctgggaattccattcttcatttcattgtttaccatcgtggcgagtagataaaaaggatctctggcctgttaacatgtacccacccaaatttatcgcagttcactcgtatattgtttacacttttattagttcaaagatcaccctgcaatactcacccaaacaagatgtaaaactaattttggttttcgacaggtatccctatgaggtcatcgaggagatcgccgacttcattaccaaggggtccggcatgcgccccaagatcggcatcatctgcggctctgggctaggctcattggccgatatgatccaggacccgaagatcttcgagtatgagaagatccccaacttcccggtatctacagttgagggccatgccggacgactggtggtcggcacactcgagggcgccactgtgatggcgatgcagggcaggttccacttctacgagggctatccgctggccaagtgctcaatgccggttcgcgtgatgaagctgtgcggtgtggaatacctgttcgccaccaatgcggctggtggaatcaatccacggttcgcggtgggcgacatcatgctgatgcatgaccatgtcaacatgctgggctttgccggaaattctccgctccagggacccaatgacccacgcttcggaccccgctttcccgccctggtgaactcgtacaacaaggacctaatcaacaaggccatcgagatcgccaaggccatgggcatagagtccaacattcacgtcggcgtatactcctgtctgggtggtcccaactacgagaccatcgccgagctgaaggccctgcgcatgatgggcgtggatgcggtgggcatgtccaccgtacatgaggtcatcactgcacggcactgcgacatgaaggtattcgccttcagcctcatcacaaataagtgcgccaccgagtacagcgataagaaggacgatgaggccaaccacgatgaggtgagttcctagagtcctactagttgattaaattaagccactaactttcatgtttatcaccatctaggttatggctgtggccaagaacaggcaaaaggcctgctgcgaactggtctcccgactcatccgggaaatccacttggcatccgcttaagtagcgaagcgaagaagtagcgttggattctaaatttaaaaatagttaattctctgagctcgcatctaagactcacatgacacggattgtccaaaatcttacagtataggcctagggaatagtttaactaaattatgtaaaataaactagctatatcacaatttcagcacattttgtttgttgttgggtaaacttttaaaaaagtctacgatttgattgcatacttttgcgcggcgaacagaaattccagaacagttcaaggtgatcattcccctggtcacccaaataaaaaaaaacccaacggaaagttaaaatataatgaaatgttatttaataaaaattaaatatgcgcaataatttttaacatattataaacacaaatacatagttataaaattagggaaataaagctaacattaaaatgatttcgaattgaaaacaatgacataacgagagagctcgttggctttttggtgtttgcagagattgaacaaatgcaatttcgttaaatcgataaaatattaaataaaataatggtaaaacaactcaacttaatattatgtacaggtatacgatataatagaagaactccaaactccgcacagctaccgaatgaagcgagttgaaatttattgcctggcatcgtgcacttgcatagtagtcgttacatatataaaggctatgtaatatgtgtaaaatagagagtacatagggatatgcgcacgtgtgtatatgatatactaaataggcctatagaatacgatagttcagatctgtgtctgtgtccgttgcaaaagcatcgccgcctacaaaaagtgcttataaaagtgcttggtttgtgttttgtgattgtgttcaagtctataaagttgcattgtgcctgcctctctcctaaaacagccctcgctccttcttcagcttggtctgtttccagatgggcagctgctcgaattccgcccggctgcatcccagtgccgcctggaagtcctccgcattaaggtagacctccaggcgggtgggctccacaccttcgggcagcggtcgggctttcaggacttccaggggatactcggtctgcgtcatttgtgccagcattgtggcgatcgatatggaagcatcagttcgcccatcctgcagggggaacaaaaacaataaatattctgcatatcatttgctacttcccaacttacttcttcgttgatttctcttacatccggacgttctgtccagtcgggaaacagcgccttaaaggccagtggctccaggcctgcccacacaacctggcctttgatgccatggaagggttcattctcgttctcgccgtgcttggcacgccaatagtcaacggctgtctcgagggcagcacgtctctctgagatccagcgatttactccagcgcgattttcgttggtgggactgcttcgctcatcggtgtttactatgagaaaagtaaaaaggttaattactatccaaacgcatcgttgactatacagtacgtactcttcacatcttccagaggccaccatcccatccagagccacaactcatcgccgtcgtccagcaaaaagatagtcggctgccttgcattgtacagctgcgactggctgaagggatacggactatgcagatcctggcagcgcagcggatcgctcagttcgagggctttgaaaacaccctgagtgctggagaagttgaagatccttatttggtaatcgaacgacttggtggacttaagcaggctgccatattcatttctttcatccttcaatcccagggccttcttgcactgatcgtcgtcggaaccctcctccacctcagttaggttggcagttt

SEQ ID NO: 4103 - DNA, 2206 bp, DROSOPHILA
gtcgagcaggcaacaaacgtgaagaaagtgcacatagtaccataccacatatatgtgcataccatatcatcgagttctggacgcggtcataaaatatcatttgtgaaacgtaacgagattacaaaaggaattccagttccagatttctaaattagttttgattcgcgaaatagaaaacgtgcacagttgattttatcataacttgaagcgcgaaattcacatttgcataaccagaagaagcgcgtccgaggcgattatataattgcagtgtatttcgattgagcaagagcatctccaacttcagctgcacaatgacgggttacaaggtggccaatggcaatggacacagcaatggaaatggaaacacgaagggaacaaatggaaccaatggacacagcaatggacacaagtcggcggactacaccgcccaggagaatcccaccggaaatggaaaaatccaatgcgagcttacgcacgaagagctaagagcccttcgggttctcaacgaagacacgtatccctatgaggtcatcgaggagatcgccgacttcattaccaaggggtccggcatgcgccccaagatcggcatcatctgcggctctgggctaggctcattggccgatatgatccaggacccgaagatcttcgagtatgagaagatccccaacttcccggtatctacagttgagggccatgccggacgactggtggtcggcacactcgagggcgccactgtgatggcgatgcagggcaggttccacttctacgagggctatccgctggccaagtgctcaatgccggttcgcgtgatgaagctgtgcggtgtggaatacctgttcgccaccaatgcggctggtggaatcaatccacggttcgcggtgggcgacatcatgctgatgcatgaccatgtcaacatgctgggctttgccggaaattctccgctccagggacccaatgacccacgcttcggaccccgctttcccgccctggtgaactcgtacaacaaggacctaatcaacaaggccatcgagatcgccaaggccatgggcatagagtccaacattcacgtcggcgtatactcctgtctgggtggtcccaactacgagaccatcgccgagctgaaggccctgcgcatgatgggcgtggatgcggtgggcatgtccaccgtacatgaggtcatcactgcacggcactgcgacatgaaggtattcgccttcagcctcatcacaaataagtgcgccaccgagtacagcgataagaaggacgatgaggccaaccacgatgaggttatggctgtggccaagaacaggcaaaaggcctgctgcgaactggtctcccgactcatccgggaaatccacttggcatccgcttaagtagcgaagcgaagaagtagcgttggattctaaatttaaaaatagttaattctctgagctcgcatctaagactcacatgacacggattgtccaaaatcttacagtataggcctagggaatagtttaactaaattatgtaaaataaactagctatatcacaatttcagcacattttgtttgttgttgggtaaacttttaaaaaagtctacgatttgattgcatacttttgcgcggcgaacagaaattccagaacagttcaaggtgatcattcccctggtcacccaaataaaaaaaaacccaacggaaagttaaaatataatgaaatgttatttaataaaaattaaatatgcgcaataatttttaacatattataaacacaaatacatagttataaaattagggaaataaagctaacattaaaatgatttcgaattgaaaacaatgacataacgagagagctcgttggctttttggtgtttgcagagattgaacaaatgcaatttcgttaaatcgataaaatattaaataaaataatggtaaaacaactcaacttaatattatgtacaggtatacgatataatagaagaactccaaactccgcacagctaccgaatgaagcgagttgaaatttattgcctggcatcgtgcacttgcatagtagtcgttacatatataaaggctatgtaatatgtgtaaaatagagagtacatagggatatgcgcacgtgtgtatatgatatactaaataggcctatagaatacgatagttcagatctgtgtctgtgtccgttgcaaaagcatcgccgcctacaaaaagtgcttataaaagtgctt

SEQ ID NO: 4104 - protein, 353 aa, DROSOPHILA
MTGYKVANGNGHSNGNGNTKGTNGTNGHSNGHKSADYTAQENPTGNGKIQCELTHEELRALRVLNEDTYPYEVIEEIADFITKGSGMRPKIGIICGSGLGSLADMIQDPKIFEYEKIPNFPVSTVEGHAGRLVVGTLEGATVMAMQGRFHFYEGYPLAKCSMPVRVMKLCGVEYLFATNAAGGINPRFAVGDIMLMHDHVNMLGFAGNSPLQGPNDPRFGPRFPALVNSYNKDLINKAIEIAKAMGIESNIHVGVYSCLGGPNYETIAELKALRMMGVDAVGMSTVHEVITARHCDMKVFAFSLITNKCATEYSDKKDDEANHDEVMAVAKNRQKACCELVSRLIREIHLASA

SEQ ID NO: 4105 - DNA, 3741 bp, DROSOPHILA
ctatttcgctggcggtcgtagtcttccagttcgtcgtagtaatcccgggaacgggcgctgttgccctgcccagatcttcgctcgcgctcccgactgcgggaccttgacttggagcgaactctccgtggtcgtctcactgctgtcgaattctccttaggccggttggtctcgtctgccttctcctcgtcgctgggcagttcgtcgtccaagtcctcatccagcactgacaccttgggctcgatttcgttgttttcctcgagaatggagcgcttctggatgcggggcagtataatgtcgcagacacggtcgttgcgcagcagttcgtcaatgtactcatccatgtagacaatctcgaactggccggcgcgattctggcggcgcagctttcgattgtctatgtacaacggctccaggtacttgtagcagtccagggcagctcctgtgagccgtagatagaaggctcccaatgctcgaacgtacttgaactcctcgttcttgataaactccactacgatgtccttttccggctgaatctgcagcatcttgagtgtgaggcagaggaactgggtgggcttgatgttgccgccgtagacgcctccgacgaatcgcagctccattgccttgtccaccagaagctccgcagtgagagcaaagcattgctccttccagtacttagagtcgtatatcctcgaacggatgatcttctcgatgaggtactgcggattggtgccgtgcacgtttttggcctccttcaccgtgcggttggccattttcagttgaacccttgttccttgtcaatcgtaactcaaataggacttttcaatccagaaattcgggtatctattggcagcagtgcaaaatgtgaaaatgcaccgaatatatttatttatttttcggcgtttgctaaccagagtggccagctgcgtaagggagaaatatgccactccgccaagcgcatacacaaaggcgataacgataggggacggcaatcggtatcgggtgacgcatacgaacaacagctcccagacaaccaagaaacgcaatagcagaaaaaaactcacttgttcgctaaattcgggtgaaaaaacagatcagccaggatgagtttcttcgggaagatgttcggcggcaagaaggaagtggcccccaccaccggcgaggcgatacagaagctgcgcgagacggagaacatgcttatcaaaaagcaggagttcctggaggccaagatcgaggacgaactgaatatagcccgcaagaatgcgtctaaaaacaaaagaggtatgagaggagtgcgccgaggtccttggcttcctagttggtcactcaaatgggccaaggggaaatgactcattgctttgtttttgttgcggccgcgaggcctgctcccagttaatcagtatcccatactgccagcaaatagaaaactcaataaacaatatgtatctctttgccttttcacccgcataccattcgatgcctggacgtgtccgcaaatcgctcagaacgtaatataaacattacttttaatacccaaaacaaactcaagccatgcagtagagtaatttcaaagcacgcattgcgaattggccaaatcatatttcggatatatacataagccagtcctcgaaaccttctaattcctccacttctcacattttcagtggccctgcaagcactcaagaaaaagaagcggctggagaagcaactccagcagatcgatggcaccctgtccacaatcgaaatgcagcgcgaggctctggagagcgccaacacaaacactgccgtcttgaccacgatgaagaatgccgcggatgccctcaagagagcccatcagaatatgtgagtcatggatttgtgccattgtatcaaccaggaactaactttcacttttatgcagggacgtggacaaggtgcacgacatgatggatgacattgccgagcagcaggacgtggcccgcgagatttccgatgccatttcgaacccagtggcattcggcgccgatctggatgatgaggatctcgagcgggaactcgacgagctggagcaggagaactttgataaggaaatcattggcatacccgagccgacgcccacattgccagaagcacccacagaagatttgcccgagaaggccaaagaaaagaaaaaggcgacaaccacgactgccgtggaggatgatggtgagttcagtcactgcatgtggatctacgtttggtaattaacgattaacttgcgttacagatgatccagacatgaagcagcttttatcctggtccaactaaatcagagagctattgaaatctccttactgttctgaagatacaccctatcgtttttgtttaatttaataatcaatactgctgttaattaagcaaaattttagttcgaagcgagggagagaatacaaggcattaattcctttggcaattcaacaaatggtacataaactaggaatgtgattttaaaataaacgaaataagcatagtcaggcctcacatgagcaaaagtaggtatcaacgtagtttcatatttgatttgtttattttgaataacgctgattggccatcaggtgtatgcagatctaatattccaacaaagaaatgtagctttttgataaaaacccaaatatgttttgtggcactcatctttccgcagtcttagctttgtatcgagcgattcaaacgaaaataaaaacatgaagcctctcgactgcaggtaactcagtagccgcgagaggcgcaaaaaaacatcaactaaaatattttatttatatacacttgttccttacaagcaggttctgaataaaaccccccaaatgtatctttctttgtcttatcaacgcgcggataagagaacatcttatcttacgaaaaacccacaataccactattttaatcacgatacacctttaagttgaatgcattcttgtgtatacttttattgcaaatcgatcgggtgtacatcaatgtgattttaactatggcttgggcaatctatctactacggactttgctagttgggggtagtcaagtaggatggaggcgctcaggtctgctgcctcagaccctttacatatcgcaccggaacctctggcaggtaaacgcagacgaagaacatcagtggtccgaacgcaatcatgcagatcagccagtagatcaagcccaggattgtgatggcgtccatatagaaggaggaggagaagggatcgatcggacagcacgtacaatgaatgtcttgtgtaaaatcgtaaataaataactagtatcactaaacaccggactcgtccaatggagatggtgcaacaaggcaaaaggcggttgttgccagtgacaacgctccgatgttcctaatagggtatcagatatatatatatagctgcaggtcactttagacacggatcaggactcatccgactggtgctccgatccacaatcatctgttaatcttcaagcgcgccaccttaaacgaaatgaaacgagagttgttattgcatcaattgtggtatggcaattgctaacgcgatcgcgaatcttacagcgtgctgagagaatgcccaatggtaactgcccagctgctccactgaatcacgcacttatgtacacaccacctggcaagtcccacgcccagattggttattttcggggctatccccggacactaacattccccgatcgtggcttactcagctgttcgcagcgccagttaattcgcaactgattcttaactggttatgcagttcc

SEQ ID NO: 4106 - DNA, 1239 bp, DROSOPHILA
tgacgcatacgaacaacagctcccagacaaccaagaaacgcaatagcagaaaaaaactcacttgttcgctaaattcgggtgaaaaaacagatcagccaggatgagtttcttcgggaagatgttcggcggcaagaaggaagtggcccccaccaccggcgaggcgatacagaagctgcgcgagacggagaacatgcttatcaaaaagcaggagttcctggaggccaagatcgaggacgaactgaatatagcccgcaagaatgcgtctaaaaacaaaagagtggccctgcaagcactcaagaaaaagaagcggctggagaagcaactccagcagatcgatggcaccctgtccacaatcgaaatgcagcgcgaggctctggagagcgccaacacaaacactgccgtcttgaccacgatgaagaatgccgcggatgccctcaagagagcccatcagaatatggacgtggacaaggtgcacgacatgatggatgacattgccgagcagcaggacgtggcccgcgagatttccgatgccatttcgaacccagtggcattcggcgccgatctggatgatgaggatctcgagcgggaactcgacgagctggagcaggagaactttgataaggaaatcattggcatacccgagccgacgcccacattgccagaagcacccacagaagatttgcccgagaaggccaaagaaaagaaaaaggcgacaaccacgactgccgtggaggatgatgatgatccagacatgaagcagcttttatcctggtccaactaaatcagagagctattgaaatctccttactgttctgaagatacaccctatcgtttttgtttaatttaataatcaatactgctgttaattaagcaaaattttagttcgaagcgagggagagaatacaaggcattaattcctttggcaattcaacaaatggtacataaactaggaatgtgattttaaaataaacgaaataagcatagtcaggcctcacatgagcaaaagtaggtatcaacgtagtttcatatttgatttgtttattttgaataacgctgattggccatcaggtgtatgcagatctaatattccaacaaagaaatgtagctttttgataaaaacccaaatatgttttgtggcactcatctttccgcagtcttagctttgtatcgagcgattcaaacgaaaataaaaacatgaagcctctcgactgcaggtaactcagtagccgcgagaggcgc

SEQ ID NO: 4107 - protein, 220 aa, DROSOPHILA
MFGGKKEVAPTTGEAIQKLRETENMLIKKQEFLEAKIEDELNIARKNASKNKRVALQALKKKKRLEKQLQQIDGTLSTIEMQREALESANTNTAVLTTMKNAADALKRAHQNMDVDKVHDMMDDIAEQQDVAREISDAISNPVAFGADLDDEDLERELDELEQENFDKEIIGIPEPTPTLPEAPTEDLPEKAKEKKKATTTTAVEDDDDPDMKQLLSWSN

SEQ ID NO: 4108 - DNA, 4369 bp, DROSOPHILA
tttaggtacaagtttcctattcattcagttaatatatccagaaaacataaatactaaatgctactgcttaactttgggtacattaaattcaattccttgtaatgaaataactaggtacatacgcattgtttggaatgtgcttgtttctccaagtgtacgtcatatgtgcggtgtagcaatgagtagtatttccaagagtttcttggggtgctgccatagtctggaaagcgtctggtttctacatctgtggtacactggtaccaaacatttgtttgttttgatcgccgtttcttttagttgctttcatacatatgttttggactgttttggctaaatctgtgcggtggatacacttaccttctacctggtgttcatcgcagatcagccttgtcctcgccgcacttccgccctcgctctttgtcactcttctcggtcttgcctagtcttcctttccacttttgcctttttattgtgctccgatgcatgttgattgtcgtggactttgcaccctcagttttccgctgttgtaatgctcgttttacgcatttacaggaatatagtcgactaggaaagcactctttacccgtttaatctggatttgtcagccgataattcagtggaattaattctgttgaattcataaataaatagataaattgtatgattcattaacctatttattaattggttgatagctttgggatagtgattaaactcaagcaattcaccgatgcaatctattgtcttgaaatgataagaattgaaagaatgttgctatgaatttaaaaatctttaatgagtggctgccactttaatctaattccacgtaatcttaactttctgaaggtgctggaaacccatgacactttaattttcagaacattcaacctaactataaattcaaatcgagtggcagctccgataacggtcacagctgctaagaccagggcggcacactgtgtgctgtcgcccgataacttctttgttttgaactcacgggaaagcaaccctgcgtgtgctctcgccaattggaactgcgaatatactgcctgtgtatatatgtaaatgtttataattagcaatttttctacgaaacaaacgattaaataatgcagttttctgcctactaaatgccaaatacaacacacagacttcgagccacgaacggtgatgtgatcagagtactagagtaatccaacgaaaaacgcgagtccattttaaagcgaagtataaagtgccaaacaaagggagcagtcgaacccagtccaaatccaatcattatactcggtccgtgacctgccgacgagccagcgagtacggcaataagcatgggcaacgccagctcctccgtgcacatgcaacgcgagcgccacaagtcgaccgacttgtccacgccgagctctcccgcacatttccgcgattcgattggtggaggaggagcgggacagggcgggagtgctggcgcagcagctctgggcgctgcagcgggggcggtgggagctgcggggggtggaggaggaggcggcggaggccaagctttctcgttcgacaaaaaacatacggcagtcttgaacgagggctcgtcgcaagaagacgacgacccgtactacacgggaactggaactggatccactagacgaggcaccgcacacgacgacgcgacatcagctgttacccgagaccactccagcatggacaacaacgaggaggaggaggaggcagcggtaggagcggagccagcgactggatctcagttaaccggcgatgaggacgacatccggaagacggcactgcccacagttctgcggtgggacggcggcggcaagaacgtcaccatctcgggcacattctccgattggaagcccatggccatggtgcgcagccatcagaacttcgtgaccatcatagatctgccggagggcgaccatcagtacaagttctgcgtggacggcgagtggaagcacgatcccaagctggtcagttgggcggaaaatcaatatatgcagcaggctattcagtgtttttgattcgggcgcccgaatgacgcagttaccgattttcgccccgggttgtgtaatcgccgtaaacaaaacgaagtctcccagtaatcgtagtggatttcaattgggttcagagatgctcatccggctttagctttttttttgttttttttttgaggaaccccgttcaaatgcttcgcaaataacaaatgcaattaaagttacaagtttaagggagcaaactgcgataaaacccatttgtagattactactaaatccggttggatgtcgctagttttgtggacacagtttatctaagtgaccattgaacattgctatcaggcgaacaatttgaactatagaaaagatttaagggaatagtaacgttttcttagataaaatatttttctggataacaaagttcaggactgtgatagaatatatgacctacttcgcaatgttaaaatagttgcagaattgcatgaagacgaaaagcaatcagaaatgaattactaaatgcacagactttaaatctttattaagaatagttcacgaagctcacgtatttaaaccataatggttttaatgactaataaataatgtagtttatctgacatttaaattagtaagcaaaacgaaagcaaaccattgaacaaatttttgtattatatatatatgtagcaagccaaattgttgtatataattcaaaattgctcgaaacaagtagcaacagtacgttattaattatagaaagcagtcattgcccagccacattttcatgaagtattgcccaatttttgttttatcgcaaactcagctatcaagtttcatgagttttattgaactcaacccgaggcctgcagatattgtcccaattgcccaaactattgttacagacaatttgattatagcttatcggtttgctattttagaaaagcgtggagaacgccgagggacagagaaataacttagtgtccgtgcgagaatccgatttcgaggtgttccaggccctagccaaagacagcgagaacgtgaccaactatgcggagaaggagtactcgcaggaggtgccgcaggtgaagccctgggagaaggtatctggcccgcccgttctgccgccccatctgctccaggtcatcctcaacaaggatacaccgctatcggtgggtattgtcgctgtctcgagagctaccgaccgtaaccttaccctattctgtttcagtgtgaacccactctgctgccggaacccaaccacgtgatgcttaaccacttgtacgccctgtctatcaaggatggcgtcatggtcctgagtgccacgcacaggtatcgcaagaagtacgtcaccacgctgctgtacaagcccatttaggcaactcgcaattggtattttagctgtaggaacatggtttttatgagggataccacgtcccgcttgtcaaatttaccttattatgagtaaaagtgttttagttttctctctattaagcgttgtatttttattagttataaatatacggaacttgtaaaaatataagattattgcattgtgtcataatttgtaatttgtatttgaatttactacgaatcgtacagcttatttgcaatttcaacctgatatgtcactaaagtcacgatctaagagtaatttaagcaactatgcatattgactgactgataatttggttccctgttcgctgtatataagtataacaacactttggattttgatcaacgtttcatatcacatgtgtacaagagtcttcgccgacggcaatctatcggaatacaaacattctcgtatatctacgtgttcaactggacaaaaactgaactagactagcggaccgaccgaccgaccgaccgaccgaccagcttcacatcagcttgaccttgtggtccaactgatcggcgtcgatcttcttggcgaacagcaccggtgacgaggaggccagcgccaccgtctgcttggccaagaatcgctcgtgcatcttgttggccgtgtgctggaactcgccatcctcgtcgaacagcgccttggtgaagtactccgtgaagaggcggcccatgtactggtctttggtggacggccaccagccctcgaggaagccgatgtgcccgccacgagccgtaatcacgatggccacatgggtgcactggttggccgccttgatgggaatggcatccagtggctggaacggatcatcggcggcgctcaggcaaagcagcggcaccgaaatgtgatcgagtttgttgtgcaacgtggcatccgagtaatagtcattcacatgggcatatccgaactgcttagccgtaaaaagcgcgtcgaactctttgatcgtcttgcagcgcagaatgcgctgaatatcaat

SEQ ID NO: 4109 - DNA, 1354 bp, DROSOPHILA
aaagcaaccctgcgtgtgctctcgccaattggaactgcgaatatactgcctgtgtatatatgtaaatgtttataattagcaatttttctacgaaacaaacgattaaataatgcagttttctgcctactaaatgccaaatacaacacacagacttcgagccacgaacggtgatgtgatcagagtactagagtaatccaacgaaaaacgcgagtccattttaaagcgaagtataaagtgccaaacaaagggagcagtcgaacccagtccaaatccaatcattatactcggtccgtgacctgccgacgagccagcgagtacggcaataagcatgggcaacgccagctcctccgtgcacatgcaacgcgagcgccacaagtcgaccgacttgtccacgccgagctctcccgcacatttccgcgattcgattggtggaggaggagcgggacagggcgggagtgctggcgcagcagctctgggcgctgcagcgggggcggtgggagctgcggggggtggaggaggaggcggcggaggccaagctttctcgttcgacaaaaaacatacggcagtcttgaacgagggctcgtcgcaagaagacgacgacccgtactacacgggaactggaactggatccactagacgaggcaccgcacacgacgacgcgacatcagctgttacccgagaccactccagcatggacaacaacgaggaggaggaggaggcagcggtaggagcggagccagcgactggatctcagttaaccggcgatgaggacgacatccggaagacggcactgcccacagttctgcggtgggacggcggcggcaagaacgtcaccatctcgggcacattctccgattggaagcccatggccatggtgcgcagccatcagaacttcgtgaccatcatagatctgccggagggcgaccatcagtacaagttctgcgtggacggcgagtggaagcacgatcccaagctgaaaagcgtggagaacgccgagggacagagaaataacttagtgtccgtgcgagaatccgatttcgaggtgttccaggccctagccaaagacagcgagaacgtgaccaactatgcggagaaggagtactcgcaggaggtgccgcaggtgaagccctgggagaaggtatctggcccgcccgttctgccgccccatctgctccaggtcatcctcaacaaggatacaccgctatcgtgtgaacccactctgctgccggaacccaaccacgtgatgcttaaccacttgtacgccctgtctatcaaggatggcgtcatggtcctgagtgccacgcacaggtatcgcaagaagtacgtcaccacgctgctgtacaagcccatttag

SEQ ID NO: 4110 - protein, 341 aa, DROSOPHILA
MGNASSSVHMQRERHKSTDLSTPSSPAHFRDSIGGGGAGQGGSAGAAALGAAAGAVGAAGGGGGGGGGQAFSFDKKHTAVLNEGSSQEDDDPYYTGTGTGSTRRGTAHDDATSAVTRDHSSMDNNEEEEEAAVGAEPATGSQLTGDEDDIRKTALPTVLRWDGGGKNVTISGTFSDWKPMAMVRSHQNFVTIIDLPEGDHQYKFCVDGEWKHDPKLKSVENAEGQRNNLVSVRESDFEVFQALAKDSENVTNYAEKEYSQEVPQVKPWEKVSGPPVLPPHLLQVILNKDTPLSCEPTLLPEPNHVMLNHLYALSIKDGVMVLSATHRYRKKYVTTLLYKPI

SEQ ID NO: 4111 - DNA, 21409 bp, DROSOPHILA
cagatccagcaagctggccaactctggctcctgtggtcggtcaactggcggcacccgaaatcccagctttgctatcatgtcttcggcaggccctctgcactttacatacaatgaagaattggtttcaattcaaactcggttgaaatttatgaacttaaaccagatgcttattctaatcatggttactatatcggaatccgtggcaacgttattgttttcaatctcaacttaatttgccatatatttctatttagtaatcacaagatgtgtgtctcagaacattgataagtggtagtgaattgaataaaaaatgtgtctcagtttgcgaaaactttgtcaagcctgtcgaggtgggtactggtaaaaagaaaaacgtgtctgcataaaaactaatatttaaaatacctcgaaacttttatatgtctctgcgcccaagataattggcaaacttacaaaacttctaagacattccactgtcaattggaaaatgcctacacgttttacaaaaagaccaaaatatatatgtacatatgtgtcgcatgtctgctccatctccccagtaaagatccccaaaggtccaattcagagatgtatttatatatatacattcgtgtatttggaggcgtctatatttatgccttccgttgacagctttagcatcagcacctacacacgaaaatagtctgcaaagtcccaaaatacaaaaatgtgtatatgaaagttgcgattagctctgatccattaaggcattcgtgttcccccaccaaaatttgtgcataaataaataaattaggaaagtggacgattaattaaacaattcattgaaagtgtcacaacatttagcgatgaatctgtgactcagctatctatattttaaagataaggaatatgcgaactattttaatatcgaaggaaccaagaagaattctctgcccttgacatttttagattgttcgatcaaaacaaaattaaatacacacccgaataacacaaatgaattatgccagattcgaaagtagtggcgagtgatagaaggaagagtaatagccatgccagcctgctcctgaccacatcctccactcatgtgcagcacgcggatagccatcgaggtaatgccaggacaccggatgagaacgatcaaaatagctcgctgctctccaatgactttgtcctgatgctagactgctcgccaagtccacaggatgtgttctgcgaaaatacgccggagtttaggacttcgtggctgtggctcaacaaactgaccaccatgcattgccacactctctacgatctgcgcatgcgcaacgcgtacatgagtcacttcagtgtttgcctaaaccaacggcgactgactggcgttttcgaggagcctccgccagcggagttggcttgggtcgacttcacggagaagccagaggatcagcaatgcccaaacctgactgaaatgcagcgttcctgtgatctgaatcaatcttctctagccgcagtgccctcctccgctttgtcatgtgactgcagcggtaaacggtcgacgtctgagtactgggacaccttctcgaattgtgctcgtccttccggcgggacaagtgtcccatccattttaaaaccacaagtgcagaggagccgacggctcctccgtcccgtacacacgacaagtgatgacgaagtgcgtcagctttacaaaaaccaaaaagcgaatttccgtttaaaccattcctcttctccctctgccacgcaatcgtccaccagtcgttcccaatcctcgccgcccaaattttcacccagaagtaaccagaagcccaacgcttttcaaaattccgatagtcagaagtcacccgaagatgttcgaaaacgtatgatcgatttgatggagcttattcgaatggaactgcgtggtgaaccgattccggataacaaggacattttggaggaggagttgaaaagatataggaattttttcgatcttcatttgcaggatggttcggattttgacccacattccaactcggggcgcgttcgtgtgcttctcaacatgcaaaaagatctgataaggatgctcaaagaggatttggcataatgacatatgtttcagaatcagtttcataataaaagatgccattttgtataatatttaaagcttgatcttttgggatgtagctttcatttatgtagctatgtatacattaatgggtaatttttgtttttccaggtcgcaaatctgtggacgaatcttcgccatcggccaacaactcccagcaacagcagcaacattccattccgggctccgccgccggatctccacagcgagtggccaacaagcgtagcagcatcacggtgaacatgccggccgccggtcttggccagcgtcccccgagcattatatcgaccaccagccaggacgagggtggtttcaatgagtccgcgcccgagctgaaggccaagctgcagcccgcctacgaccagacggaggagcagccgcatagcctgaattacgtggacgtcggctatcgcctgaatcccgatggcagcgaaagtcgcgaggtttacggatcggaagctgaactctacgacacggccaaggtgaccgatatgcagcgcaagttccacggagccaatggttttggtcaggaatcgagcacggtttacgccattatcaagcctgatgtgcaggagtcccaaccagtggctccctcaagaagcgttctcatccagtctccaaattcctccagcgtggagggatctccactgcatcgcgggtcgtatagttccccacccgtgggtgtggtttcacctataaggcggcgcaatagcagcaatcaggatcagagtgttggtggtggaggcagtgccaaaaccacgccccaatgctctcccgcccgttcggccttagtaaagggcattgcccccattgcttcgatcgatgcgcacgaagaggaggaactagatctcgtagaggaggacgagcacctggccgtggagtatgtggaggtgctggaactccagcaggacgaagaggaggaagaggctccggtccttcccgagcgacgagctccggctcaaggctcccttgagcttcaggacttggagtatgccgataccagcgctggcgaggatgaggaggacatcataaaccatctaaaggacggcgatgtattggatgtggaactaatcgacgatgtcgtggatgaggtgatcaaggttcatgtgaatcacagtgtggccactgccccttcgattcaagctgctacaccagctgcagcgattccacgggaggatagcctgccggatgacatgaccgccgccgaggccgaaagattgttgagctctaggtgagtcactttaaaggaagtttatttatttacaatttattgtgtgtaatttaggcatgtgtcttgtttcttttatgtattgtaatgtatattttgtacttacttagtatgttattatagtttttgtcatgtcaattcattatctattaatataagataatgtgtaatttgatgattttctttatttattcctacatactttacatttatgtattacctagttattgtgtagtttattgtagtcgcagcattttcttagatttctcacaatatctgccgatattcatcattggaagctaagctattcctagttaatcagcataagtaaccaaatgaaatagcaacatttgcctttgcccattctgttgatgctaactaagccatctcattagcattttatgtattacctgtagccaataattaatccagaaatccaggcattccaggtagcaggcggtatgcagtttccctgcattttcttggccctgcttgaactttattcactcgctcacatattgagcaaatatttactttgcaacaccccaccgacgtctcctctcctctgccaggttactattcatcatcagcttagtcacctttcagcgccggctttgttgtaattgtaagctaatctgtcgcttgtcaactgctgatgcactcgccatccggagtctgttccgcccggaagtgttgactccggcggagttaaagttgcagtagcagttgcagtgtgagtgcacgtgaatactcgctttggtggagctgagctgatggccactttaaactgacaaactcttttaactatttccaactctaatcccgtcaactagtcccagtcgttggtattagctcaggtagtggatttgtttgtgaccacattcgatactggatttctagaacttgaaagattgaaatatacttagacgctgtacgctgtattcatgcagtataatgtttaaccctttgaaagaaagcagtccaacactgagttcttcgcttgtgaacccaaaatgctcgagttcaaacacggcggttaaacgtttaaatatatctagattttcgcagtcatttattctcggggcctggctttctgcgattcaaacgattcgtggctgctcccagaattgacttgccattgatttattgtctgctggccggggaaccggagctcccaccccaacctccaccttctgcaagctattgcacatatttaaatgcaattttcaaacgatttcccagcaagttgttcccattgcaatcgttatagtttttgcgcttatttgcgttcaagtttgcgttcggtcttcgacgcttttgtttcgtggcaatttattatgagccattgccgggaagaggaattacgtatccttgccttggctttttttcgccacctcgtcccggaattttcacgtttcgcacgcaaataagcaatttcgttttggccgcggaaaaaattacacttaaccgtagtttctttggcaatatgtgtgctgcgctgcatacgtcaattagtcgaccgttttttggccctttatttatgaacgcttgccgtgctcaacttggagtggaaacaaacgaacgaacgaggctttcccgacgcttttccactcgtttttctctcgttgtgctcgtcgcctgcactttccactcatttttcgctcctgcgtgtcctgtgcagttttgtcctgcatttgcggagccactcgaatcacatgcccgccgctcgttcatcctgtcgcatggctggaaaatcgtaacgctgccaaaataagaataggaaaacgcataggaacgacaaacgggaaattccgcgcgcgaaacgaaatccgtttttggctggcaaaaataaagtggcaatggcggaaaaacgcacgaaatgtgaggcaatctctcgccgaacatcgttttaattaacattttcgtgctcgggcgcaggaaataagttttaattaaactttaagtcgtcccgagttgccagtggaactgcagctggagaaggaactgctgaaaagtgtcaacacagtgtgggctcctttggtaggtgaaaaatattattatcaatatttaatgttcgccatcgctggcacttttctgcctgcttatgacattttgccgctgtttcgatgatgatgatgatgatgacgaacggatcccattgcgaggatatatccggttatgaatggcattatcagtgccttgttggcttttaattagacgtctgtcgtgtcggagagtcgcacacatgcgtcgtaagtctcgttagtggccagttttcaattttccgatttcggtgtgtcaataggcaggcgtacttacggctaaccaaagcgatgtctacttacccattttaccaactgtccaattggccagtttccgtacttttcccatcgcatgcattaatggcaattggtcctggccctctactgcctatgatttgtttgccaacaggcaacgcttttgtggtttgacatgctcgtgcatttcaaggatattcggaatgaggcttttgcggttgatttggcactcggagtcgattagcctaatcactgtatatcacatttaattacgaacaaacagttcaatgattgattcacagtctatttacaaagctactctctgtgatatttaaatctaaatagttacagaaatgctttcatatcggtataaaattaatatttcattatatggtatggtatttattaaaattgtcatgcgtttgactgcgtattatgttaatcaaaattgtattagcttcatttgttaaatagttattactaactatgctcgcacttttctgtttcgcattagggtaaatcaaaaaaatctttgaaacatttctcttaccaagaacaactaatttgaatagaccatcatttgacaacttcacttgccacccattttcctgattaaacattttaatgagttttttttttttttttgctgattatgcagcccgtctcctttggccatttagtttattcaaatgaaatttgtgttaagtgtaattcgagcgcaatcacaaaaaccaacaaacggggaatcccagcgctctatcccatctcctccatcatcgtcacatcctggacgacattgccaaaggcatcaacagggcgacaagtgctaatcgctcatttggcattcaatatgctggcttttacccgcccgaatctctgggttttcccccttggctttttcggtggcggggtggaaaaatctcgggaaaatgcagagaggttgggtaaaatgcatttcagtcaagtttgcctttggtcttcgctgcgcttttaagcttatttaaattgcggcggcgacttaagccacagggggtgtggtggggggtggtttttgggatagaagatggtgctgcctaagtgggtggctgggaaatgaatagtgggctataagtgcattgtgcaagtggtttctgtgcttagttaaattgtgtacgagtgtctgcttttacgttcaagtgacagcagcaggaaatgagttaatgtgggatcggataagtcaaggatttgtcctggaaataaaaagcagtaaatgccagtaaatagactgagatggcatgacatgacattatggcaatactaccatcatataccgaaataaaatgtaaccaattgatttaataccccaaagagaagtggtgcagtaaactcgaaaagttttccaaccagttgttatggcatacttttctgcacaatttccctcctgcacaatgaaaattctacccaactactatgggaccctcatgctttcgagagtcctttgtgtaaagtacaatctccccatgattatcgcctgtacaattaacataacttcagggctggaaaaatgattttatcaggcgcatggaactttcggatgaactgaaataaattgcataatttcagcctggaaaaaagaaacaatttgcctgcgagcggcaaaagtgcaagttggtcaactaattgaaaaacttcacgccccctgggaatgcttttcgaaatgcaaaattgaaattcatttgcagttggcaagggcagcagcaagcagaaaggaggaggcccaatgaaatcgcacatacgcagcgttgtcacaagtggcaattgcttaactctctgatcttgcctttttggcatacaactctttctctctggcactggctctttcggactagcccgcaatttacataaattgcagcagcgacagcagttacggccatgtgttgatgatgtccatgttgtccttggccaaaagtcgtggccagaggagcagcaaggaccgggaccagctgcaagtccaactctcatttatctttcggccaaatgtttggggctcaacaggagcaactctttgtgcctcccttttttttttttttttttttttttttttttttggcagcctgcccagctgagctcgctgtccccaaaacgtttgtccttgacacaaggcctgttctgcgccaccacctcctcctgctcctcttgaatcctttttctgcgaggcaagtgggccaaattttcgggcaatttgctggtcaattgtgggccattttcggcattggcctgtgtaattgcgaagtactttcaactgcactccgaacaatcatcgtatagttcagaatagtttgaaaacgcttagaaaactaaaaacgataggtaggagtccttaaaacaattaaaacaagctttatttccttgctgacacttagcaagtgcctaaaaactttaaaaccctaaaatattttgtagatgattgtaataaagctttttcttgaagtgtccttgttgcagcggcatgtagaactgaaactgattggagaattaactttcttagcggctgctacttctcttggatgactctagctgttggccattttctagttaacttggccctttgctctcaacattttttccgctgcccgttcgttcgctggcaactttcctcttttcacgctttctcaataattttttgtattcggcggttttaactttgccttctattttttttcatttcggttagtttctgccttttttctcctggttagcttgaacttttgcttttgactgcatttaaaaaaaaaaaaatttcggtttcgcgtttttagtgctagtatttctttcgcttttattattgttgcccccgtgctttgctggggcgttgtaatcttatttgtgtgcttggcttatcgcacgcccctgtcctgcccacttttgttttttatatttttagtgtttttatttccacccgctcaaatgcaaccaaaatggcaacaaagtgggcggcgctgggcggcgagaggaagtgtgccgcaagtgcaacgcaaaagtttcgaaggcaacttggaaatggagcacgaatgacgctttggcccatttgttggtatttatttcaatagttcttgagatactctacgtttagaaaggaagcttgaggaagtggtgactatctgaggggatttaagtgatttcaataatatttactacctaatagaataattacaaattagagttaagataaattatagtttgtgtgcgaagtgaaacacaaattctatgaaaagtaaattcatgattttacaactacttaatgctttctgctcgtttaactcgcttaccctatttaccgagggaaagttctctcaaaagtccggcattcaaaggcttggaaatcattgtgaaagtcccgaggggcttttcccagcgacttgtgactctgcgattgttgctgtacctccattagtcgcctccagcgattccttcaacgtcggtccactaatgctgccccccatccgatatgaaagcagctcttcagaggcgactttatgggtgggacgacgcacctttagcactttgttttgtcctgctgtcttgcagtccttggttcctgcgttcctggagtcctggtgactgtttacccagttgttcgcataagtttccgtttgaggcaaatactgcaatttatagccgttgcgtgcgatgtgtgacgttcctactaattcggtgggtaaagccggggtgataaagataaataggtgaagagcccgggtgtttttatttgccacgttgattgcctgcaagtgggaatgcattcactttgctcgggcaaagtttctgcaaaagtttgcattttagtagcaagttatggaatttttatcctccaaatgggagtttttttttttccccccagcattgagttgtgtgagttgtgtgggcgagttgtgcccaaaattatatttaaaacagtttttatattcatatttgtgtatgcagagcacttaagttgttggcatctggtggcggcacaccgcgccctgaaaaaaaaggaatgaaaaaaattgaaagtgaaggaggcaaataatgtaggcaggtaactttcgcttcgagctgattaaaggtagaaaagtttttcatttttctgttgattcttcgagcgtttaattacctcaatttcctgcacaatctaccaatgaatgggcaaatgcaaaacgttgctgctggatgttggaacagtttatcgcattgttgccacttgaatcgaatgggtttccaattgaacgttgctcatacgccatgttgatactgttgacattgttgtttccattttcttgttcatatgcgggacaacacacagccgcccacactcgtcctggaatataattgttgccaagttgtcatttttaacattgtcatcgtgctcgctgctcactgctcctgccactccactccccttgatgtcctttgtcgtcctgttatcatcctgcgtttgtgatttttcttgctgcatactttggtgcgcacgcagtaaatattgttcccgcctgattgttgtttctgccggagttctgtagctgctgtggaatttgtgctcttcccgtacgtgttcgccatgataaaatggggtttttcaattttcatagttgccctggcgaatgcgattcgctttgcctcgcccgcctctgtgcattcaaattgatattgtgtatgattgagagctaaacgggttaacctctgatgtgttggcccgatttatgcagataaatccgaaacgataatggcaccaaacaattgaaaagtcagccgcagaggtttttccatgcatatgcgcaagaaatatacagaaatatttaatagtcactttaaaagaatacgattatattcgtatgtcctaaaagtatcttattgacactatgatacggcaaaaaaaaaaagtcattttgataaccgcacccactgcaaacactagccaatttgggatatatatctcgccttaaacacgcacatcctcacattatcctcgtcatagctcaccttgacttggttttggccaacaacttccacagtgttctccgctccactccgccaaagacaaaagtgactttgaaaagtgctggcaaactggacgaatgcaggatggaatctagtccagcgcctcccaattcgagccaactgctattaataaacgaaaatgctcgttttaaaactcacgaatgactaaacataaattctgttaaatttatcacaacaatggagggctaaccgagtcagacacatgacgtcattgtgggccagggccacagccaggagcagcacatggaaaactcactcggagagcgagttttcccatagggaaaacgaacgaagcgaacgaagcccgctcttgagtgagtttaatccgctctcagtttgtgggacaaggcttttgcattgcggtttcccgctggccgttgttatttaaattaattataaatgtatgacgaaacaatgagcagactgaccttgtttgcggctctctgtgcaaacgctttttaatggcactctccatatgtctgttgcttttttcctaatcaacttgtgctccaataaataggaaaggaaaagtgttggagcgcacacacttccatttctgcgttttccggcttttccgcctttgtgtttactcggcacaaacggagaattccaagcgtcgcataattgcatttgtctttcgcattttattttcgccgcaactacaatgggcaaaaggagtagtttcgtggagagaactcttttgtcatagaaatagtcgttcgaaatcttaaccaatatagattatagatatgacactgcaatattttataaacttgcatacatttttgaatgttcttaaagtttgatgcccattgccagattttttttcctttcgtaattattttcccgctgccgtcgacgatgaaactttgtcatcgctatttcgctcgtcacacgcggcgtatgcgtaatattttgttatgcatgcaactgcgtttcgctttgggcaacctgcagaggtgtggctaaaaaaggaatcggggtgtcccacattcccaagcaattaaaaacggtagcgtgttatttttattttaattaaaaagccataactctatgctaattcctttttcgtttttcctggctgaggggatcatttgtgaagggaggagggcttacctcggaccaaatccctccacctccactggcaaacccctctcgtaagccgcttagttagctgctggaatacgttttgcagtttttgtttggaccatttcaattgtttttgttgattgttagttttgtccaagtggtcacgaaatagagagaagtatagagatttcgtttgcaaatcgctggctaattgttttatagcattttattggattgcattggggctatcgaaacatccaaattgtttttcaatggaccaccgctttcaatcgaaaccagcgtcaactgtttgcagtatcgttgaattttaggccatttgcaatatgtttttgaagccaagctaattacagtttgctgcgctgcgtgtgaaaatgccaattgcaattgcaattacataaatgcactgcaactccgctggaaaactcatttaaatgcatggtgtatctgtgtgtcagcacctgagggggaaaatggaaaagtggaaaagcgggaaagtgcccactttgtgccgttactcgactgtttgttgttgcctcactgtctgccacttggctctcattatcaacaacataatcaaccacttgcaactactaaggctctgtgtgttagtttcaatgattagccgtgttctgaatgcactggaagaaaactatttcccattgaatttggcactaaaaggtatgacagaaagtgtcatttattcacataaatacctaataatacacccacaactctgaaaggtatataatatatataacttacaattcctttaattgaatgtaccttttttctggataaacaaacaaattagatttttattcctgcttcaatttctcccggtgtgtgggctcgtcctcgttgtcgttgtcgctggcaattgttggtagtaattaacaaacactgcgatgtgtagatatccaccttacacgtgacgtcacgcacaagtgagagtgacaaacacttaaacgttaaatgcacccagctaactgaactgaactgagctgacaactgtctgcctgctctggctgtgctacctgttttcctcacttcaggtgccattgcgtgtgcaacacggcgtatgcgacataacttttcacccgattttccacccaactcgcttggggctacgtgcccgtgtaagcgtgcatgtttaatttggcattgcgtactttgcggcgctggctgcattttcactcagtcctcaggtttactattttattacgtgcaattaaagggcgtcttgttattaatttaaaatgaaatgacggaaaattatcagcttagaactaaaaataaaacattctattgggcgtgctcaagaattcgcgaactatgttacaaagctattagccgtcttttaaaccgaagaccgtcttcttcaagagttagcttgttaaagtatttaatttaagcatatctgcgattgaaaccgatttgaggtaacaaattggtaattggatgcgaaaaatggaactggttgcctgggaactgggaacaccaaccgctggatggtgtgaattaaaagtgcattacattttaattgcacgcacttgtcgaccgttgggctctccacttaattactgttattattatatgcactttaattttatttacatgctcgttgcgttcgcaacgtttataaatctttaagcgcctcatgttatagtatgcatttatttgtattatttaaaatgatttgcatgttttcgtaaatatttcataattttgcatttctcacattgtttaattttatttatttatcgtaaattgcctgtttctgttgtgcttgtgtcctgtcctgcatcctgtatcctgtctgcgtagcattttggaaaacaaaatcaggttggtcctctgtctattctgtgcattcgtcgccttaaattcatcttgatccaaagaggaacgtttgctaaatctctatgttttatctgttcttgttcttgatccgcaacagacaacagtcgctgctgtcggacgaacaggccaaggaagtcgagcaaatactcaacgccgcccccagcgtgggcgtggcagttgctaccgttgttgccacagcaacatcgccgaccagcatcaagaatctcattgaggatttgcccgggcaatcggcagtcgccgccagcgctgccaacggggagcaggacattcaaatcgcagctgtcccagcaattgtcgaggaggacgaggacgaagaggaggacttcccggaggacgacgaggaggaccacgccagggccgattttgatgccaacggcggtgacgctgacggcgattccgatgacgttgaagccgtggacattgtgggctatggccatgcatccacagctctgaatgccaccttcgtcaaggccgacagcacagagacagagacaaccaccactacaccttcgacagcaaccacagccaccactcgccacgacgacgacgagcccgagtggctaagggatgtcctagaggtagctcatatcaggcttgctatagaaatgtataataccacaattgtctccccttaggcacccaagcgcagcctagagaacttgcttatcacatccgccacttcgtccagagcacctggtcagcgtgaagagctggaaaacggctacgatctacatgagaaacattccgatctcaatcaaacgtatattactggtggggaatcactgcacgagtcgatagtttccgtggagtccacgcaatcggatgccacactcaatcagaccacgaccatcgacgacagtatcatctccagcaagcacaattccacctactccctggcagatgccgaacaggccaccagctctacggttttgagcactggcgttaccgaactcgacgacagtcagtactacataccagaatatccgccagttagaagcaaggaggttctcgtagaggccggagtccattacttcgaagatggcaacttttggatggaagtgcctggtgagttggtcattcttttctatgaagccttcagcgacttatttcatttctaatatttaacaggtctcttagactttgacgacgacgactgctcttatccgcccatcactgtacgcaagaatcccaaggttcgctttagttccggacccatccacgtgtactcgactttttccgtaaacgactacgatcgccggaatgaagatgttgatccggtggccgcttcggcggaatacgagctcgaaaagcgcgtggagaagatgcatgtcttccccgtggaattgatgaagggtcctgagggtctgggtctcagtataattggtatgggcgttggcgccgatgcaggcttagagaaactaggaatctttgtgaaaaccattaccgacaacggcgcagcagccagagacggtcgcattcaggtgagcgttggtttttctcattaagtcggtaatgaagtaaccattttactctgattcccaggtcaacgatcagattatcgaggtggacggcaagagtctcgtgggcgttacacaggcatatgcagcatcagtactgcgcaatacttccggtctagtcaaattccaaatcggacgcgagcgcgatcctgaaaactctgaggtagcccagctcatacgactgagtttgcaggccgatcgtgaaaaagaggagcgcttgaagcggttagtcagttagggatacggctagtcaaccgatattaattgaactaaagttatttcagccaacaagaggagtacctgcgccgcactctcgactattccgaggactccactcagccggtttcggccaactcgagtgtctgcgagggaccctcgagtcccgtccaagtggaacatccaatggaggtggaggccacccactcgcaggaggtagagtcgctcaagcggctgctacaggaggtaaggattctagggcgtcctaggaccgccaatcccggaaagaatctctcttacagccgtgcttaacttgtgtgtttgtgtgttctcttctctctccttttgctgaatttcaaaattgtgtggatattgaaatgcagcacaaagcggtaattggatttgaaaatatcattgaaaacaaaattttagatactcaaaaaattgtagagcacattcttaaaacactttgatacctatttagtttttttttttagttgagatgtttgttttaggttcgatgaatgagttaaataatcaattgtatttagttgtttctagtttttagtatacttattattttcccattatttgtttttattttcccagagcgaaatgggttgcctggttaaagaggagattattcaaaatcttaaacgaaaggtttgttttctgttattttatttattacttacctaacatcatctcatccatcaattgcacaaccttttttaagagtaaagtacggtatactaatatatttttacacattcccagctggtcaagctcgagacgacgggcaatgagaacgagctgcttagcgagcgactgcggcaaagcgagcgggagctgggcaatatccggaaggaggcggccaacctgcagaacatgctccagcagtcgcagggtcagtatatggcgctggacaagaagtacaacaaggccaagcggctggtcagggagtaccagcagcgagagctggacatgtgccatcgcgaggagttctaccagcagctgctccaggagaaggacaccgagtacaatgcgctggtgaagaagctgaaggatcgtgtgattaatctggaacacgagctgcaggagacgcagcgcaaggccggttttccagtgggcctgccctacgatagtgccactctgaagttgacgccccagatgatgcgtaagacgccgccaaagccgctcttccacaagctcgagacggagctgtcggatacggagatatcagatctctcacccgacggcgatggcgttaagacagccactgtggagcgtaaggttccggtcaaggacgaactggatgcggcagtgccgcagcacgagctgctggataactcgattaacaaaaccaaaatcgatctgggtaagtcatcaccataagatattctcttacccaagcaccttttactcattaactacaagaatgtcatgggttttaaagaaagtatgctttgaatatcacaagtgcactgtcgttaaggatattcttttttaactttaatccaaatgagtttcgttacttattcaatgctaaagttaagaaccatgataatcctgttttaagtgagcgttacgttctttgtgctttgagctttgaactgcacctgagttaaagattcgaccactgctcctcctcttcatttccctttgctactttcttcttttgtgctccgtcattgtcattctgtgctaattgttattctctttctttccatttctctcgattttatttgatctctgtgtgccgtctgttcacgttcgttatatcgttgttcatgtttgtattacgttctttgctcgttgtgttcttgtgactgccacgcctacacgctgcgccctcattttgccctccaacttcaacaaatcgaaaaaaccaaaatcaattcgaaaacaacaccaaatcaaaccaaaatcgcaccctgccaattgaaatcggttttaaaacaaaagcctcccgtggtggtttagccaaccgccagttgccctcagcaaatggaaacagtagcacatcgaatggagccgccgttgatcttggccagctttcgaatgggaatctgctcaagcgcagccggagcaacagtcgcagctcggactgcacgctggatgacacggatgaggaggaggagcgagagggctcggcattgaacctagcaggcgctcctgtcgcccatgaaaccatcagtctctccaatggcaactcgcatctgctggccaacgtgaataatctgctgcagcaccatccgccggcaatggccacagtgatcgccacaccttcaaatggccacctgggcaccaccacgcccattctgttgaactccacctcctccgcctcgtccagttcgtccaaccaatcgacggcacgtgaggcacagatcaaccagctgtatgcccaggtgcacaaggatcccagcaagcagcaacatcagcagcagcagcaacaacagcagcaggcccaggccgtgaccaccagtattcctagcattttcaagaacgctttgggttctccggcggacaatggactcaacgactttcatcgcggcagcatgaccacctttggaacaggtccagccacaagcagcaatcgtgatctcaacagctcgtacgactctatcctgggctccaacgataagctagcggagaacgatcccgccgagagttggatgtatcccagcaggaggcgagtggcaccgaatggcagcaaagtcccactgccaggatccagctttactgatcaactcaaccaggcgctgtccgatcgagagaggtgggttatggatccataaagagttggtgggacaaggagtattaagctctcgaatgtgatttctttagaactagctacttttatttacttgaaagatctaattagtactaggatacaaaacaatttatttctcacagttttgtgcaacaatttttttttacaattattatgacgagcttgaaacatgttagaggggaaaactagcaaatggatttaataataaattatgaactctgttatacggttgctcgtgctttgcaggcgactcggcgatggatcctcgcgacattctagcgacgattacacggagattaacaagagccagagcgccgcggccatcaactgcaagacgctgatcaacgagatccgccaggcggtgaacgaagcacagcccaaaggtgaactatgaccaatccaaccaaccaactagaccagcacaatcctccgattctctctagcaagaccgtagactaacccgtagatcgaacccaatccccaagagagcaaaagacgtatcatgatcatcatctcatttcatacagatctgtacatatgttttactgttcaaaagacttacttaactaatccaacaccgttgtttcgttataaccatttttaatatgcgaaggtttttgagagttcattgcagctgtttatccgtttacattactcgcatttccccatatgtatatctctataaatatctatgaatgtctaagctaatccgttcaaccgataccatgtgctctgcgtcgcaatgccaatggatccagtgcgatcttactaactctgacttttctatctctccgcttctttctctctcgactaacccataacccgcaatcgttccaaagttaaacaagtcgttccacaatcactctccccgcccggcacagtgccctggcagcagcagcaccaccagcaaatccagcagcagccgtccgcccacaccaccggtccgccgtcgcccaccagcatgtcctcgggctgctcctcgcccggatactcccccagccgcaccctggacctgtccggttccagctctagtttctccgatcgcaaggcgatggcagcggggtatacctacaagggtggccctgttcatgaatggaccaaggatcaggtacgtccaaggatactacatcactctgctatatcctctttaatgactccttaacggcacactaggtgggacactggctgatgggcatcgagctggagcgttacatccccgtcttcaaggagaataacgtggagggcggagctcttcttaccctggactcaaaggacttcaaaaccttgggtatctgtggcgacgacaagcatcgtctgaagaagcgtcttaaggacctgaaggccaacatcgagaaggagcgcaaggatatggagagggagcgaagggagcgcgaaaaggccatacgcaaggccgagaagaaggcggccaaaaagaagtagttgaattctagttgataagcatcaaagtagccaaaaaccaaaagcatacgcagtatatattgtagtctatatacatacatgcatacacaacacacacaaggaaaacacgcgcgtatatataaacatatatctattcggttatatatttatatgcatgtaatgataatataatttatttgtacaacatacatctattatacatacgtactacattttaacctatcgaacctaatggcaactagacgtaattattctaaaagaaagaaaagcaagaaaagcagcaagtagcagatcagggtcaggagtggtagtgtagcagtagatctcggttagaaatgaccccgaatcccacactcaaaccgggcccaatatccaaccgatggcactcagactttcccgactaaaaatcgaactcacaaccaaaagaagaagctaagtaactaacaagaaggcgttggactgactgattttatgattaatttaaaaagaaaaacaaacaaaaggaattcttttttaagccaaccaaaaccaaaatgaaccatttgaattggagttgcaaacaaaagcatatagaacacttaaggaattcgctgaacagacttgaacggtgtaagagctgcttcaaataaaatacggaatataaggttaatattgtaataacgtttaagttaatgcaaggcagcacccaagggagtgtctcgtttttctaattattaatctgtgtaatttaatgactagcgcatattcaataatattcaattctagatatacatatacatatgtgtgtgcaacagttatatgtcaagacatttacggaacgtactgtactatcccctaaaaattaatgctaaagtattgtactgtatgctatgcctgaaagtcatttaagtacttaagtgtagagaagctagtggaagtgtgtgttttctgttaccaaccgggctgccaggaaactaactaactaactgaaatgcagtcggttacatttcgagcagtttcagcagccaaatcaatgcaaagtgtccacccaaatttgttaagcagccaaaaaagaaaaaggaagcaagcagcttcaagagcgatttctattcgttagcaagtatgtctgtgtgaatgggcgtgattgtagctttaatttcaatttactttttgtataaatatttatggaacctttagtattcgtatttcatattcttagttgtttgtatttacttcgtgtgtacttgtgttgtgtacgtagttttatttaccttataatttcgaaatgttgcaataaaaccgcatacatatgccggtgtatgtataacaaatcaaggctcattctacttatcagatagcatctggttgaataattcgactccctgtgaatgcaacaccacctaatcgagggccacaacaatccaaccgactttgatttatcgaggaaaaaccaaatttagcaactagtccttggttgattaccaattagcatataatacttatcaacatacgtatatacgaatactctcttctctctatcactctgtctctatttgactttaagaccccggccgcggccagaaggagactccatcccaccggaatggaggatcctgtggacctgacggccggcagcgcataatcaccgcatgtgtctcactcgtctcgtcgcaagtccttaatatagcttttgaaaagctcgcctctaaacagtgccaccaacgaaaacaaaagaaaatcaaccgttattacttacgaaaaaacgataaaaaaaacacctttaaaaacgaataactaaatcagtaaatt

SEQ ID NO: 4112 - DNA, 6491 bp, DROSOPHILA
atgccagattcgaaagtagtggcgagtgatagaaggaagagtaatagccatgccagcctgctcctgaccacatcctccactcatgtgcagcacgcggatagccatcgaggtaatgccaggacaccggatgagaacgatcaaaatagctcgctgctctccaatgactttgtcctgatgctagactgctcgccaagtccacaggatgtgttctgcgaaaatacgccggagtttaggacttcgtggctgtggctcaacaaactgaccaccatgcattgccacactctctacgatctgcgcatgcgcaacgcgtacatgagtcacttcagtgtttgcctaaaccaacggcgactgactggcgttttcgaggagcctccgccagcggagttggcttgggtcgacttcacggagaagccagaggatcagcaatgcccaaacctgactgaaatgcagcgttcctgtgatctgaatcaatcttctctagccgcagtgccctcctccgctttgtcatgtgactgcagcggtaaacggtcgacgtctgagtactgggacaccttctcgaattgtgctcgtccttccggcgggacaagtgtcccatccattttaaaaccacaagtgcagaggagccgacggctcctccgtcccgtacacacgacaagtgatgacgaagtgcgtcagctttacaaaaaccaaaaagcgaatttccgtttaaaccattcctcttctccctctgccacgcaatcgtccaccagtcgttcccaatcctcgccgcccaaattttcacccagaagtaaccagaagcccaacgcttttcaaaattccgatagtcagaagtcacccgaagatgttcgaaaacgtatgatcgatttgatggagcttattcgaatggaactgcgtggtgaaccgattccggataacaaggacattttggaggaggagttgaaaagatataggaattttttcgatcttcatttgcaggatggttcggattttgacccacattccaactcggggcgcgttcgtcgcaaatctgtggacgaatcttcgccatcggccaacaactcccagcaacagcagcaacattccattccgggctccgccgccggatctccacagcgagtggccaacaagcgtagcagcatcacggtgaacatgccggccgccggtcttggccagcgtcccccgagcattatatcgaccaccagccaggacgagggtggtttcaatgagtccgcgcccgagctgaaggccaagctgcagcccgcctacgaccagacggaggagcagccgcatagcctgaattacgtggacgtcggctatcgcctgaatcccgatggcagcgaaagtcgcgaggtttacggatcggaagctgaactctacgacacggccaaggtgaccgatatgcagcgcaagttccacggagccaatggttttggtcaggaatcgagcacggtttacgccattatcaagcctgatgtgcaggagtcccaaccagtggctccctcaagaagcgttctcatccagtctccaaattcctccagcgtggagggatctccactgcatcgcgggtcgtatagttccccacccgtgggtgtggtttcacctataaggcggcgcaatagcagcaatcaggatcagagtgttggtggtggaggcagtgccaaaaccacgccccaatgctctcccgcccgttcggccttagtaaagggcattgcccccattgcttcgatcgatgcgcacgaagaggaggaactagatctcgtagaggaggacgagcacctggccgtggagtatgtggaggtgctggaactccagcaggacgaagaggaggaagaggctccggtccttcccgagcgacgagctccggctcaaggctcccttgagcttcaggacttggagtatgccgataccagcgctggcgaggatgaggaggacatcataaaccatctaaaggacggcgatgtattggatgtggaactaatcgacgatgtcgtggatgaggtgatcaaggttcatgtgaatcacagtgtggccactgccccttcgattcaagctgctacaccagctgcagcgattccacgggaggatagcctgccggatgacatgaccgccgccgaggccgaaagattgttgagctctagacaacagtcgctgctgtcggacgaacaggccaaggaagtcgagcaaatactcaacgccgcccccagcgtgggcgtggcagttgctaccgttgttgccacagcaacatcgccgaccagcatcaagaatctcattgaggatttgcccgggcaatcggcagtcgccgccagcgctgccaacggggagcaggacattcaaatcgcagctgtcccagcaattgccgacagcacagagacagagacaaccaccactacaccttcgacagcaaccacagccaccactcgccacgacgacgacgagcccgagtggctaagggatgtcctagaggcacccaagcgcagcctagagaacttgcttatcacatccgccacttcgtccagagcacctggtcagcgtgaagagctggaaaacggctacgatctacatgagaaacattccgatctcaatcaaacgtatattactggtggggaatcactgcacgagtcgatagtttccgtggagtccacgcaatcggatgccacactcaatcagaccacgaccatcgacgacagtatcatctccagcaagcacaattccacctactccctggcagatgccgaacaggccaccagctctacggttttgagcactggcgttaccgaactcgacgacagtcagtactacataccagaatatccgccagttagaagcaaggaggttctcgtagaggccggagtccattacttcgaagatggcaacttttggatggaagtgcctggtctcttagactttgacgacgacgactgctcttatccgcccatcactgtacgcaagaatcccaaggttcgctttagttccggacccatccacgtgtactcgactttttccgtaaacgactacgatcgccggaatgaagatgttgatccggtggccgcttcggcggaatacgagctcgaaaagcgcgtggagaagatgcatgtcttccccgtggaattgatgaagggtcctgagggtctgggtctcagtataattggtatgggcgttggcgccgatgcaggcttagagaaactaggaatctttgtgaaaaccattaccgacaacggcgcagcagccagagacggtcgcattcaggtcaacgatcagattatcgaggtggacggcaagagtctcgtgggcgttacacaggcatatgcagcatcagtactgcgcaatacttccggtctagtcaaattccaaatcggacgcgagcgcgatcctgaaaactctgaggtagcccagctcatacgactgagtttgcaggccgatcgtgaaaaagaggagcgcttgaagcgttatttcagccaacaagaggagtacctgcgccgcactctcgactattccgaggactccactcagccggtttcggccaactcgagtgtctgcgagggaccctcgagtcccgtccaagtggaacatccaatggaggtggaggccacccactcgcaggaggtagagtcgctcaagcggctgctacaggagctggtcaagctcgagacgacgggcaatgagaacgagctgcttagcgagcgactgcggcaaagcgagcgggagctgggcaatatccggaaggaggcggccaacctgcagaacatgctccagcagtcgcagggtcagtatatggcgctggacaagaagtacaacaaggccaagcggctggtcagggagtaccagcagcgagagctggacatgtgccatcgcgaggagttctaccagcagctgctccaggagaaggacaccgagtacaatgcgctggtgaagaagctgaaggatcgtgtgattaatctggaacacgagctgcaggagacgcagcgcaaggccggttttccagtgggcctgccctacgatagtgccactctgaagttgacgccccagatgatgcgtaagacgccgccaaagccgctcttccacaagctcgagacggagctgtcggatacggagatatcagatctctcacccgacggcgatggcgttaagacagccactgtggagcgtaaggttccggtcaaggacgaactggatgcggcagtgccgcagcacgagctgctggataactcgattaacaaaaccaaaatcgatctggccaaccgccagttgccctcagcaaatggaaacagtagcacatcgaatggagccgccgttgatcttggccagctttcgaatgggaatctgctcaagcgcagccggagcaacagtcgcagctcggactgcacgctggatgacacggatgaggaggaggagcgagagggctcggcattgaacctagcaggcgctcctgtcgcccatgaaaccatcagtctctccaatggcaactcgcatctgctggccaacgtgaataatctgctgcagcaccatccgccggcaatggccacagtgatcgccacaccttcaaatggccacctgggcaccaccacgcccattctgttgaactccacctcctccgcctcgtccagttcgtccaaccaatcgacggcacgtgaggcacagatcaaccagctgtatgcccaggtgcacaaggatcccagcaagcagcaacatcagcagcagcagcaacaacagcagcaggcccaggccgtgaccaccagtattcctagcattttcaagaacgctttgggttctccggcggacaatggactcaacgactttcatcgcggcagcatgaccacctttggaacaggtccagccacaagcagcaatcgtgatctcaacagctcgtacgactctatcctgggctccaacgataagctagcggagaacgatcccgccgagagttggatgtatcccagcaggaggcgagtggcaccgaatggcagcaaagtcccactgccaggatccagctttactgatcaactcaaccaggcgctgtccgatcgagagaggcgactcggcgatggatcctcgcgacattctagcgacgattacacggagattaacaagagccagagcgccgcggccatcaactgcaagacgctgatcaacgagatccgccaggcggtgaacgaagcacagcccaaagttaaacaagtcgttccacaatcactctccccgcccggcacagtgccctggcagcagcagcaccaccagcaaatccagcagcagccgtccgcccacaccaccggtccgccgtcgcccaccagcatgtcctcgggctgctcctcgcccggatactcccccagccgcaccctggacctgtccggttccagctctagtttctccgatcgcaaggcgatggcagcggggtatacctacaagggtggccctgttcatgaatggaccaaggatcaggtgggacactggctgatgggcatcgagctggagcgttacatccccgtcttcaaggagaataacgtggagggcggagctcttcttaccctggactcaaaggacttcaaaaccttgggtatctgtggcgacgacaagcatcgtctgaagaagcgtcttaaggacctgaaggccaacatcgagaaggagcgcaaggatatggagagggagcgaagggagcgcgaaaaggccatacgcaaggccgagaagaaggcggccaaaaagaagtagttgaattctagttgataagcatcaaagtagccaaaaaccaaaagcatacgcagtatatattgtagtctatatacatacatgcatacacaacacacacaaggaaaacacgcgcgtatatataaacatatatctattcggttatatatttatatgcatgtaatgataatataatttatttgtacaacatacatctattatacatacgtactacattttaacctatcgaacctaatggcaactagacgtaattattctaaaagaaagaaaagcaagaaaagcagcaagtagcagatcagggtcaggagtggtagtgtagcagtagatctcggttagaaatgaccccgaatcccacactcaaaccgggcccaatatccaaccgatggcactcagactttcccgactaaaaatcgaactcacaaccaaaagaagaagctaagtaactaacaagaaggcgttggactgactgattttatgattaatttaaaaagaaaaacaaacaaaaggaattcttttttaagccaaccaaaaccaaaatgaaccatttgaattggagttgcaaacaaaagcatatagaacacttaaggaattcgctgaacagacttgaacggtgtaagagctgcttcaaataaaatacggaatataaggttaatattgtaataacgtttaagttaatgcaaggcagcacccaagggagtgtctcgtttttctaattattaatctgtgtaatttaatgactagcgcatattcaataatattcaattctagatatacatatacatatgtgtgtg

SEQ ID NO: 4113 - protein, 1900 aa, DROSOPHILA
MPDSKVVASDRRKSNSHASLLLTTSSTHVQHADSHRGNARTPDENDQNSSLLSNDFVLMLDCSPSPQDVFCENTPEFRTSWLWLNKLTTMHCHTLYDLRMRNAYMSHFSVCLNQRRLTGVFEEPPPAELAWVDFTEKPEDQQCPNLTEMQRSCDLNQSSLAAVPSSALSCDCSGKRSTSEYWDTFSNCARPSGGTSVPSILKPQVQRSRRLLRPVHTTSDDEVRQLYKNQKANFRLNHSSSPSATQSSTSRSQSSPPKFSPRSNQKPNAFQNSDSQKSPEDVRKRMIDLMELIRMELRGEPIPDNKDILEEELKRYRNFFDLHLQDGSDFDPHSNSGRVRRKSVDESSPSANNSQQQQQHSIPGSAAGSPQRVANKRSSITVNMPAAGLGQRPPSIISTTSQDEGGFNESAPELKAKLQPAYDQTEEQPHSLNYVDVGYRLNPDGSESREVYGSEAELYDTAKVTDMQRKFHGANGFGQESSTVYAIIKPDVQESQPVAPSRSVLIQSPNSSSVEGSPLHRGSYSSPPVGVVSPIRRRNSSNQDQSVGGGGSAKTTPQCSPARSALVKGIAPIASIDAHEEEELDLVEEDEHLAVEYVEVLELQQDEEEEEAPVLPERRAPAQGSLELQDLEYADTSAGEDEEDIINHLKDGDVLDVELIDDVVDEVIKVHVNHSVATAPSIQAATPAAAIPREDSLPDDMTAAEAERLLSSRQQSLLSDEQAKEVEQILNAAPSVGVAVATVVATATSPTSIKNLIEDLPGQSAVAASAANGEQDIQIAAVPAIADSTETETTTTTPSTATTATTRHDDDEPEWLRDVLEAPKRSLENLLITSATSSRAPGQREELENGYDLHEKHSDLNQTYITGGESLHESIVSVESTQSDATLNQTTTIDDSIISSKHNSTYSLADAEQATSSTVLSTGVTELDDSQYYIPEYPPVRSKEVLVEAGVHYFEDGNFWMEVPGLLDFDDDDCSYPPITVRKNPKVRFSSGPIHVYSTFSVNDYDRRNEDVDPVAASAEYELEKRVEKMHVFPVELMKGPEGLGLSIIGMGVGADAGLEKLGIFVKTITDNGAAARDGRIQVNDQIIEVDGKSLVGVTQAYAASVLRNTSGLVKFQIGRERDPENSEVAQLIRLSLQADREKEERLKRYFSQQEEYLRRTLDYSEDSTQPVSANSSVCEGPSSPVQVEHPMEVEATHSQEVESLKRLLQELVKLETTGNENELLSERLRQSERELGNIRKEAANLQNMLQQSQGQYMALDKKYNKAKRLVREYQQRELDMCHREEFYQQLLQEKDTEYNALVKKLKDRVINLEHELQETQRKAGFPVGLPYDSATLKLTPQMMRKTPPKPLFHKLETELSDTEISDLSPDGDGVKTATVERKVPVKDELDAAVPQHELLDNSINKTKIDLANRQLPSANGNSSTSNGAAVDLGQLSNGNLLKRSRSNSRSSDCTLDDTDEEEEREGSALNLAGAPVAHETISLSNGNSHLLANVNNLLQHHPPAMATVIATPSNGHLGTTTPILLNSTSSASSSSSNQSTAREAQINQLYAQVHKDPSKQQHQQQQQQQQQAQAVTTSIPSIFKNALGSPADNGLNDFHRGSMTTFGTGPATSSNRDLNSSYDSILGSNDKLAENDPAESWMYPSRRRVAPNGSKVPLPGSSFTDQLNQALSDRERRLGDGSSRHSSDDYTEINKSQSAAAINCKTLINEIRQAVNEAQPKVKQVVPQSLSPPGTVPWQQQHHQQIQQQPSAHTTGPPSPTSMSSGCSSPGYSPSRTLDLSGSSSSFSDRKAMAAGYTYKGGPVHEWTKDQVGHWLMGIELERYIPVFKENNVEGGALLTLDSKDFKTLGICGDDKHRLKKRLKDLKANIEKERKDMERERREREKAIRKAEKKAAKKK

SEQ ID NO: 4114 - DNA, 10546 bp, DROSOPHILA
ggattgggtagtggtggcggtggtgggcggataatggtgttctattgatttgcctaggtcggtgagtgcaggtaattaccgtgccaaatgtgacggaatcgaaactattgtgtactatacgcagctctcgccgagtagctgcaatacgtagatcggagtacagcaatctcttagaggcaaactgcttcggttacacgcacttatgtaaccttataacaaatagtgtgcatttttcgaatcgctgtcgagagaggaaccttggggcaagcgttggggatccaaagaaactcgggaaaaacctagaagggtgcacactaccaaaatataaacacaatcgcgggacgctaacggtgcaactgcagtgagaccagactaatttaaaaaggcgcccgtgtggtgcggaacttggctaatggacgcgttcctcagtgatataaaaatgaacacgttcagcgagcaacaatattgttgatcccagtgttatgcgatagttttgtagaacacgattggtgcaactatgaataagataaaataggtatatacaaaaataaaaacctttaaattatttatgtaataacttatttattcattttagtaatattatatttggctacataaagaatcattagaattcggtgagggcctcgaaacgataacacatcatcacaacatgcctatttatgatgtaaacattaaaaatatttaactataacaatatgtctatctaccttttattttaaaaattttttaaaaatgttccaagaaattaatatttttgttatctataggtaatattatatatcgttgttagaccttaaaatgtaagcttcaaaaattatcgatataaaaaaacagtagtgtcaaaagactataataaatgagcttttcaaatatttgagcaagcacaacttttggtatattccaaaaaattcccgtagttatttattcgtggctcagtgacgtttttgaacggtccaccgacggttacactgttcgcgatttttgttgtaaaagtgtttttgttgtgcttgcttgcataaaactgcgagttccaagtgaaatatctattgttgtggcccgaaaatgccaaaaaattagtgagcagtggtccccgccccaagtccgcagcaagcaggtgccaaaaccacccccgtgatcgtcgaaatcgaaccaatgacgtcgcgaatctgaggcgacaaagagcagcgggaggaaagtggtcgcccaaacgaccgtattgtgtcagcgtaatcagtattagaagcattagcagtccggattggacacaccagtcaaacgaacaccccccactgaccgacacagaaacatgtgctagacctcctcgaaatgggatcgcgtatcaagtgagtatgcccatgccgcccagtgccagttcgcagcagcagtgggcgttgcgctccactggtcgctatcgcggcgctctcactcccgcgactcatcgcccattcctcccgctcctccccccagaaatgacgtgaagaagctcttcgagttctggtgcgaggtcacgccgacgccgggattagagaggggcacgagttccaggagcggcgggccagctgttcccgccggcgtgatcgtggagagcttccccgagggattccgcgaccaggaggtgctcaccggcatcccatcgtttgcctttccctgcgacacaacaaggtgcgtatgcgggcggggattacaagctgatgccccaataggttttatgtatgacagctgtggaatatagccatttgacctgattcacaggatagaagatacacacattcacttttgtgtaggacaggttcattaaaactcgaaaaacccatatggctgccacatcccagtttatgtacgattttctagataaaaaaacaaactacgtcagccatttattactgaaaaatgtttatggcagatattgcaaatcgtaaaacataaccagctcgatctgactacattgaaataaaaagtctttggaactttccaatcccatagaatcagacgcactggcgatgctgatcgccgaaatctctactttatatggtcggaagcggcattagtcagagggtagtccgttttataaataatctgcagcagcaagtagcagacgcaaacgcaagaccaacgatcgtcgtccatagccagacggaaagcaggggttccggcggcgatgagtcaccaatccgacccgaccacttccaccaactaacaacagatagcctgtccatgaaacgaataacctgttgtgccgtttctgttgctgttgctgtttcgctttcggtgtttgtttacacagcgagttcgcgtaatgaactgtattattcaatgggcattgttcgacgccattcgcttaccatttcctggagcaccgggaactgtatcaattggcttcttcgccacctgcttagtcatacgactgcccccgacagactcatcccattcgcttatctggccagctgtccgtacggcaaattcatcgcctggttaaccattggctgcattagcaattaattgaattttcgctgttggaatttcgaagtttgtttgccagataactttttccagacaagaattggtttgacctcatagcttatctgagaattctcgggaactacgactacacaagcagagatttcagatttcatttgctcacatacagctgcggtcgaagtaatatgacttaaagtatataatagaaattatttaacgaacctgtggcctaaattcaactgtatgaaaagaatatatatactaaagaatatagtaaaatgtatattttaaagtcataactaagtgaattgaacaaaattccctaattccatgctcatatgcaacttgcagctattagtttgcgatttaatacaatactaatatgcgttattgtgggagcttttcaagtttagtgagaagagagagagggaggagcaccttatcttaaacgctgatgaatattcatacatagagtggcgcggtgataaagaaagtcgagtccaagtcaatgtcccaactgcccaactgtccaagatagccttcgctccccaaattcgcctccgttgccccaagctgccgggcagccgtatcagctgagcgccgcctgactttgcatattaaattgagtaatgacacgatccgaaacacttagatctaacgactttatgtaactgggagcgaagtgaaaaagagctccagtcgaagctgaggccgaacaatatgcaaatcgacggacaatgggaaacgtgccgggtaacgagactgcggcgtcattgttgcaaaattgcgatttatttaatttgttaaatgcgatttcaacacaataattaatgcggacaacgcgacgcataagaggcaaggaaaaataaatcaagcaaacggaagaaagcaaaaactagactcggtggcataaaataaaaaaaatgtgtacacatgtacacatgtatgtatatctttgtataaacgggctaaagacctttgcagttgctcgaaattcccaccgtgtacgcaattcaactgttgaatcaccaaaggtggatggtatcgcttgtcaatgagtggccaactggagcaatattttgaaatcaggatatcaaaacaagttgtttactattaattgttagggcattactcaatgtggctctgagaaaatcgccgaaagccgagaggaaagaataataaaatcggaatgatttgtatgcatttataattaaccctgaattcattgggcatgtttgtttggcgtcttgtttcgtcagttgacgacttgaaagccacaatcgtgcgaaaatcacatttacatacatatatgggttatgagtagaaaacgaagagcaactcgtcgccgtattagtcacgaaacatcgcagtcggggaaattcgggttagaatgtgctcatccatagttgtgggaaaaataactaaatataagtggtatctgtctataaaaaagaccaaagttttcacatagttgtgtggcttttgagattaaacatatatcatatcacatcaattgaactcgtttttatccactgtacagccaagtatcaacaactcatcatgcgtaacattgggcaacgcgcgatgagcaaggccaggcaatgagtagccggggcaaataaaatttccaaaccttggacattgtggagtttcaactccgccaacattgtttgtgtattttatttaatatacctatctatccacagcacctcggtgcagacatattcctttgtgcacaccactggcgattcgaaatggcgcttcggcttctgtcgacaggatccgcggacgaacacggccatggtgctgataacctacctgccgtggcacgacaccttcctaaagctgctgcccgtgctcgccgagctgaggcggacggatcccaatgggtttcgcaccttcctctccgaggcctacaaccagggtatcccggattgtggcggcagccttaaagtctattacagcgcaggccagagtgtaagtggagcagccatcaatagtattggaagagatcttgatccacttgtccttgaacagcacttcaccttcgaacgcccactgcagttccagttgcccagcatgccagaaaatgtgagccctacgaatttctataccagtaaagagaaaactaagaacatatttcgctttagcacaacttgaatttgtactacaacttcgtggagcccaaggagatgattgccgtgttcgctgcgatgctggccgagcgtcgaataatcttcacgtcgagacacctggacaggctatcctcatgcatccaggcggccaacgcattcctatatcccatggtctggcagcacatctttatacccgtgctgccgtgggagttcaaagactacctgggtgcgcccatgccatatctgattggtgtgccagaaccagtgctcgaaaccgtaagctccagaagctaacaatattatttaaaataataaatacttttgaaatccaataggtcaccagtgatgagctgggtgaagttgtgattctgaactgtgatacgaaaatattcgaaagcccattcgacgatgtgcacaatctgccaacggagattgtgtcacagctgaagaagcatctgaatcacacacatgaccacatcggcgaccgcatctcgaagatcttcctaaacgcactggtgcagctcatcggtggctaccgggacgctgtggagtaccacgagaacagcaagacgtttaattcccaaaaattcattgaatctcggccggcgcacctgcgcccctttcttgccaaaatgatggatctacagatctttgcgcagttcattgacgatcgcctaacgatgctcaacagcggactcggcttctcggacgagttcgagctggagacggtgcgctatgcggaaaagaagaagcgcggtcgaaactacgccatcatgaagaaccttaaggacaaggtgagccgtggactgtccactggacatcagcgatagcccaatgctgttagcctaaccctcatggtgccaaatccgccctacacctacaccatcatccccctcaattgcctggcttggaggggacctgggaacagggcttgcatttccgtttcgcctctctgcgctgacccgctaacccactgtactcttaagttaccttaccaccagtccaccttatgatgttcttttatttgatttgatttaatctattccacagtacttgggaaagcgcagtttgtcgcgattgtttgccaagaacaatacttagactgcccaccatgacaaatccaccaaatccaattaccaatatataaacgagtagaatgttcattcccacacaccttatttgcaatgttagttcaaatgatttcttatccttatgcaaaccaattacttaacgtcctaacaagcaaactgcaccgaattatttatgttgccataaactaagatggaaacgtctgaatgtttgttgatgcattctcaattaatatcttttaatttgtaaattacatgttctagttagctaattgtttaattttccttcctttgttgtgttctctatcaacacctgtggcaaacaaacaaaaagcgaaacatttctttaaatttattcacaccaaagtgatcaataaccttggcaaattggtaatggacccatgcactttaatttctatactaacacctattgtttaaatcactcttaaaatcgtatactaaacaatcatacgaagttctctcttctcgagtgtagttataccaaatatcttttagtctaatctggctttaatactaattcaatcatttactaacttccaccgcaagtaatgacctatcacagcagtgctgtttaaaagggcaatctttggtcgcagatttaaatcaccacctctcaacgtgtcaagccccattgccccagtgatccccagttcccattacccgaatcagcattgtcatcgtagccattaagtgtagttagtcgtagcttaaataactcactggttgttctgtgtatctcattcacgccgtatctcgcccgtatcttgtgtgtctctctttcatatgccgcttggatcgctcatcctacactcttctgtgctttctgctctcgctgcggttgtgaccaatcgttttctgatccaaaaaacgcgtctgtctaaccattgcagactaatccggctgtaaagtctgccgtcaaatcggtgagtggtccagtccccgtttaaagcccgaatccgtgttgtttcccgtgcgcttttgtgaatctctgcaggttgtaaaagacgcctaactaacccgctatttaatcttctcaggttaaggagggctcgcggggcatgaagaccgcctataagggattcaagacaaagctgcgcgagaacggaaaccagtttggtggcacgcacttccactttggacttggctccccgaatcattcggatcgtcctgacggcaccagcggaggatacgttcgtggtggcaaggccatcggggctgcacaccactcggcgcccagttctccagtgaccagcaagcgtcttgatggaattgcctccgtcacgggaagcagcggcagcggtggatccggcgccagggagccgcgggagttcctgcgacgcggtcccgtcccgctggccatgtctagctcgagcagccacattcagccgaacggccatgcgtacggtgcgagtgctggtgctcattatggtcatcatctcgctgcgtctcctgctgttagctcggcgagctcgctctgctcatcttcggagatgaacctgtcgcaggaactgcagaaccatccgcttttcaagacgccggcagtggaccgcagcgtaagtaatctggtgcgggcgtacgagcttcggctacagcagctccagtaactggagcttctgggtgcagccgttcacatgcttgccgctaagctaaatcgaccactcatctcgatgtgctgtgaatttatgttgttctcatgctcttcttgtttttgtttccttgtctgtgtcgtgtctctgtccaactgtatgttgccatcgatcgatcgttcgtcctacccacacatcatgcccacaaacaccccaaacaccgatatacataatcgatcacactccactgatacttgcacccacccccatcccggcattgcccattggcccacgcagcttaagccaaacgcagagcacaggcgaggagcagcaccgccagcccgtccaccgccaccgcaatctacgcccgcctcctactacaatcatccctatgccgcgcatccgcacgtggagtctaagccgccaaggcacacctccacgcccaccagaccgcgtcagcccctgcctaccgccgattccagcagctttgatagtccgccggacgtacaatctccaccgattccgccccggaggcagggcagctcgaatgcgattgtggcggccacggctgcagccgtcagtgcagagattagcaaactggaacgtaactgctggaaggacgagcccggaaatgattctgtacgcagctcgaatgcatcctcgtcatcggcgacctcatcctcctcgggcgcatcgtttgtgacggcggcgtcgacgttctcgcatcttaatgtgtctgatccgcccattccgacaccgcgggccaagagagaggtacaccagctgcgacgttagttatctaagcccatcctggttgtggtccccggcaaaagcacactaacacacatcaagggccctcatgtagtttctccccgatttatactaactccatttgctagttgatcagatgtccgatttgattttagatgtcactgctactaatcactcttcctgaaatacgtttattaaaggtcgttcaccattgtttcatgaaaaaacccatcatctattttccatagcatacctatatttgactgcaccaaatggtgggaatccaactactaatactcccataaaactgtcctacgacatgtatagtttatatatatagtttgattatatatgatttggtggtatatatcttgatttatttagattacttcattttttcatttcactttttggcattaatcgactgcatccattgtagttttcgtcaattgcatttagatgcttatgacggcttgaagtaggtagcttatcttgaatgtacttttcgtaaaagttgcaataaacaccgtagagccctggacacccacacccaaagctttctaacaacccgtacgtacgattgtccctcccttacccgcagcaacagcagccactggaggacagcatgaatgatctgatatcgctggacgatagcaacaacaccagcttcgacctggaggacttcgatccgctcaatcagaatgctcgtccgttgccgccgctcagcacggcatttgccaagaagtgcagcacactgcccgctggcgtcaacagcagtgtggtggccagtagcgtcagcaatccactgtacccgtatttcgcgcccaagcacatggccacggtggcagctgtgacgggacggacgccaccgatgcacccaccgccgcagatccagcgcaacaccattgccgccaagcccgacgacgacttcgagctgctccgcaagtacggcctggaccagttcaccctgaacgccaacggaacggagaagtcgcagcagctcaccaccggaaagggcatgaacaactggacaacattcgattgaagggacacagctggtcagataacctgcatcaaatatgataccaaaataagtgtgattgatagattgtgttgtaaatagctaggagagataggcaaaatcaaggatgggagagcgatgacagtaaaataacccctaaatacccaaaattgtgtgtctgcagtagtgagttagtgagttatacttaagcagaggatccaattaaaacgcttgtttgtgtaaataactgtttagtgaaaagttttaacaattgcatgaatcggaactctcgctaactacgcatacttacatacatattgtacgctggacttccaaatcaaaagacacaagaatctagagtagcatgaatttaagccaattagcctaacaaattaccaataaatataaaataaattccaattaaattatgtggctctgtatttattgcataacataaattggagtattgacaagcggtctaaatgttttgaaatgtgaattgcgtacatggggaacacaaaacgttggctgtgaatgtgtaacatgagagcctcattaagaaggaatctactggctcttcgctttgttctcggccatgcagctcaggatgcgggtctgcagagcccgtgcacccttgaggttgatctcctcgttgtcgggcaacaacttatccatgcgttccatccattgcttagtctgcgggtacttttcccgttccactggtatgagcagatccaaggtcaccagagtggtgtggatggacacgtcggcaacgctcagttcgttgcccaccacgaaacttccttgctgcagaaagtgttccaagtcggagtacgcattgtggcagagggtcagcgatcgggggttgtattctccctcgccaccgtaaatgttccgagccacaatgtcctttaccacctgaaatagcactccgttctcgtagtgcatgcgatggtcgatgtgggctctccttttcaaatcccgcggatagagttggtcattcccggcgtacttggctaccaggaagcacacgatggcgtgactgtccacgtagacctcgccatcgctgtccacaaacaccgggatctggtgctgggggtttagctgtaggaagccagcgttacataacgaaatcaacggttttcaaatccaacgaaccttgacaaattcctcgctcaggtgttccttcttggcgaagtcaacgggtctaaggattcgaaaagatcttgcattagcaatctgcatttaaaagtgcaccattcttttggttcttttacttgagctccaggtccagtccaataagtttggccaccaggatgcatgccctggcaggaggactaaaaagggcgtagtacagcgttggcttcgacattctcccgaagaattcacacaccaaatggcgatcaaggtgaacaagaagccagc

SEQ ID NO: 4115 - DNA, 3611 bp, DROSOPHILA
ttttgttgtaaaagtgtttttgttgtgcttgcttgcataaaactgcgagttccaagtgaaatatctattgttgtggcccgaaaatgccaaaaaattagtgagcagtggtccccgccccaagtccgcagcaagcaggtgccaaaaccacccccgtgatcgtcgaaatcgaaccaatgacgtcgcgaatctgaggcgacaaagagcagcgggaggaaagtggtcgcccaaacgaccgtattgtgtcagcgtaatcagtattagaagcattagcagtccggattggacacaccagtcaaacgaacaccccccactgaccgacacagaaacatgtgctagacctcctcgaaatgggatcgcgtatcaaaaatgacgtgaagaagctcttcgagttctggtgcgaggtcacgccgacgccgggattagagaggggcacgagttccaggagcggcgggccagctgttcccgccggcgtgatcgtggagagcttccccgagggattccgcgaccaggaggtgctcaccggcatcccatcgtttgcctttccctgcgacacaacaagcacctcggtgcagacatattcctttgtgcacaccactggcgattcgaaatggcgcttcggcttctgtcgacaggatccgcggacgaacacggccatggtgctgataacctacctgccgtggcacgacaccttcctaaagctgctgcccgtgctcgccgagctgaggcggacggatcccaatgggtttcgcaccttcctctccgaggcctacaaccagggtatcccggattgtggcggcagccttaaagtctattacagcgcaggccagagtcacttcaccttcgaacgcccactgcagttccagttgcccagcatgccagaaaatcacaacttgaatttgtactacaacttcgtggagcccaaggagatgattgccgtgttcgctgcgatgctggccgagcgtcgaataatcttcacgtcgagacacctggacaggctatcctcatgcatccaggcggccaacgcattcctatatcccatggtctggcagcacatctttatacccgtgctgccgtgggagttcaaagactacctgggtgcgcccatgccatatctgattggtgtgccagaaccagtgctcgaaaccgtcaccagtgatgagctgggtgaagttgtgattctgaactgtgatacgaaaatattcgaaagcccattcgacgatgtgcacaatctgccaacggagattgtgtcacagctgaagaagcatctgaatcacacacatgaccacatcggcgaccgcatctcgaagatcttcctaaacgcactggtgcagctcatcggtggctaccgggacgctgtggagtaccacgagaacagcaagacgtttaattcccaaaaattcattgaatctcggccggcgcacctgcgcccctttcttgccaaaatgatggatctacagatctttgcgcagttcattgacgatcgcctaacgatgctcaacagcggactcggcttctcggacgagttcgagctggagacggtgcgctatgcggaaaagaagaagcgcggtcgaaactacgccatcatgaagaaccttaaggacaagtacttgggaaagcgcagtttgtcgcgattgtttgccaagaacaatacttagactgcccaccatgacaaatccaccaaatccaattaccaatatataaacgagtagaatgttcattcccacacaccttatttgcaatactaatccggctgtaaagtctgccgtcaaatcggttaaggagggctcgcggggcatgaagaccgcctataagggattcaagacaaagctgcgcgagaacggaaaccagtttggtggcacgcacttccactttggacttggctccccgaatcattcggatcgtcctgacggcaccagcggaggatacgttcgtggtggcaaggccatcggggctgcacaccactcggcgcccagttctccagtgaccagcaagcgtcttgatggaattgcctccgtcacgggaagcagcggcagcggtggatccggcgccagggagccgcgggagttcctgcgacgcggtcccgtcccgctggccatgtctagctcgagcagccacattcagccgaacggccatgcgtacggtgcgagtgctggtgctcattatggtcatcatctcgctgcgtctcctgctgttagctcggcgagctcgctctgctcatcttcggagatgaacctgtcgcaggaactgcagaaccatccgcttttcaagacgccggcagtggaccgcagccttaagccaaacgcagagcacaggcgaggagcagcaccgccagcccgtccaccgccaccgcaatctacgcccgcctcctactacaatcatccctatgccgcgcatccgcacgtggagtctaagccgccaaggcacacctccacgcccaccagaccgcgtcagcccctgcctaccgccgattccagcagctttgatagtccgccggacgtacaatctccaccgattccgccccggaggcagggcagctcgaatgcgattgtggcggccacggctgcagccgtcagtgcagagattagcaaactggaacgtaactgctggaaggacgagcccggaaatgattctgtacgcagctcgaatgcatcctcgtcatcggcgacctcatcctcctcgggcgcatcgtttgtgacggcggcgtcgacgttctcgcatcttaatgtgtctgatccgcccattccgacaccgcgggccaagagagagcaacagcagccactggaggacagcatgaatgatctgatatcgctggacgatagcaacaacaccagcttcgacctggaggacttcgatccgctcaatcagaatgctcgtccgttgccgccgctcagcacggcatttgccaagaagtgcagcacactgcccgctggcgtcaacagcagtgtggtggccagtagcgtcagcaatccactgtacccgtatttcgcgcccaagcacatggccacggtggcagctgtgacgggacggacgccaccgatgcacccaccgccgcagatccagcgcaacaccattgccgccaagcccgacgacgacttcgagctgctccgcaagtacggcctggaccagttcaccctgaacgccaacggaacggagaagtcgcagcagctcaccaccggaaagggcatgaacaactggacaacattcgattgaagggacacagctggtcagataacctgcatcaaatatgataccaaaataagtgtgattgatagattgtgttgtaaatagctaggagagataggcaaaatcaaggatgggagagcgatgacagtaaaataacccctaaatacccaaaattgtgtgtctgcagtagtgagttagtgagttatacttaagcagaggatccaattaaaacgcttgtttgtgtaaataactgtttagtgaaaagttttaacaattgcatgaatcggaactctcgctaactacgcatacttacatacatattgtacgctggacttccaaatcaaaagacacaagaatctagagtagcatgaatttaagccaattagcctaacaaattaccaataaatataaaataaattccaattaaa

SEQ ID NO: 4116 - protein, 435 aa, DROSOPHILA
MGSRIKNDVKKLFEFWCEVTPTPGLERGTSSRSGGPAVPAGVIVESFPEGFRDQEVLTGIPSFAFPCDTTSTSVQTYSFVHTTGDSKWRFGFCRQDPRTNTAMVLITYLPWHDTFLKLLPVLAELRRTDPNGFRTFLSEAYNQGIPDCGGSLKVYYSAGQSHFTFERPLQFQLPSMPENHNLNLYYNFVEPKEMIAVFAAMLAERRIIFTSRHLDRLSSCIQAANAFLYPMVWQHIFIPVLPWEFKDYLGAPMPYLIGVPEPVLETVTSDELGEVVILNCDTKIFESPFDDVHNLPTEIVSQLKKHLNHTHDHIGDRISKIFLNALVQLIGGYRDAVEYHENSKTFNSQKFIESRPAHLRPFLAKMMDLQIFAQFIDDRLTMLNSGLGFSDEFELETVRYAEKKKRGRNYAIMKNLKDKYLGKRSLSRLFAKNNT

SEQ ID NO: 4117 - DNA, 4283 bp, DROSOPHILA
tgagctggatgggagcattcgccgccgtcctccgaagagtttgagagtcgtcgctttagagtgttctcgccgttcagccggtatcgcaatgagaagtcgtagttttcaacatttcgatcccgaccgcttcgggtaacgtcgcagccacgcatattctcgctgagcgcatcctcttgcagggcagaagcccacacgttgtacttcttgaaacgggctcgattcggttgcatttcagcatccgtgggcggaacgcgccgcattaccgtgcgccgaatgcgctttttccgcttcttgtggccgtcgggtccggtggattccgtacgaagcttcttgatgcacccgtcctcggaggattcggcagtcgaggagtcgctgttgctttgtgactcgtcctctaacgcagtctggatctgatggcaggtggtaaggggactggccaccttctccgcaccgtcaggtcgctgcaacggcgtgtaaacgccatcatcgtcgctctccgatagctgaaaggccggcagatatggtcattagatgctcggtagtctgggtgcttatgattacctcgccgtcctccaggtcaacgtcatttgcgtgcagttccatcattttttttatggcgagtcgagagaaaatcttcgcccaaagtgcagctgtttgtgcaacactgagcggcagagtgaccatacttactgaggattacttggtgcatagttaaattattatgtttatattattggtctttaatagtgcaaagatgtaaattagattagctcgtgttatatttacaataataaaaagatcagcgtaactaggtgttactaggcaaattaagttttgcgtaatttaatacttaggtgggggtgaacaacatagcttatattaattaatatattttttttattgaattatatgtaaataagactaaatgtatttaatttaattaaattaataaacatagttttaggtgaggcatttctgctatacccacaaacggtcacacaccacacgtgcgtttactttgcgaaccaaacagaacgtggttgaaaataatcgtagtttttatactgttataacggctcaccatggtgcggcccaacaacaaccagctgccggagaaccttccgcagttgcagaacctcatcaagcgggatccggagtcgtatagcgatgagttccacatccagtaccaacactttcttagcttgctggaagtttttgcgctgaatcccagcgaagaaaacaaatccctggatgacatcgtcatgtttgtcgcccaggtggctcagtgctatccggccgtctgcgaggagttcccaaagcgtctttccgatttgctgaagaactatgccaccgttctggacccggctatgcgtaactgctttgtgaaagctctaatcctgctgagaaacaagaacctagtgcccgcgctggacatactggaactgttctttcagttgctgcggtgtccggacaagaatctgcgcacctttctgcaaacgcacattgtgacggacatcaagaatatgaatgccaagcacaaggacatgaagctcaattcggtaagacgcagtcgtcagctaccactgttggactcaatcaatattcatttatgtctttgcagagcctgcaggcattcatgtactccatgctgaaggatgccaatccgaaggcagccaagatgtccgctgatatcatgatcgagctgtacaagaaaaacatatggaatgattctaagacggtgaatgtcatagccactgtggggtgcttctctaaggtaacaaaagtactggtcacctcgctcaagttcttcctcggccacgacgaagaggatgaagaggaggacactgacagcgagaacgaggtggaccttaagggtgctctgatggccaatcgagtcaataagaaaaccaagaagcggaccaagcaactggcgcagatcaaaaagcaagcggtgaaggcccagaaaaagaaaaagaacgctccagcctttaacttctcaggcattcacctggtgcacaatccgcagggaatggccgaagggctctttaagcagctgcaggccaccaacgagcgatttgaggtgaagctaatgcatttggacgttatttcccggctgatcggcatccacgacctcttccttttcggtttctatccgtacataacacgctttctgcaaccccaccaacgccaggtgacacgtgtgctccagtttgccgcccaagcgtcccacgaactggttcccggagacatcatcgagcctatcctaaagacgatcgccaacaacttcattactgaacgcaactccagcgatgtgatggccataggtctgaatgcgacgcgtgagatttgcatgcgatgtcccctggccatgggcgaggatttgctgcaggacctggcaatgtacaaaacgtacaaggagaagtcggtgatgatggcggcacggtcgctaatcacactctacagggaacagctgcctgccctgttgcacaaaaaggaccgaggcaggcagacagaggcccaggccgaacgaaaggttcgagcctacggagagcgcgaagtccacgacactgtcttgggtgcagaggctctgctcaaggactctaagactattgacatagagagcgaagacgatacggactcaaacgatggtgaatgggttaacgtggcgcacagtgatggtgagggtggtggagcggacgatgatgaagaagacgaagatgaggatgaggacgatgatgacgaagacgaagacgaagagaacagtaatgacgaggagaatgaggatgaagataattccgacgaaggcgtggaaagtggcgaagagtccgcaaaggccaagaaggaaaagaaagatatgaggatccttaaccaaaaggaggctgcacaggaactggctcttactcgcatattcacggacgaagatttcaagcgcatcaacgcggctaatcttaagaagaccgtaaccagtgcccgcaagagaccacttgaacaggatcgcgccgagttcgtcaagctgaacagcatcgagatgatctacaagaagcgcaagcacgacaaggagtcgcggctggagactgtgcaggcgggccggcaggatcgcgagcgctttggctggaaggatgggcgcgtgaacgagcactgttccaagacgaaccgcgagaagcgcaaaaccaagaactttggcatgctgcgacacaaggctcgctccaaggttaagaagagcttcaaggacaagcagcaggcgctgagaaaacatctgctgcatcagaaaaagatgaagtagtaccttcttgcgtttcaaacctcgtagtgctttaaatgaataccaatataagatatataattctaaccaattgattgtataaagggtagttggtagagttatctgatttatttcaattcatatagactttgtacggttgcctattcattaaactattttaaaaaattattcttggggctgggagtcgtttatctgcgacgcttttcggactttttaacgcgcttcggtcccttaacgaagcaccagtcaacctgaatggtctgtcccattatttcggcaccgttcagggcctctttggcggcgagcgcctgcttgtgggtctcgtactcgacgagagcgtatccctttgagaacccagtacgccggtcgaggttcaggtgaatgttcttgatttctccgtaatcgcagaacttttcctgaatctcgtcctcctgcgcctcctcatggatagaggtgacaaacagtatccagccctcgacggacctttgtggaccaggttccagctcatcgtcgtcctcgttgcgcacacgctcgtagctgtggatcgcctctcgggtgttactgtcgcttccaaatccgcgtcccttgcggtgcttcgccttttccttcaggcgcacaatgccctctgttttgagcgtagggtgcacggcgcggcgtgggagaaaatagaaagcataagaccggtggattacaaagcctgccgcagctacttacggtcaccgtcctcgtccacctcgaactcctccgcattgtcaatgtccaacacatcggccattttctttttctgtgtctaaaaagcagaatgaatgggtttatttttatttcgttttcgttccgcgtctggccagttgcaaaaactctgctggagatggcattatcgtcagtgttggttaattccgttaggaatactatcgcctggatgtttggaaaataatacttacattggccacaaatgttccgaaaatgtacaatgtttaattaattagcttggctttaataa

SEQ ID NO: 4118 - DNA, 2065 bp, DROSOPHILA
accacacgtgcgtttactttgcgaaccaaacagaacgtggttgaaaataatcgtagtttttatactgttataacggctcaccatggtgcggcccaacaacaaccagctgccggagaaccttccgcagttgcagaacctcatcaagcgggatccggagtcgtatagcgatgagttccacatccagtaccaacactttcttagcttgctggaagtttttgcgctgaatcccagcgaagaaaacaaatccctggatgacatcgtcatgtttgtcgcccaggtggctcagtgctatccggccgtctgcgaggagttcccaaagcgtctttccgatttgctgaagaactatgccaccgttctggacccggctatgcgtaactgctttgtgaaagctctaatcctgctgagaaacaagaacctagtgcccgcgctggacatactggaactgttctttcagttgctgcggtgtccggacaagaatctgcgcacctttctgcaaacgcacattgtgacggacatcaagaatatgaatgccaagcacaaggacatgaagctcaattcgagcctgcaggcattcatgtactccatgctgaaggatgccaatccgaaggcagccaagatgtccgctgatatcatgatcgagctgtacaagaaaaacatatggaatgattctaagacggtgaatgtcatagccactgtggggtgcttctctaaggtaacaaaagtactggtcacctcgctcaagttcttcctcggccacgacgaagaggatgaagaggaggacactgacagcgagaacgaggtggaccttaagggtgctctgatggccaatcgagtcaataagaaaaccaagaagcggaccaagcaactggcgcagatcaaaaagcaagcggtgaaggcccagaaaaagaaaaagaacgctccagcctttaacttctcaggcattcacctggtgcacaatccgcagggaatggccgaagggctctttaagcagctgcaggccaccaacgagcgatttgaggtgaagctaatgcatttggacgttatttcccggctgatcggcatccacgacctcttccttttcggtttctatccgtacataacacgctttctgcaaccccaccaacgccaggtgacacgtgtgctccagtttgccgcccaagcgtcccacgaactggttcccggagacatcatcgagcctatcctaaagacgatcgccaacaacttcattactgaacgcaactccagcgatgtgatggccataggtctgaatgcgacgcgtgagatttgcatgcgatgtcccctggccatgggcgaggatttgctgcaggacctggcaatgtacaaaacgtacaaggagaagtcggtgatgatggcggcacggtcgctaatcacactctacagggaacagctgcctgccctgttgcacaaaaaggaccgaggcaggcagacagaggcccaggccgaacgaaaggttcgagcctacggagagcgcgaagtccacgacactgtcttgggtgcagaggctctgctcaaggactctaagactattgacatagagagcgaagacgatacggactcaaacgatggcgtggaaagtggcgaagagtccgcaaaggccaagaaggaaaagaaagatatgaggatccttaaccaaaaggaggctgcacaggaactggctcttactcgcatattcacggacgaagatttcaagcgcatcaacgcggctaatcttaagaagaccgtaaccagtgcccgcaagagaccacttgaacaggatcgcgccgagttcgtcaagctgaacagcatcgagatgatctacaagaagcgcaagcacgacaaggagtcgcggctggagactgtgcaggcgggccggcaggatcgcgagcgctttggctggaaggatgggcgcgtgaacgagcactgttccaagacgaaccgcgagaagcgcaaaaccaagaactttggcatgctgcgacacaaggctcgctccaaggttaagaagagcttcaaggacaagcagcaggcgctgagaaaacatctgctgcatcagaaaaagatgaagtag

SEQ ID NO: 4119 - protein, 660 aa, DROSOPHILA
MVRPNNNQLPENLPQLQNLIKRDPESYSDEFHIQYQHFLSLLEVFALNPSEENKSLDDIVMFVAQVAQCYPAVCEEFPKRLSDLLKNYATVLDPAMRNCFVKALILLRNKNLVPALDILELFFQLLRCPDKNLRTFLQTHIVTDIKNMNAKHKDMKLNSSLQAFMYSMLKDANPKAAKMSADIMIELYKKNIWNDSKTVNVIATVGCFSKVTKVLVTSLKFFLGHDEEDEEEDTDSENEVDLKGALMANRVNKKTKKRTKQLAQIKKQAVKAQKKKKNAPAFNFSGIHLVHNPQGMAEGLFKQLQATNERFEVKLMHLDVISRLIGIHDLFLFGFYPYITRFLQPHQRQVTRVLQFAAQASHELVPGDIIEPILKTIANNFITERNSSDVMAIGLNATREICMRCPLAMGEDLLQDLAMYKTYKEKSVMMAARSLITLYREQLPALLHKKDRGRQTEAQAERKVRAYGEREVHDTVLGAEALLKDSKTIDIESEDDTDSNDGVESGEESAKAKKEKKDMRILNQKEAAQELALTRIFTDEDFKRINAANLKKTVTSARKRPLEQDRAEFVKLNSIEMIYKKRKHDKESRLETVQAGRQDRERFGWKDGRVNEHCSKTNREKRKTKNFGMLRHKARSKVKKSFKDKQQALRKHLLHQKKMK

SEQ ID NO: 4120 - DNA, 4315 bp, DROSOPHILA
cgaaaatgtacaatgtttaattaattagcttggctttaataaaatatgttgaagttaagggtaaattgtatcagccaaaatcaccttagcaaaataataagatccggaggattggactttcaaaatacttaagttctcccgttcttttttattctgtaaccatctaaagtagacttattaggtgcgttttatccaaatatgtatttttcaaattaatactctagctttataggttataggcattgaaaattctttaacatatatttaacacatttaacatagaacatttaaagacggagctaaaaattgtgtgcttaatcggtcggtaaaatatttttgtaaaacataatttgagggcaccattaatttttattaacagctgacattcagcgtatattttaaaaataataagttcggtccagtaccatttgaaaagcgtgcattattacactgcagacgctgtttgtcccaaacctaatatttttattttttttatccaatccttttagtcactcgattttcagtattttatttatcatatacaaatattaatgtatttgaatagaatgtcgaaaaagtcgactcgatgtatgcgatttaagattcatgtatgcatctacatattcatttcagttaccaaaatctgaaataataagggtatgcaaatgcatcataacccacaattacaatgccgcatttaattccttctgcgagattatatgttactttgctcatattttcaacaaacataggtctttatataaaacaatccacaaatagtggttacttgcagcctataagtcaaaaacccattctctgccgtttcccatgccaattgaatttaaaactgcctaaactaagaactagacttgctagacaactagactgtttatatctgccctgtgtttaaagataaaagtacaaatattttattattaattttcatatataaacgttaatatgccatcgttaaaagacgcactatcgcccagtcacgttgtcatctcaaactcacggcataaaaaaaatttgaccggggtccgctttgtcaaaatttgccgtatgtttataaaggggcgtggcagactgactatgtgtatgtggccgcatcagcgaactttatcaggctaacactacgtcgatcggtcgatcttcaattgcgctcccatcagtagcagctcagtgtgcttttctttgctgccgggctgtgacatcactgtcagcaaccgagtgctgccttttctccgctcccgttcggcattcatctaaattcaacataaaattaaatagatcttttggccaaaaaacctcagccaccatgtgtcaatccggcggccagatgctgtgcgagatcaagaacatggctctttcgggcgatccggagctagatggcgagatccgcaagtggattcgatgggacaaatgcgctagcaccgcctgccaaatcatggacgcagttcgggcgaaagactgggacacgtaaggataatccaaacaaaatgattcatggcttaatattcttaattcgctgattaaataggctgcgcaagagactgtgcacccgcatcagcttcggcacggccggattgagggcttgcatgcgggctggctttgactccatgaacgagctggtggtgattcagtaagtttgatcttatcttatctctaagtttatcggatcattgactaatttaattcgtttacaggacggcgcagggcttatgtgagtacatcaaggaacagtaccctgatccggcggactggtccggtcgtggcattgtcttcgggtatgacggtcgttacaatagccaccgcttcgccgagctctcggccattgtgttcctaaacaacgactttaaggtgtggttgttcaagcgctacgtggccacgcccatggtgccctttgccatcttgaggctacagtgcttggccggcgtcatggtgaccgcctcgcacaatcccaaggaggacaatggctacaaggtgtactggaccaatggagcccaaatcattccgccgcacgacgagggcatacaggagtcgattctaaacaatttggagcccaagggctcatcctgggacgattcggcgatgtgctcgaacacaatgctggaggatccgtacgatatcgttgtgccgccctatttcgatatactgaagaaacaactgccttgcacttcgctggaggccaacggaaggtgctctctctcattcacctatacggccatgcacggcgtgggctatgcatttgtgaagcaggctttcgcccgaatcaatcttaagcctttcatatcggtgtgcgagcagcaggagccggacccagagttccccaccactccgatgcccaacccggaggagggaaagacctcgttggatttatcaattaaaacggcgaaagccaacagcagccaaataattttagccaacgatccggatgccgaccgcctggcagttgccgaagtacgcgaggatggtagctataagctgttcagcggcaacgaagtgggcgctcttttgggctggtggtctctggagctgcacaaaatgcgagaacccgactgcgatgttagtaactgtgtgatgatagccagtacggtgagctcaaagattctcagggccatggccgagcgggaaggcttccagttcttcgaaacgctgactggattcaagtggatgggtaacaaggcaatcgagctacagcaggcgggaaaaactgtgttgtttgccttcgaagaggcgatcggcttcatggtcggcaccaccgtacttgacaaggatggtgtcagcgcggctggccatttggccactatggcgtgctatcttcggtgcaagctgtgcatgacactgcaggagaaactgcgcgacatctacgaaacatatgggttccacacgactgtcagctcctatgtcatatgccgttgcccgccggtcatcgagcagatctttgagcgcttgcgcacctgggacgagggcaaggcagacacctatccgaccagcatccttaacggcgagtacgagattgaaaacgttcgcgatttaaccacgggattcgacagtagcactggcgacaagaaggccaccttgccgaccagctccagttcccaaatgatcacatttaccttcaaaaacggactcgtggtcactctacgcaccagcggcacggagcccaagatgaagtactacgccgaaatgtgtggcaagccggacgagaaaaactgggccaagctgactaatacaatgaataccatggtggaggccattgtcgaggaattctacgagccaagcaagaacggcctccagcgcaggaaggaataatccgaatgcacctttaagcggatacgctaggcgactgggacgaaagatctaacacgtagacctgtctaaaattgaaagttctataccaacagcactgacgacgcacaagccaaaaaacaacagcagcgcaagctgttgcctattattgtttaaaggatatctgatatgttagtattccactcacatttggctagtatttatgaaataatgtaaataaaagcgaacgcaccatccaccaccaggcaccaaatcatgggtttcctcagtttgatatttaagtagcttatgaaatgagaccatcgtgctcactccacttgaattaattgagcttattactcttatcatagaaattcgagaggcattcgagtctttgtatcacaaagaacttgaaacttgattgattgcgattaaatctactcatacattatacttcagtgcgatttggtaaacctgctgggctcaataatcaatataggaactgtttgttaatcccgagctgataaggcaactttcagacattcaaaagacccccaagaatgaattaattacgtgcgcatttccacgatttgcgtcaccttcgagatagaacaattcgtttaaagctgttaaagaagtgggtttgatttatttacgcattttgttttttatgctagttacaattacaacagttacagtttgagagtaaatgtatgtataaatggtatgtatgcttaggttggttttccaattgctttaagtaattgctagataattgcaatataaaagagcttcgacagaagacatttagctagaaaacgaaaatgaaatcaaacctcaagcaaacgtttctaagtagttttgtaaataggtatatatcatatatgtatgtatatatagattgggttcactggaacgtacacatgttcgaatacgaattcgggtccttatcactataattttgtctctaaaaatacacgagtttttgtatatatgtggttgctatgcacaggctagtacatac

SEQ ID NO: 4121 - DNA, 2190 bp, DROSOPHILA
tcatctcaaactcacggcataaaaaaaatttgaccggggtccgctttgtcaaaatttgccgtatgtttataaaggggcgtggcagactgactatgtgtatgtggccgcatcagcgaactttatcaggctaacactacgtcgatcggtcgatcttcaattgcgctcccatcagtagcagctcagtgtgcttttctttgctgccgggctgtgacatcactgtcagcaaccgagtgctgccttttctccgctcccgttcggcattcatctaaattcaacataaaattaaatagatcttttggccaaaaaacctcagccaccatgtgtcaatccggcggccagatgctgtgcgagatcaagaacatggctctttcgggcgatccggagctagatggcgagatccgcaagtggattcgatgggacaaatgcgctagcaccgcctgccaaatcatggacgcagttcgggcgaaagactgggacacgctgcgcaagagactgtgcacccgcatcagcttcggcacggccggattgagggcttgcatgcgggctggctttgactccatgaacgagctggtggtgattcagacggcgcagggcttatgtgagtacatcaaggaacagtaccctgatccggcggactggtccggtcgtggcattgtcttcgggtatgacggtcgttacaatagccaccgcttcgccgagctctcggccattgtgttcctaaacaacgactttaaggtgtggttgttcaagcgctacgtggccacgcccatggtgccctttgccatcttgaggctacagtgcttggccggcgtcatggtgaccgcctcgcacaatcccaaggaggacaatggctacaaggtgtactggaccaatggagcccaaatcattccgccgcacgacgagggcatacaggagtcgattctaaacaatttggagcccaagggctcatcctgggacgattcggcgatgtgctcgaacacaatgctggaggatccgtacgatatcgttgtgccgccctatttcgatatactgaagaaacaactgccttgcacttcgctggaggccaacggaaggtgctctctctcattcacctatacggccatgcacggcgtgggctatgcatttgtgaagcaggctttcgcccgaatcaatcttaagcctttcatatcggtgtgcgagcagcaggagccggacccagagttccccaccactccgatgcccaacccggaggagggaaagacctcgttggatttatcaattaaaacggcgaaagccaacagcagccaaataattttagccaacgatccggatgccgaccgcctggcagttgccgaagtacgcgaggatggtagctataagctgttcagcggcaacgaagtgggcgctcttttgggctggtggtctctggagctgcacaaaatgcgagaacccgactgcgatgttagtaactgtgtgatgatagccagtacggtgagctcaaagattctcagggccatggccgagcgggaaggcttccagttcttcgaaacgctgactggattcaagtggatgggtaacaaggcaatcgagctacagcaggcgggaaaaactgtgttgtttgccttcgaagaggcgatcggcttcatggtcggcaccaccgtacttgacaaggatggtgtcagcgcggctggccatttggccactatggcgtgctatcttcggtgcaagctgtgcatgacactgcaggagaaactgcgcgacatctacgaaacatatgggttccacacgactgtcagctcctatgtcatatgccgttgcccgccggtcatcgagcagatctttgagcgcttgcgcacctgggacgagggcaaggcagacacctatccgaccagcatccttaacggcgagtacgagattgaaaacgttcgcgatttaaccacgggattcgacagtagcactggcgacaagaaggccaccttgccgaccagctccagttcccaaatgatcacatttaccttcaaaaacggactcgtggtcactctacgcaccagcggcacggagcccaagatgaagtactacgccgaaatgtgtggcaagccggacgagaaaaactgggccaagctgactaatacaatgaataccatggtggaggccattgtcgaggaattctacgagccaagcaagaacggcctccagcgcaggaaggaataa

SEQ ID NO: 4122 - protein, 623 aa, DROSOPHILA
MCQSGGQMLCEIKNMALSGDPELDGEIRKWIRWDKCASTACQIMDAVRAKDWDTLRKRLCTRISFGTAGLRACMRAGFDSMNELVVIQTAQGLCEYIKEQYPDPADWSGRGIVFGYDGRYNSHRFAELSAIVFLNNDFKVWLFKRYVATPMVPFAILRLQCLAGVMVTASHNPKEDNGYKVYWTNGAQIIPPHDEGIQESILNNLEPKGSSWDDSAMCSNTMLEDPYDIVVPPYFDILKKQLPCTSLEANGRCSLSFTYTAMHGVGYAFVKQAFARINLKPFISVCEQQEPDPEFPTTPMPNPEEGKTSLDLSIKTAKANSSQIILANDPDADRLAVAEVREDGSYKLFSGNEVGALLGWWSLELHKMREPDCDVSNCVMIASTVSSKILRAMAEREGFQFFETLTGFKWMGNKAIELQQAGKTVLFAFEEAIGFMVGTTVLDKDGVSAAGHLATMACYLRCKLCMTLQEKLRDIYETYGFHTTVSSYVICRCPPVIEQIFERLRTWDEGKADTYPTSILNGEYEIENVRDLTTGFDSSTGDKKATLPTSSSSQMITFTFKNGLVVTLRTSGTEPKMKYYAEMCGKPDEKNWAKLTNTMNTMVEAIVEEFYEPSKNGLQRRKE

SEQ ID NO: 4123 - DNA, 3155 bp, DROSOPHILA
caggtatcgcttgtaaaccacgctccttgcactgggttcagagttctgcagcagagcttccatagtcgttttgtactgaaaaaagtgtaattagtcattacgcactaatttataataagaaattgagctatgaaagtgctcatatcaattataattctttatatttcaaaattatttttaataaataaattaataattatacggtaacttacaagctgagtatcttcgggcgcaatttcaaagtcgtttgaaacccaaatgcgtcccagatactcctgaattttcgtaaaatttccattctctgtgtcctgcactctctttttaagtacagtgaagcagaaaggagccacatttgagtcagaggccaagttgaaaagcttttcccaatagttcaaggattgttctctaaaaatgtaaagtaaagatcactttagtagtccttttatgacaaagtctagtatggatagtatggagtatggataatgaccagggagtcacgagcagattcttacggttgcaggtcagccaactgatcatagatttcaggcagttcgttgctgggcgcgcagttggcgagtccgaggagcgcggcaggggccggaccatccgtgcacttgatgcactgcctcaggtttttggccgcctccgccttgtcgatattctggtaggctgccccaagcaacaagtagcccatagcattttcaggctccgatttaagtaggcgctgcaataaaggcattaggatgatgcataactggtatgttctatggtgacgtcacttggcacttgggtatggcttccgcatgcttgcccagctttatggtctcccgaatgtccttgatcaaggcttttgactcttttacggcgctcattgtaaatatttatatttatttttcatctattccaaacaaacagtgatgggtaacttgattttgtataacgccagtgttggtcactgctgcataaggtgcaacagctgttaattaaattgtgtgctaattaagtgtcagtaaaaatgcacattatctgcaagtcgcagtgcggaaatcgcgctgctttgaaggtagttcataagttaaacagcccctaataaatcctaataatgttgtttgcccaaagcgacccaaaaccggcgatgccctgtgcaaggagtgcttcttcgcagccttcgaggcagagatccatcacacaatctcctccagcaacttgttccgacgtggcgagaaggtggccgtagcggccagtggaggcaaggactccacggtcctagcgcacgtgtatgtcgtaccattccccccatcgcacctctctaatccaagtgttctacagattaaaactgctaaacgaacgccataactacggtctggaactggtgctcctttccatagacgaaggcatcactggatatcgggatgacagtttggagacagtgaaacagaaccgtgacgactaccagatgccactaaagatcctgtcctacgaggagctctacggctggaccatggaccgcattgttgcccagatcggccgttctaacaactgcacattttgcggcgtcttccgccgacaggccttggatagaggggccaagctgttgggcgttgatagcatagccacaggccacaatgcagatgacattgcggagactgtcttgatgaacgtgctccgtggggacacggcgcgcctgcgacgctgcacgagcatccgcaccggcgggggcgaggataccattccccgagtgaagcccctcaagtacagctacgagaaagaaatcgtgatgtacgcccactacaaaaagctggtctacttctcaacggagtgcgtattcgcccccaatgcgtatcgcggccacgctcgagcgtttctcaaggatttggagaaagtgcgaccatcggttataatggacatcatctactctggcgaacagcttcgcttcaaggacacggtaaagaagcccgagcgtggcacatgcacccgatgtggcttcgtttcctcacagcagccgtgcaaggcgtgcgtccttctcgagggtctaaatagaggattgccgaagctgggcataggcaagaagtcgaagggcgagcgaatgattgccaagcagaaccaggaactagcattgcgggagcgagcaaacttagtaaaaaacgatttttaagaacacatatgaattttatttattcgtgattccacaagatacaaattgtgttcatccaaggttgccaacctgaaaagataacaacaggaacgataagtttggtttcgcaggctaatttcattaatactagaatgcattatgaagctcagtgccaagtttttaaccagggcccataaccagtcaaacaagacgctctatctccaaaagaatattgaagaagattgccagcgcttgacctttatatggtgtctgtgaatggtttaagtgatcatcattgaaatcttcatttccgctaaacagaatctcttttcgtactaacctttttagatattggaatttataaatgaaccattgacggattcattttgctacgcatgtttcacatctgtaaaaaaaaaaaaaaaatcaaaaacaatacaaataagtagttattcaaatataactcaatcgtttaagcgattttaaaatgatcagttaattatattagaaaaatttgaatcacaacggttcattagagatgtcagaaattttaaaagcatcatttacatattatttcgttctagagtataatttaccttttcaaaggagagatccttgtttgggcatatgacgcgacaatcaaaggtggttttcttgaacactgcaaaatgacaaaaattaaatggttataaagagcagcaaccgattttctaaaaaacttataaaacacaaaaataataaaatgaaggggtttcagtaaaaactcgtatagcttcataacatttttcagtcgaaagatggtgtaagtttcattcatcacaacacaattaattgtccaatttacacataaaatttaaactaaatttttttattatcttaaaccgaattattacctttttcactgtgttagtgagccacgtttgatacatgatattgacgttgcaatgaactgaaattaaaatatatttgtgttattcaaatgtaacaatctttttaacaggtttttttaaagcgtttaaaa

SEQ ID NO: 4124 - DNA, 1047 bp, DROSOPHILA
taagtgtcagtaaaaatgcacattatctgcaagtcgcagtgcggaaatcgcgctgctttgaagcgacccaaaaccggcgatgccctgtgcaaggagtgcttcttcgcagccttcgaggcagagatccatcacacaatctcctccagcaacttgttccgacgtggcgagaaggtggccgtagcggccagtggaggcaaggactccacggtcctagcgcacgtattaaaactgctaaacgaacgccataactacggtctggaactggtgctcctttccatagacgaaggcatcactggatatcgggatgacagtttggagacagtgaaacagaaccgtgacgactaccagatgccactaaagatcctgtcctacgaggagctctacggctggaccatggaccgcattgttgcccagatcggccgttctaacaactgcacattttgcggcgtcttccgccgacaggccttggatagaggggccaagctgttgggcgttgatagcatagccacaggccacaatgcagatgacattgcggagactgtcttgatgaacgtgctccgtggggacacggcgcgcctgcgacgctgcacgagcatccgcaccggcgggggcgaggataccattccccgagtgaagcccctcaagtacagctacgagaaagaaatcgtgatgtacgcccactacaaaaagctggtctacttctcaacggagtgcgtattcgcccccaatgcgtatcgcggccacgctcgagcgtttctcaaggatttggagaaagtgcgaccatcggttataatggacatcatctactctggcgaacagcttcgcttcaaggacacggtaaagaagcccgagcgtggcacatgcacccgatgtggcttcgtttcctcacagcagccgtgcaaggcgtgcgtccttctcgagggtctaaatagaggattgccgaagctgggcataggcaagaagtcgaagggcgagcgaatgattgccaagcagaaccaggaactagcattgcgggagcgagcaaacttagtaaaaaacgatttttaa

SEQ ID NO: 4125 - protein, 343 aa, DROSOPHILA
MHIICKSQCGNRAALKRPKTGDALCKECFFAAFEAEIHHTISSSNLFRRGEKVAVAASGGKDSTVLAHVLKLLNERHNYGLELVLLSIDEGITGYRDDSLETVKQNRDDYQMPLKILSYEELYGWTMDRIVAQIGRSNNCTFCGVFRRQALDRGAKLLGVDSIATGHNADDIAETVLMNVLRGDTARLRRCTSIRTGGGEDTIPRVKPLKYSYEKEIVMYAHYKKLVYFSTECVFAPNAYRGHARAFLKDLEKVRPSVIMDIIYSGEQLRFKDTVKKPERGTCTRCGFVSSQQPCKACVLLEGLNRGLPKLGIGKKSKGERMIAKQNQELALRERANLVKNDF

SEQ ID NO: 4126 - DNA, 5536 bp, DROSOPHILA
ggatcagggtggcgataccgatgttgaagttgaagatttccagggttccgtgctagcaaatggccaatcaattctaaccgagttcgattccaatgtttcgcaaatcaactttgagattaatgactttgataaggtgtactgcgagacggagtctcaaagctcggaggcctcacaaggctcagccacgtggcgcatgaatggtaacaacgtcaaccggccatcagcggcggctcaactggggctcagtgaccaggcacgtggtcacgttaagtcgcgccttgatctgagagaaggctctcgatttcgtaataattttaacaagagacgcaatcgtcagtataatcaccatgaacggaatgaattccatcgtcatcagcaccagccccagattgccaagaaggaggtcctgcgctacgcctacaatgccttcagcagtcaagaaatccattcaaatcaacaaactgaccttgacattgatgtaaataaacatttccagtatactcaccaggcacccactgatccgcgtagcagccgcaactacatgggacctgaccactacgactggaccggctccacctcgatcggctctttaatcgattcggtgtcccacattccggataatcgtgtcaagaaccatttgccttgtgaaaccatcacgcgttacacggacaactcgatgaatgtgtttgctggagaagcgcaggatattaataagccgcagactgacctgaaacccgcagcagttgattccgagagcatgaaaatcagtaaaatggcccacaacgtgatgctcttgctcaagagcgttgcccagcaaaacaaccaaggagactcgtgtgacatcttcaaggtaatattcgaaatcatgtgtaatctaataccacacaatagagatttgaaagaaagccttacaaactgcacgtgtaagaaaaaaggcattaagcttcaagaaatgattcatattaactttgtatttttaaataagtttacggttttcttatttaagaacatcgactggataaacggaccgatggaggagtcccgaagtgtcgcattgcctgaacgtgaaggaggaagggaccaactgcaacgttttaactagaaaaccgacatcaagttgcatttaagggatctatctgacttctgttatttctaagtactcagcagcccatgtttaaattaagttcgccggattggcgggcactttctgtgcgaattgcgagtcgacgcaggcaagaagaagacgatttcgacgatgcccagtgaatggcaggggtgaatagtcgctttctgcctcttttttttatatatataacacatatttcggctgataagaacaggctgggcctcttatcagtaatgcacaacaagaagtacacacggacgaacgagatgtgagaagcgaaagcggacgaaaatagaaacaaacggcgataaatttacagcgaaggcgattttatatacatacataactgatgtgccggagacgaacagagtaataatcagttaatctgccaagcacccagagagcggacgtgaaaatgatcatcgggatcggatagcgggatagttagtagtgatcgtaacttaggatagtgtgctaaacactaacctcaacctatgttttgtgctttgtcgagtgtagaacgaacacgcagttattttgttgtttgtgcaaaagcattcgaaagtggccaactgaagaaagagccatcgattctttgcatttggttacttttatagcgtagtctttttcccaaacgattttcttaacgaatacgaaataaactgaacacagtaccctaaatgtgcgttgttcgtcttcggtagtgccaagcatgttgaagtcgaagcagttgctccaacagttttccaaaggtaaggatgtgtgggtttccggagccgaaatggcacaacttgaggtgttttacacaccctagctatctgtgttttcgttgccgcctccattatcagccttaggcatgtgctggagtaaactaataccatatcaccagatccgtaggctcgccttgacagccttaatcgcatctgacgccgaccaagccgaagattatcagtaaacactttttcgccaaattctttgtcacgatgaactttccccacgcacactggctgacaaaattattcgctcagaaagtggatattatcttaaatatcctttttggtttccggattaacttaacttaaccaacttttcaacaagtattgaacgcagatctcaaagtgtgtgtcactaaactttgttatgctataattatattgattataaacaaacaaattttacatactggatagcttgattttacttatctttaataatggtatttaaagctcactgcagtatgtcaaaccattaggaaaatctacgaaaaacatgattggtacaaaccaaatacataacattgtttcattaaaagttttagagggaaaatactttccacttgcactgtgttgtttatcagctgttccgggaaatttccattaaaacctagtagttacacatcgatttcggccgtaggatgcttcaaaacggcaggaagattattcccgagggtttgagtaaatttcccgtgacgaggacccacatttgatcggactaacgaggtctttcgcttgcaattgccattttgaacagagtacgctaaatatacgccgaccaacttcaagctaaagcgggccctggtcgtcaccaagctgtcccgctatgagttcgagcagctacgccacccggaactgtctccggatcagctccagcaaaagctccgtgaccggggcaccgacgtggagatggtcctccatctgcacaaggtgcacaaggacttcgagcggcgggtcgtgcagagcttccaggacgtcggctgcgaggtgaagttgtccagcaggtgcgtacccatgtagtcctccaattcagtgatcggagtgcagctcaaagcaacggaggccataggtacatgtactcaagtaaatgagtaaatgtactcaagccatggaaatgatttcattgctttgaatgagattagttctatgaggacatgtacccagacatccacacctttaggcctccaatcactgccaccaatgttgtgttgcgtgcctcgtcacttcgtcacatactatacctatatgtatcttcgatttgtgactactacccgctacaattgatctccaccatcttcacacacttcgtgtctcccatgcggcacctcaccctgtgtgttgactttactaaacgagcagacttgaatttagaagctcgttgagcaaggacgtcatgagctgggcggacgtcatcgtgccggtgggcggcgatggcactttccttctctccgccggacgcgccagtccgctcttcgcgctcagccagcagaagacgccgatcgtgggcttcaactcggatccgcttcactcggagggccgactcatgctgcccaagcactactcggataatccggccgacgccgtttcccgcatcaagagcgtaagtcctggaacgagccacttctcacaattcattcattaaatattcaaattcctggcagggagatttcaagtggatgcatcgctcgagggtgcggactacgatgcttggtagcaacggcaatattccggagccgactgaccttttccgccacacggaggtcaagatggagcaggtcagcaccgcacccgaaatgctggaccaggacatggcctacaagtacaaggccaagatgaaacgtgttcttccttacttggctttgaacgaggtaagacaattaggattctatgctggattgcttagatcttacaagctgtctacataggtatttattggcgagcatctatcggcccgagtgtcccacttgcaactggtgctggaccaccaggacgtggtgaacaagaccaaatgctccggactgtgcgtcagcacgggcacgggctcaacatcctggcacaccagcatcaatcgcatcacaagccgagatgtggacgacctgttgcgttccctgcccgacggcgattcaaagaacgtgatgatgctacgacaaaatgcagaggagatcgcccagcggtacaaccaaggcctgctcttcgcgccagacgacccgcgcctctgctattccatccgggagcaaatctgcgtgggcgtgtggccttcgccaaagacttttaaggagcgcgattttgtgcagaccgtgtttgtcaagtcgcattgcatcgatgccagtgagtagttggacattcaaatacgaaacaagatataactatgacaattacatctccacagacctggttatagatggcagcatttcgttccccttcaacgatggcgccaaggctttgctagaggttcacccagaagatgcccttctgacaatcgctttagactgaatccagtgatgcgcccctagtgcctggtcatctcgctctagcatgtctgaatttttgaaattatttaagtaagcattttgcaactacttagcagtgtaagctcaaaagttattttgttattttataaaagtatatttaaacatcacgctttatctttcttgacatctgctctgcccttttgggcaactggtttttctttgttaagccttttcagtggcttggttggggtatcttcttgggtggctctacttcgtccttttcccttcttctcaaacctcgcactgtctacagatttaaaacgctcgtcctgtaggagagctttgccctcttcgctggctgccggctctgcgtgctgcagttttctctttcggcgtatttcccttagtttatccttctgttttttacgatacctgtggatgggatacaaaaattgttataaaatacaacgaatatgcgtattttccactgcttacaaagcttccatttggtcggggtccttcccctccataatccacgtctttcgcctatagttttgcgctcgctcgtcgaaatcgttattatctaattgcatctctgattcacggcgcgtgacatttacttgcataaagattctctccaccatgcgctctaatttatataatatatatattaaagatagttattttgtgtgccactaattccaacaaaacttacgatcgatgggatgctctgtaagtttggtgttgatctcctcctcaatggcggccaaaagctctagatcgcgtggaaagcggaatatggagatggacatgcccttgcgccccgctcttgctgttctgcctacgcgatggatgtactcctttggtgtccggggaagcatgtgattcataaccagctcgacgctgggtatatccagacctctggcggccacatccgtagcgatcagtgtacgtatttggttggacttgaagcgacttagagcagctacgcgctccttttgccgcatgaaaccatgcaagcaaacattatcgatttccatgttcttcagtgtcatcgagagaagctgacagtacctaaaatgattcgttattaaatccttagaatttacttcctattattgtgcaactaacttttttgtgttggtgaagatcatgacattagcgtt

SEQ ID NO: 4127 - DNA, 2212 bp, DROSOPHILA
tttaagaacatcgactggataaacggaccgatggaggagtcccgaagtgtcgcattgcctgaacgtgaaggaggaagggaccaactgcaacgttttaactagaaaaccgacatcaagttgcatttaagggatctatctgacttctgttatttctaagtactcagcagcccatgtttaaattaagttcgccggattggcgggcactttctgtgcgaattgcgagtcgacgcaggcaagaagaagacgatttcgacgatgcccagtgaatggcaggggtgaatagtcgctttctgcctcttttttttatatatataacacatatttcggctgataagaacaggctgggcctcttatcagtaatgcacaacaagaagtacacacggacgaacgagatgtgagaagcgaaagcggacgaaaatagaaacaaacggcgataaatttacagcgaaggcgattttatatacatacataactgatgtgccggagacgaacagagtaataatcagttaatctgccaagcacccagagagcggacgtgaaaatgatcatcgggatcggatagcgggatagttagtagtgatcgtaacttaggatagtgtgctaaacactaacctcaacctatgttttgtgctttgtcgagtgtagaacgaacacgcagttattttgttgtttgtgcaaaagcattcgaaagtggccaactgaagaaagagccatcgattctttgcatttggttacttttatagcgtagtctttttcccaaacgattttcttaacgaatacgaaataaactgaacacagtaccctaaatgtgcgttgttcgtcttcggtagtgccaagcatgttgaagtcgaagcagttgctccaacagttttccaaagagtacgctaaatatacgccgaccaacttcaagctaaagcgggccctggtcgtcaccaagctgtcccgctatgagttcgagcagctacgccacccggaactgtctccggatcagctccagcaaaagctccgtgaccggggcaccgacgtggagatggtcctccatctgcacaaggtgcacaaggacttcgagcggcgggtcgtgcagagcttccaggacgtcggctgcgagagcagacttgaatttagaagctcgttgagcaaggacgtcatgagctgggcggacgtcatcgtgccggtgggcggcgatggcactttccttctctccgccggacgcgccagtccgctcttcgcgctcagccagcagaagacgccgatcgtgggcttcaactcggatccgcttcactcggagggccgactcatgctgcccaagcactactcggataatccggccgacgccgtttcccgcatcaagagcggagatttcaagtggatgcatcgctcgagggtgcggactacgatgcttggtagcaacggcaatattccggagccgactgaccttttccgccacacggaggtcaagatggagcaggtcagcaccgcacccgaaatgctggaccaggacatggcctacaagtacaaggccaagatgaaacgtgttcttccttacttggctttgaacgaggtatttattggcgagcatctatcggcccgagtgtcccacttgcaactggtgctggaccaccaggacgtggtgaacaagaccaaatgctccggactgtgcgtcagcacgggcacgggctcaacatcctggcacaccagcatcaatcgcatcacaagccgagatgtggacgacctgttgcgttccctgcccgacggcgattcaaagaacgtgatgatgctacgacaaaatgcagaggagatcgcccagcggtacaaccaaggcctgctcttcgcgccagacgacccgcgcctctgctattccatccgggagcaaatctgcgtgggcgtgtggccttcgccaaagacttttaaggagcgcgattttgtgcagaccgtgtttgtcaagtcgcattgcatcgatgccaacctggttatagatggcagcatttcgttccccttcaacgatggcgccaaggctttgctagaggttcacccagaagatgcccttctgacaatcgctttagactgaatccagtgatgcgcccctagtgcctggtcatctcgctctagcatgtctgaatttttgaaattatttaagtaagcattttgcaactacttagcagtgtaagctcaaaagttattttgttattttataaaagtatatttaaacatc

SEQ ID NO: 4128 - protein, 409 aa, DROSOPHILA
MLKSKQLLQQFSKEYAKYTPTNFKLKRALVVTKLSRYEFEQLRHPELSPDQLQQKLRDRGTDVEMVLHLHKVHKDFERRVVQSFQDVGCESRLEFRSSLSKDVMSWADVIVPVGGDGTFLLSAGRASPLFALSQQKTPIVGFNSDPLHSEGRLMLPKHYSDNPADAVSRIKSGDFKWMHRSRVRTTMLGSNGNIPEPTDLFRHTEVKMEQVSTAPEMLDQDMAYKYKAKMKRVLPYLALNEVFIGEHLSARVSHLQLVLDHQDVVNKTKCSGLCVSTGTGSTSWHTSINRITSRDVDDLLRSLPDGDSKNVMMLRQNAEEIAQRYNQGLLFAPDDPRLCYSIREQICVGVWPSPKTFKERDFVQTVFVKSHCIDANLVIDGSISFPFNDGAKALLEVHPEDALLTIALD

SEQ ID NO: 4129 - DNA, 2713 bp, DROSOPHILA
aaagtcgcttcaacgcgcgcaaaaagttccaattcgccatactcgtgatacgggccatcattcggatacggcgcctacgcttcaccgccgagccgctgcacgttgaggaggccatccgggatccgtatcgcgtcaaggttctgcgcaaaggtgagttgctacaacaattcatatatcgaatatagtacactaattcaacttttgttgtaggtcatcgatggctgtgccttccgtgtctacgggcattgggtcaagaagggtgagggccagaatcgggccgccctcttcgagaatactccccgcacggagctccacgcgctctacatcaacaatctcagccgatagaaggcggtcgggcatggggcatgggccatgggccatggggaatggggcgtggcggagtcgcgctgatctacacaagcacacacacacacacacacacagaaagaaagaaaaaagaaaataagaggaaacacagtaagcaagaaaccaagaaacaaaccaacaaacgaattagcaaaagctactactatgagaagcaggaaattgcgattgcaacaggacacaccaaacacaccaaaaaggattcaatccatccatacattcggattcgcctcgttctggacggacagccaacacgcaggtgtacatatatacgtatgtatgtatgtatgcatgcctagtaacattacctcccctgccttcttcgtccttgtgattttgtttaatactttttaattcgattttattgcgtctaatgcgcgccagccatctagtgtaatcagttagtgtagtgaatgtagcgttcaaccacggccatgcataccacccagatggtacatggctatccagtggtccaacgttatgacccggcgccagaacgagccgaatcggatgacgagatgcgattgattgttgggttgggggaatgtacacacctcatctcaccatactccacacccaactaagcccacacaagcaagcgtacatgcatatgtattttctgttaatgattctattaaattatttaattgtattgctaagcgtttacattttaattgttatgttgtagtatacacaataaataaaaacaaacaaaaaaaaaaaaaaagaacgaaataataagctgaaaacaaatccattgcccattgcctcctagttagttgagcaacttaaggattatggcaattaataatggcttaagatgttagatgtgcttgtcgcaattgtatttccgctcgcagcaagcgggaaattcgcgattgatgttcacaaagtcgcgctgcttgcagcccggtggcggagcgactgcatcgcaggttttgaaggtcaccaagccatccgcatggcattcggcccgcacgcatggcagatccggcgccagacccgtctccccgggcgacaggatcgtgttcgtgtccagcacacacttgccgggatgcgctgcaagcgatggagcaaagagttagtatggcatatgactggtttgcacccaagtggacatcaccagcacaaacttacatgaattgttcagtttgaccttggcaacggccgcctggccaacgtggccgccaaggatgacgaccaggccgaggagtaggaatgcggcaacggtgctaaactgcgacatactgctcgatactggatttcgttttgggtaatctctggtggaaactctgggatcgagcgaggtgttatcaactgggatgctggtccgcaagtgctgatgtttgggccgcaccggcaatgttttatacgcaaccgggggcgtcggttatcagaaggcgaaactgaatccgaatccgaatccgagttcgagttcgagaccgaagccaaagcccccggaatgaggcggcttatccgctccagctgccgacgacaccgacttgaccttgtccaacgagcggagctcctttttccgattccccgattgccggtttagctgcctgtttggccgctttgtttaatttttatttttatttgtttttgttaatatctgtgatcatttttttttgttttttttacttccctgcggttcattgagtacttaattacaattgccccacgcacacagacgcctttaatttatttatgcataagcacacatacgcgtgcttattgttattattcttatttttttgttttattgacggtgtgcggaggcttatcacgtttcgaattttcggcacccgtttcgtttttgtttttttggtttttttttttgggaattttcttgttttggtgttttggaattcctgcgagttttttttaagagtagcagtgttccagcgggtttaccgcgacttgactcatcatcacgagggcacgcatcttcaatttgcactttcaccggcgcctcggggttcttgaaccgccgcaaagccatcataaaaaactggtccttcaatattcgatggttataatgtatgcatatttacaatatagtacatattatggatgaatgatcattcatatccagatcaggttaaaaagtctttcaacccactggctaatgtaattgatgtaagtcatacgaataacaagctaaaatcgacaaggttttgcattttgttcaaaatttgatatttgcaattggatttttcatcataagatatcctaaaattttataatagctgattattatcaatcctaacgatcccattaacttttggcaattttttatattttttttataattttgcaaaaaatggcc

SEQ ID NO: 4130 - DNA, 635 bp, DROSOPHILA
ccagcatcccagttgataacacctcgctcgatcccagagtttccaccagagattacccaaaacgaaatccagtatcgagcagtatgtcgcagtttagcaccgttgccgcattcctactcctcggcctggtcgtcatccttggcggccacgttggccaggcggccgttgccaaggtcaaactgaacaattcatcgcatcccggcaagtgtgtgctggacacgaacacgatcctgtcgcccggggagacgggtctggcgccggatctgccatgcgtgcgggccgaatgccatgcggatggcttggtgaccttcaaaacctgcgatgcagtcgctccgccaccgggctgcaagcagcgcgactttgtgaacatcaatcgcgaatttcccgcttgctgcgagcggaaatacaattgcgacaagcacatctaacatcttaagccattattaattgccataatccttaagttgctcaactaactaggaggcaatgggcaatggatttgttttcagcttattatttcgttctttttttttttttttgtttgtttttatttattgtgtatactacaacataacaattaaaatgtaaacgcttagcaatacaattaaataatttaatagaatcattaacagaaa

SEQ ID NO: 4131 - protein, 114 aa, DROSOPHILA
MSQFSTVAAFLLLGLVVILGGHVGQAAVAKVKLNNSSHPGKCVLDTNTILSPGETGLAPDLPCVRAECHADGLVTFKTCDAVAPPPGCKQRDFVNINREFPACCERKYNCDKHI

SEQ ID NO: 4132 - DNA, 9904 bp, DROSOPHILA
tttacggtgagttcttcttttgggtcgccctcgcttatctgctctatattaattcgcccttctgtttgtgcaacagattgaccggattcatttttatcttcttccatctcctttgtgtggtgagtgttttgttttgcagtgtattgaagtgtattgttattgaccaaaacgaaaattagtagatatttaagagataagtaacagattaaaacatagaagaagaatataattattaaaagactcaaagactattcatatacagcttttatttaactctaaaattcacatgaactggattaagaaaaacactcctgtgtgcgtagcagatcaagaatataaaagtgtcgtcaaagaagaaaattttagcggaaagacttggagaaattcgatggaaagttatactataaattttattttgcaaccgtaaacaattatttaagtgcaaacctcttcactaagaagttgaccaataggctttaatgttacaccaaatatgtcctttgatgaatttgactgtgaagtgtccagaggagtattcgttgcgattctccttttaaatatcggtaatttatatgtagtgactccactctgtatagtaaaaaattactttttatcggttgctgctttaaaaaacgacgtgatttgtggcattacatttctaaattttacaaaattattgattgcacccgaagaagtgcaggaacgtgctagaaaaaagtatcttaatggtttggcctacaagttgtacatgaaactttactacttttgttttactaggcatgcaatatcaattatatgttagcacttataagcctgatcaatatacaaacattatacactatatgtgaaactgtaaaattcaagagtactgcttagttgtattctgtgaaatttcttcattaacctctgaacctagtgattaatcgataattgtgtcacttagagtacttttttctctttttcaacgaaaatctgatttgcattaatgtcctggtcttcattaatctgttcttcttttgctgatgcaggctctaatttctaatgcgggttttctaccatttctgattttacttatcttcgattttttatttaccttttgctccacttctttttcattcttggtcttctccttttctttcggcttttcttccttctttttggcaaccttttccaccgttattttgcaagatgattcgtccttgccgacttcattggtcacaataaccttatagttcgatgtgtgttctgtccttgctgagctaaaagttaatcttgctgttgttccatcaaacgtggtggttatgtccttggtttcacgtataacggtgcttcccttataccactcaaccttacacttgcggtctgtttgggacaggctgactaagagctcaaaggtcttcgactccgcgaccttctgatctgctagctttctcgagatttccggtttgcacggctttcgctcttcctctggaatgtcaacgaggttgacaatttgggatactgcctctcctttttcgttactggccaccagcttgtaggcgcccttgtcactctcttcgacatcgttgatttccagcttgacggcgaactctccttcctttgtttgctctacctggtaaacgtgtctcttgctctcttttacagtgctggtttccttgtaccaggtacacttgggttcgaattttgatgctactgtgcactctatgactacagtacgtttttttataatctttataatttttggcttatcctttataacaggaacgactggtggagaacaagaaaagaggaattcaaaaatatatattaattataatcagtttcataagatcgtgtttgcttccggtgggcatatacgcactctctatattcagggtaaggttggcattaagttcgcccagcgtgttcttaatgttacacttgtaaaggccggagtcctctagttgcggatctaatagctccagcttgatgtagtattggtcgccacgctgttcaataaacgtcttaattttgttactttccttgatgacttctccgttgcgaaaccaaatgacatctggtttcggatctgccttgaccttgcactccattataaccaatttgccgttgttctcagaaacaatgcgtggcttttctatgaatgttggcccctctccttcgggctccggttccgcttcaatgttaaggtttagatttgcgtttgattcaccgtattcgtttttgacattgcatctgtaggtcccaccatcggttgctcccggatcctaaaagagattaaatgaagtaaattatcggttgctgttatgctatccacaatgcacttcaccttaatttcaagtgtcagctcatacgtgtcttctgcaataactgttgtgttaatttttatcttcttactcttctccaccaagtcttgacccctgtaccaagttactgtgggttcgggcttggccttgcacttgcacttcatggtgatcaatgtgcctgattcatttgggatgattctcggcttttcgataaaagacggcgcaaacccgttagcatcgctcgcaccttgtaaacaaaaaaaatacaaagttaagaaaaatgctgaaaaagctaccgaagaaaaaatgtggaagcaagtctattagtttaggacacggtttgaaatgtattgcggatagatatgaccaaaatcaaagcagttgaaaaaagtttgtttatatatcgggcagacattaagccgtctcggccgacataattgcatgcttaatacaaacaaaaggtttgctcactaaattgttgctcaaacattaaagcgttaagaaagatactatatccgaagacctatttgacggctagaattccgatacattcgctttggtgtagtgcatcgttttgaaaaaatatttgttttccaaataattaactcgcaagaggtatagctatacctatgtatagctgttagttgtcagagtaaccttttgaataaaataataaagctataaaaaataaactgcataattttcatatagtatataacccatatgttaaatcacggggtaacccaataaaatggtcaatgtaaaggtttaacaagagagaatactatagtcgagttccccaactatcagatacccgttactcagttagtcgaaatacgaaatttcataatctttcgggaaatcgaaagatattggggaataaatgacgaaattttctttgggcgtgactgttttggacgttttgtagtggtgtggatgggtgtggaggggaggaagggtgtgtggaaaattggcaagtcaagcaataaaaagaaagaaaaaagaaacatttttcaaatgtgtgggcgtggcagttttgggcggcttgtgctcgttagagtgggcgatgtggaaactgaatgcttccacaactttctatcctttacagacagacggacatggccagatcgactcagctgatctcctgatcatatggtcggaaacgcttccttctgtctgcttcataattttaaacgaatctagtataccagatttcactctacgagtaacgggtattataataatgcgcttaaataaaaattactccaaatttggaatcacgtatagcataaaaaaggtcgaggtcgatgaggacccgtcaataagagtgcgccgtcccagattgcctttctcaatttttcctctgataaatcagaatctgccttcaggcttacatttatataatataattatataaatcacaatacaggaaagaaaaaatatagtaccttgaaagttaagcgcaatgtttgcattactttcgccatacatatttattgcgttacaacgatagtttccgccatcttctttggtgggattttggatttccagagttagaatgtagctgtctttagttattgccttgcgagtcattttcgttctttgattgttacagatttccttttctgagcaataccagactatatccggaaccggatgcgcttccaaaacgcattccatgatgagtaagtcttcttcttggcggatcgttggttttttcggaaagcgcggcgactttccatccggaattctgtattgagttggaaaaggtataactttcggtattgtttattatctcttagtgcgtttttgctgccttactttttcgagccgctttcgaaattaagattaatagttgcgacgccagaaccgtgcttgtttttcgcttgcgcgcgatattcaccctggtcagatgataccacactgctaatctcaagacacgcaatgtgatatagtttttgatccattgtcaaagacattttgtagcgatttgattcgtttagttcagtctcgccatgggacctttgtgcacatgaagaaaagtatttgtagaaagtgtagaagtgaagtaaattaaattttagtcgaatccgtttatttctcaattcacaacaaggtgtcacttatgctgttttttttttgctaccatatatatccgaatttatttgagtctctctgaatgtatatatcgataaagttattttcgtaccatgtgactgttggcgtgggatctccaacgcatctacactcgaacgttacatttccaccatcttcgctttgacgaattaccgggcgttcggtaaaagttggcttaatgccttctgcgctttccggcacgggggcttcgtcgcctatagagttgaaatatccatatagcgcaatttgaaaatgactgtatgctccaataacaaggtctgagcgttaaatatgttaaattacctttactattcctacataactatataaattcatcaatggcagatttaagttacaaaatcagtgctttgctttgcacttaatgactcaaacattttaaatacttcctcaaaattaccaatacggtcatatatttgcattgcggttacattaaaacgtaaaaaatatagataccccataattgattgatctcaaagtttgtcacattttaagcattgttgattaaacatgattaagttatttctgcggctttcttgcaaaacaataaatgtaaatattgattgttaataaaaatcgaatgagatattaatgttcatatcaagcattcttattaagacttactgtcgaagtttaggcttattgtagcgttgctttcgcccaattcgttttttgcattcactttgtattttccagcatcctcaactgttacatttagtatttcaagtgttgcaaaatatgaatgaacgtctttgtccacagtaatctgtaaaaatgacaatatagaaaaagcctttacatcttctcggcaacacaaagaatgtatgtttataagataatcttacaatctttataagataaagattttttctaacaattcagtttaaatgaatgatctcaatgatctaactttttctacacattgaattgaaaattgaaaagtaggcaacattgaaactttttcttcgcactcacactagctgactaactggtttttgatagtcgaaaaactcgagtatggtgttctctcttgtctttactatcaagtggtctgtaagtattttatattcagcgaataaggtaatttacagagactgtttataactgtttatagattgattatgcctaacaagatatgaaaatatgaaaatgtgtgctatagtgttccattaatcttagataaaaactaacgcgttatttatggcgttgccttcattcgaatattcatatatttaagtatgtataccttatggcgttctgattccttgacagcagctccattatggaaccaaataatggcgggtatcggatcagcgttaacgcggcactcgaataataatcgttttccatcttcttcctgtcgtatggcgggttttttcgcgaatgtcggcgcgaatccgtcgatttgtctgcaacatacgcatatatcaatcgatattttaatctggttagcttattacattaatcatatcgtaagaagtcaagcattaaaattagcattctacattgcacaaaaatgttaaaaaaatgattatataatattgtatatggtgttattgcctgtgctacaaacaaaaactactcaaatgtaaaataaaataaaaaatgaacaaaaaatgttatgaaacggggaaaaatataaccattacttaaagaaaatgtttaccatacaattaccacgcgatttatgcttagtagacataattattatgtaaaaattagcttatggtataccaatattgttgagatagtctggaaaatttttacaaacttaacgtttcccaaatgagtatttaaaaaactatagaagtccgactcttttaaggacatttataaatttttaagtggactgtatgtactttactaaacacattaaatatcataataatttatattattttacttacccctcgttttccagaagtgaaaacttaccatctgtattgaatttaaaacccccattagtaaaaagagtagtttataaagaaaaactaaagcaattttttaaaatatattgccgatattatcatgcagctctgcttaattgcttaaataatttatgcgtaatgcaactaaatatcgttattttaggcatttgatatataatagaagatcaattaaaaatatcattgttaaggctcatgtttcgttaaaaataaagcagtgaagcaatagaaatggcttacttttcttttggttcgtcagcagctagagttttttacgacggtagagtaaaattttaaaattattttaatatttttgtagacgcaaatgttatgaatattaatttttaaaaatcatctaatattgtcaacgaatcattaaccatcaaaataaataaaataagaagttcgtttctgcaagtcgagtctattaaatgtatatccttggaataattgcaaattaaaaaattacaggtacacgaaataatagcagagggtatattgatttcattcagaagtttgcaacgctgatatatatgtaaatacccaaacagctaaaatttatctataaaatataaaactttcagcatgaaactatcacaaaagtctactttcaaccgcaggaagcgaatatcgaaaaaggctgcattgcatatggctaaaatcaatataccctctgtaaggttaaattaagttcatattaatattaagcaacaatcataaaaacgtgtaccggctatccgaatatatatagaaaccaaactcaatctaataaatggatttggttcgagcagaacgtttctttataaaaccggaaatgaattcttcgctatttatcaatctttttttctggaacactaattcatttgcaaaggtatttaaaactggccgacttacgtgtgaaatttaaattaatagacgcagagacttcgcccgacttgttctttgctttgactttataaagtccggcatccgtttcaactacatcgtcaagctccaatacaaccgtatacttattttctccgacgggttgaattttaaatttggttcggacatcttctactactttattgtcacttcgaaaccattcaatgtccggtttcggggatgacaatagctggcactcaaatatcaatcgattgccatcatcttcttgatgcagttgtggctttttaacaaagctgggagcgaaatcttcagccacccccatgctgagggttttccttaagcttcgtcttcaacggctgtgagtctatggctgaatgaaacagaaaaaattgctcaggacactgaaataccgttttggaacaatagacaaacaaatacaaatttcatgttgtaaagattattcaatgtgtatttttaaccaagatcaaacaagtaaatattctttggattttaatctccaacggccctattagttcagggcagggcatagtaagttttatttaaaaataaaagggtttttttggcgtttagaaattatcccaatatattaaatttaaatactctatgattggctattttccgttatctaacaatgtaactaaaaaataaaccgaatcacaataaactagaacgatacacacgtatttatgtatttagagttgcacacgacccactaagttttggaattcggaaattcgatcgccttttcttcattcagcatagatattgttgatggaaaacattttactgaataaacgaaaattcatgtattgcatgtctatttttagccgttcgcagtcaccggctgagaaataaacctgaacattcgaatactaaactcacacaaatatgtatatattcgtagatagattcgtggcaatatataaatatccggatacaacatagattatttaaacaaaaggaaacggtataagggaaaatcagacaaagaggatatccgcttattatctaaaacgtgcttgcctcctattaataaaaatacaacagttttaaagagctgagttaagtttgcgaatttctcatatcagtttttttggttgtttcaaagtctatttttatcaacaacaacgtgttacacaacgccatgaacagatgtgaaatatctgtgtagaataaaacgaactcaatttctttacaatatgctacaagcgtaaaacacttcgatatcctttttcttaattatggaattataacaattctagaataattatcattttaggtttagtttcacttcactttagaaataagaacacataaaaacttaaattattcgtagccatttatatttagtgtgcatatgtagaatgagccatcgcccttaaaataacaaagtggtcgacagaagggaatttaaataaaaaatactgcaactatagctgtggtcagccgtagaatataaacatatattcattaattaaatatttattttgaggtgtgtttaaaaatttttttcacttggtacgtactgggctacaagtaacacagattgaacacagaacgaaattaattcttctgcgaaaacgaagcgtactccacgagctttagtctattactggcaggtccaaagaataggtgctcttgatcagcgaagcatatgcactgcttttgtagcagacagcgcaggcgcgatttgtttttgacaacaacacctaatttctacagtctatatacagaagaagtatttatgtagccactgtttgttaggttttgcgggcaggccagtacaatcagcttaaacttcttttacaatgttgtaaccttttgcaattgattgctaatttaaaaaaatcataatttaaaaaatcgttagcaggagtgtctaacagctgattgcagttaaaaactactcagctagcggaaaatcgaacggaaatattgttaatttttctggcatattgataaatatgggaagattgggaaataaaataggaaaaaattgaaaaaaaaactccaatagagtgggcgtgatcgtttgggcgttttgtagttaggagaggcgggcatggacaatgtgttttggtacaccgatagaacaatcctgagtaatgtttacaaaggtattggcaatataaatattctcgaatacttgtttcgaaaaacttcaagaagccttttagagaatgcatccagaagcctttcacgaagtgcttaaagatgcgttgcacgagaagtaggaaagattctcctgcccgtcaaaatggaaaagtaactttcgtagttgtggaacaaattttactcggaaaagagttataaaggaactaataacaactttgataaagtatatttacataattatgcaatcgacaatgattatattttctttttaactcattttatttgtacagttaatttaaatcaatttaatatgtatgtaacgaaggggattaaatttagcgtgcattgtaacgatataatctttatgttcataagctaaatggggtaaaatattaagcttatcaaatctctatttatgaaccatattaacgtgcagggaaacatgcacacttaaaaatgctgatcaccctaaacaagaaa

SEQ ID NO: 4133 - DNA, 2859 bp, DROSOPHILA
tggagtacgcttcgttttcgcagaagaattaatttcgttctgtgttcaatctgtgttacttgtagcccaccatagactcacagccgttgaagacgaagcttaaggaaaaccctcagcatgggggtggctgaagatttcgctcccagctttgttaaaaagccacaactgcatcaagaagatgatggcaatcgattgatatttgagtgccagctattgtcatccccgaaaccggacattgaatggtttcgaagtgacaataaagtagtagaagatgtccgaaccaaatttaaaattcaacccgtcggagaaaataagtatacggttgtattggagcttgacgatgtagttgaaacggatgccggactttataaagtcaaagcaaagaacaagtcgggcgaagtctctgcgtctattaatttaaatttcacacctgctgacgaaccaaaagaaaaacaaatcgacggattcgcgccgacattcgcgaaaaaacccgccatacgacaggaagaagatggaaaacgattattattcgagtgccgcgttaacgctgatccgatacccgccattatttggttccataatggagctgctgtcaaggaatcagaacgccataagattactgtggacaaagacgttcattcatattttgcaacacttgaaatactaaatgtaacagttgaggatgctggaaaatacaaagtgaatgcaaaaaacgaattgggcgaaagcaacgctacaataagcctaaacttcgacaaccttgttattggagcatacagtcattttcaaattgcgctatatggatatttcaactctataggcgacgaagcccccgtgccggaaagcgcagaaggcattaagccaacttttaccgaacgcccggtaattcgtcaaagcgaagatggtggaaatgtaacgttcgagtgtagatgcgttggagatcccacgccaacagtcacatggtcccatggcgagactgaactaaacgaatcaaatcgctacaaaatgtctttgacaatggatcaaaaactatatcacattgcgtgtcttgagattagcagtgtggtatcatctgaccagggtgaatatcgcgcgcaagcgaaaaacaagcacggttctggcgtcgcaactattaatcttaatttcgaaagcggctcgaaaaaaattccggatggaaagtcgccgcgctttccgaaaaaaccaacgatccgccaagaagaagacttactcatcatggaatgcgttttggaagcgcatccggttccggatatagtctggtattgctcagaaaaggaaatctgtaacaatcaaagaacgaaaatgactcgcaaggcaataactaaagacagctacattctaactctggaaatccaaaatcccaccaaagaagatggcggaaactatcgttgtaacgcaataaatatgtatggcgaaagtaatgcaaacattgcgcttaactttcaaggtgcgagcgatgctaacgggtttgcgccgtcttttatcgaaaagccgagaatcatcccaaatgaatcaggcacattgatcaccatgaagtgcaagtgcaaggccaagcccgaacccacagtaacttggtacaggggtcaagacttggtggagaagagtaagaagataaaaattaacacaacagttattgcagaagacacgtatgagctgacacttgaaattaaggatccgggagcaaccgatggtgggacctacagatgcaatgtcaaaaacgaatacggtgaatcaaacgcaaatctaaaccttaacattgaagcggaaccggagcccgaaggagaggggccaacattcatagaaaagccacgcattgtttctgagaacaacggcaaattggttataatggagtgcaaggtcaaggcagatccgaaaccagatgtcatttggtttcgcaacggagaagtcatcaaggaaagtaacaaaattaagacgtttattgaacagcgtggcgaccaatactacatcaagctggagctattagatccgcaactagaggactccggcctttacaagtgtaacattaagaacacgctgggcgaacttaatgccaaccttaccctgaatatagagatcgttcctgttataaaggataagccaaaaattataaagattataaaaaaacgtactgtagtcatagagtgcacagtagcatcaaaattcgaacccaagtgtacctggtacaaggaaaccagcactgtaaaagagagcaagagacacgtttaccaggtagagcaaacaaaggaaggagagttcgccgtcaagctggaaatcaacgatgtcgaagagagtgacaagggcgcctacaagctggtggccagtaacgaaaaaggagaggcagtatcccaaattgtcaacctcgttgacattccagaggaagagcgaaagccgtgcaaaccggaaatctcgagaaagctagcagatcagaaggtcgcggagtcgaagacctttgagctcttagtcagcctgtcccaaacagaccgcaagtgtaaggttgagtggtataagggaagcaccgttatacgtgaaaccaaggacataaccaccacgtttgatggaacaacagcaagattaacttttagctcagcaaggacagaacacacatcgaactataaggttattgtgaccaatgaagtcggcaaggacgaatcatcttgcaaaataacggtggaaaaggttgccaaaaagaaggaagaaaagccgaaagaaaaggagaagaccaagaatgaaaaagaagtggagcaaaaggtaaataaaaaatcgaagataagtaaaatcagaaatggtagaaaacccgcattagaaattagagcctgcatcagcaaaagaagaacagattaa

SEQ ID NO: 4134 - protein, 913 aa, DROSOPHILA
MGVAEDFAPSFVKKPQLHQEDDGNRLIFECQLLSSPKPDIEWFRSDNKVVEDVRTKFKIQPVGENKYTVVLELDDVVETDAGLYKVKAKNKSGEVSASINLNFTPADEPKEKQIDGFAPTFAKKPAIRQEEDGKRLLFECRVNADPIPAIIWFHNGAAVKESERHKITVDKDVHSYFATLEILNVTVEDAGKYKVNAKNELGESNATISLNFDNLVIGAYSHFQIALYGYFNSIGDEAPVPESAEGIKPTFTERPVIRQSEDGGNVTFECRCVGDPTPTVTWSHGETELNESNRYKMSLTMDQKLYHIACLEISSVVSSDQGEYRAQAKNKHGSGVATINLNFESGSKKIPDGKSPRFPKKPTIRQEEDLLIMECVLEAHPVPDIVWYCSEKEICNNQRTKMTRKAITKDSYILTLEIQNPTKEDGGNYRCNAINMYGESNANIALNFQGASDANGFAPSFIEKPRIIPNESGTLITMKCKCKAKPEPTVTWYRGQDLVEKSKKIKINTTVIAEDTYELTLEIKDPGATDGGTYRCNVKNEYGESNANLNLNIEAEPEPEGEGPTFIEKPRIVSENNGKLVIMECKVKADPKPDVIWFRNGEVIKESNKIKTFIEQRGDQYYIKLELLDPQLEDSGLYKCNIKNTLGELNANLTLNIEIVPVIKDKPKIIKIIKKRTVVIECTVASKFEPKCTWYKETSTVKESKRHVYQVEQTKEGEFAVKLEINDVEESDKGAYKLVASNEKGEAVSQIVNLVDIPEEERKPCKPEISRKLADQKVAESKTFELLVSLSQTDRKCKVEWYKGSTVIRETKDITTTFDGTTARLTFSSARTEHTSNYKVIVTNEVGKDESSCKITVEKVAKKKEEKPKEKEKTKNEKEVEQKVNKKSKISKIRNGRKPALEIRACISKRRTD

SEQ ID NO: 4135 - DNA, 5497 bp, DROSOPHILA
gaaatgagttttgttttgttttgtttcttccgagtgtttgtgtgtttatgtgtgtggggagggggtgtattctgtgtgcggcgtgttttgagtgagagagatagagagagagcgcgagttgctgcgggtcgacggtcgaagggggtggtggtggagttggtggtggggggcttggtttatacgacaagttttgatttattattaaatttaaatacctatgtatataaattacgtttctgtttattataattattgttgtttccatcttaatcattttgttttctttcgctttttatttttcatattttttttttgttttttgtatgtagtgggcaactgcggcatttgtaaatttctttatatttaaatgttccttttgactgtgtaaaaatatcgatttccatctgatcttgttttgtagttactattcatgtatgcatttgcttttcgttttagttaaattacgttaacgctgcattctgaactctctgttgctgctgattctgctgcttgttcttcggattcttgatcggattcttctgattcttcatcttggcgcgctttctatgctattgaaatgttgtttgtggtgctgcttactgccttctggatcgggatcctatattccgctctgatctgatcggttatgttcatgttatgtcgggttgtgtgtgtctgtgttgtgtgtatgagagtggagtgtgttgggtgttcgcatctcgttatatgttgtatatatatatatatatatgtgtatatatatatatatataatatattatatgtatgtatagttagttgcttaatagtagaatttcttgaatgttgttgtggtaaagtgtaggtaatgttgctctatgtctctatgtcgactcaactgcactacatacatatgtctttccaccggatacgcggcgaaccgaaacgtgccgagccgaaccgatccccgtttctgacccgcatccgcatccgtatccgtatttcgtttcctcacctccgcctcattcgctgcgcagtttctttagatccggtgacttctcccccacgcccacacccactccgccggcgttcttcagctccatatcgcagtgcagggcagtacgcttctgtccaatggctggtgccgagtctgcacccgctgctaccggtgaaaccgcatccaccgccttgttcgccgccagctgctgcagtttactgtccctcacaatgccgttgctgctattgctctcgtcagcctctagctccgcctcattatcctcctcctcgtccagctcatcttcctcctcgtcctccgcctcatcctcatcctcgtcgcccaggacgccgttcccgttaccatttccattggctggtgctgcagtcgctttgctggctggctgtggtgctgctgtaaccgcttcctcttctgccaaaggagcaggctgaccgttgttggtgatcgaattgttagttttgtggggctggctcggcgactgcttttgattctgattctggctcgagtgctgtgtgggagtcaggatgggcaggctgttggtcttgggcggcgcctcctgattgctttcagagtccgaggcgagcggtgttccactcgaaccgatgccaatgccaatgtctagggcgatgggctcaccgtcctctgtggaagtggtggccgttgtctgtgtggtgccatcgttgtcatcgatgatcggctcctgggaggtggaatcgttcgaaacaaagttggagtcaccgtcctgcagggcggcgccaacggcagctgcgttgttcttggcctcgcccgactgtagaggcgtcagagcagccgggttggtgttctcattctctgtctccgattctgtagcagtgttgcgaccgcctgggggatagaaagcattggattagccatcaatggtcaatttgttaactcggcgaactgcggtcagagtaatcaaacaaagaaactctgtgtttgaaattattagacatcctaacacttttgaaaagctgccaacaagtataagctactgataatatgttaaaagttaactattttacagtagtaactttacaattcctcctttttatttaacatgacgccacgagtaacgaataaattgtaaattgtaaattgaccactaggctactacaaacataatgtttaatggaaaattccggataggaaaaatacttggtttctggaaaagaccactcggtttgagtgttttgttgcaagggtgtatactcaagccgcagttatcggatcatcttagctgcttacctgctccttggctttcgtcgtccaaatcaacacccacaccatcgttggtatcgtcgccatcgagcaccttgctgctgttgccgtttgtgctgagtgaaccggtgccagtggaggcgccggatccaggcggcggcatatcgtcgagcatctcgggactgagatcattggccacatagtgtgaccagagggccagctccacgcgatgaggcgaccagtgcggcgtatccccgcccacctccgcattgaggcgctccacggtggcctgaatgtgattgacgaagttgaggtactccttggtggtgtaatcgatgccctcgatctctggtatggccatcaggcactcgtcggccatgaatggtgccgaatcgggagctgcggctgccagcagtgcactggccattgtggtgccaacgcccttgaggttcgataaagctgtgatcgcctgctccagattgggcagcttgcggaaggccttctttgtctcctggatgacggcgcgcggtgtgttgaccttgaccaggtaggatagctgcggatagaatttgccgcgcgactgcttccacttcatcgactggacgagctcatcgtataccatatgcgcgtccttgccgcgtgccttaatcaatttgggcagttcattctgataccactgatccaggcggatcagctcttgcggcttcttgcagcgcttctcggcctttagcttaagaacctggggatagagctggtagcagtactcgaactgtttggtgctcccggtctcgaagaacgagaccgtcgccttgccgttggacatcttctgcggatgcggatgtgtcgttgtcgcctgctaatgattggtggtatcgctgtatctccttatcgtggtatctatcgccttggggcccaggacgttggctgatccgcaagtgaccggctggctatatatgcggcaatatatgtactttggtgtaagctactatacgccaaatcaatttattgcttactgtttagtctcctgcttttcctgtccgttccgagctgctcctgtcaacgtactgctattcgtgcgttgagagttcccggcgagaaagaagcgagtacgtgagagacagagagaatgcgagtgcgagagagggagcacgaagaagcagcaacgcaaaggagagtggatgaaaagagaagaaaagaggcacacaattaggtttacagttacgattacatatgcaagggggatcggtgcggtggcatagggaggtagttcgattgattactgttaatgctgctgctgctgcggccgtgtctctgttgtttgttgtatttactcaatccgataatcgctcactatttgccaaaaatctgctcgcttccgccgccgtttgcacagcacacaaatcgaatttttacagtgctgtcgtcgggttctttttagtccgccatgcactcacacagtcaaactgacaggcacacggatggacacacacacacttactcagcacactcgctctcgcacacccaaagagagccaggcgctcatacacaggcaaaaacacgcacacaacacacacactgacttaaacacgcacacacttatatactgaggcaacaacagcagcagcagaaaatttctttttcatctaggttttcaaaaaaaatacgaacgcgagcattaaataaacgaatgctactatttttcgctgttgttgttgtttgtgcttttttcgtacctcttgtctttttggcaaacggtgagaacagcttttcactagcgcactgcacgcacacagatgagtgggtgaacaacaaataccttttagttagtcgccgccagtcttcctttccgtccacatccaaacaactactccaatgctttgctgtttttctgtgttgcctctgctttgctttgcttcgcttcgcctctgtgcttgtgctgtgctgcgtgcttcgtgctgtgcccgtgctgtgctgcttcttcttcttcctctgctgtttcagtttctgctttctgcctgcaggggcgccgttgacaactgacaaataaaaaggggttactctgttctcgaaatgagcacgccaccgaaggcacaacaaaaaattaaaaaggatcggagcggagcgatgcagctgtgcgatgtgctgctaactcgtgtgacgggaattgggaattgggattgcgaatgggaatgggagggaatacgagaagcgaatatgggaatgacgaacgacgacgaaccgggaacaggagttgtcgttctatctcgcccgcactcggtgcccgaatgtatctgtatctctctggcaccctcggcgttccatttcattttgccggcgacgtccgtgctctctgccgccgctctgccatcgcctctgccgctgcgtttatgcgcagtgcgtcattacacgaatacctgtttaaagcggaggcataaacgcggctttgtcgatcaacatccatgttaccgaaacccatgttcgagttatagaaacttcgagtaacaaatatctatattctagcaatgtttacccttattagcttagttagtgcaattatgtttcatgtttttacaaacagcagaatgtttttaacaatagttatctctatattcaggtccttcaattaaatcaaaaaggaatgggttttgtgagtgggttgggctccagtgagacttgttaataatttaagaattcgcgatattctagtgtaaacagcgcgtcactgcatgttcgctgcttttgttgtgccagttgccagcgacagcggcgtcgtgtcattattcatattcatgagggggtgcgtcaggtttgctgaattttactgacttgtttgcgcgaaccgaaattatttatggttcagcacgaagagcgatagaaattcatgcatatgttgttggttggttaaaaagttgcccttacatgcagttaagtgcatataatttgtctacttgcgcatttattaaaaatgcatacatattaaataatgtacttaattactcagcggtttgagggttggagcatttacagatgacactgtagtgatcaaatggtagctatacatgtataaatatctaaaatattacaaaactattccagcgttcaagcattaactaattcgagaacagctgctggttccataatcgagtacacacgtgtgctactcaaagtctaagctgagagagcggtcgagcggcaacttgatatttaaaaaacagaaccctacttaacagtcgactcaagttcgatccccccgcaggtacgcccc

SEQ ID NO: 4136 - DNA, 2280 bp, DROSOPHILA
agatagaacgacaactcctgttcccggttcgtcgtcgttcgtcattcccatattcgcttctcgtattccctcccattcccattcgcaatcccaattcccaattcccgtcacacgagttagcagcacatcgcacagctgcatcgctccgctccgatcctttttaattttttgttgtgccttcggtggcgtgctcatttcgagaacagagtaacccctttttatttgtcagttgtcaacggcgcccctgcaggcagaaagcagaaactgaaacagcagaggaagaagaagaagcagcacagcacgggcacagcacgaagcacgcagcacagcacaagcacagaggcgaagcgaagcaaagcaaagcagaggcaacacagaaaaacagcaaagcattggagtagttgtttggatgtggacggaaaggaagactggcggcgactaactaaaagcagtacgttgacaggagcagctcggaacggacaggaaaagcaggagactaaacaccagccggtcacttgcggatcagccaacgtcctgggccccaaggcgatagataccacgataaggagatacagcgataccaccaatcattagcaggcgacaacgacacatccgcatccgcagaagatgtccaacggcaaggcgacggtctcgttcttcgagaccgggagcaccaaacagttcgagtactgctaccagctctatccccaggttcttaagctaaaggccgagaagcgctgcaagaagccgcaagagctgatccgcctggatcagtggtatcagaatgaactgcccaaattgattaaggcacgcggcaaggacgcgcatatggtatacgatgagctcgtccagtcgatgaagtggaagcagtcgcgcggcaaattctatccgcagctatcctacctggtcaaggtcaacacaccgcgcgccgtcatccaggagacaaagaaggccttccgcaagctgcccaatctggagcaggcgatcacagctttatcgaacctcaagggcgttggcaccacaatggccagtgcactgctggcagccgcagctcccgattcggcaccattcatggccgacgagtgcctgatggccataccagagatcgagggcatcgattacaccaccaaggagtacctcaacttcgtcaatcacattcaggccaccgtggagcgcctcaatgcggaggtgggcggggatacgccgcactggtcgcctcatcgcgtggagctggccctctggtcacactatgtggccaatgatctcagtcccgagatgctcgacgatatgccgccgcctggatccggcgcctccactggcaccggttcactcagcacaaacggcaacagcagcaaggtgctcgatggcgacgataccaacgatggtgtgggtgttgatttggacgacgaaagccaaggagcaggcggtcgcaacactgctacagaatcggagacagagaatgagaacaccaacccggctgctctgacgcctctacagtcgggcgaggccaagaacaacgcagctgccgttggcgccgccctgcaggacggtgactccaactttgtttcgaacgattccacctcccaggagccgatcatcgatgacaacgatggcaccacacagacaacggccaccacttccacagaggacggtgagcccatcgccctagacattggcattggcatcggttcgagtggaacaccgctcgcctcggactctgaaagcaatcaggaggcgccgcccaagaccaacagcctgcccatcctgactcccacacagcactcgagccagaatcagaatcaaaagcagtcgccgagccagccccacaaaactaacaattcgatcaccaacaacggtcagcctgctcctttggcagaagaggaagcggttacagcagcaccacagccagccagcaaagcgactgcagcaccagccaatggaaatggtaacgggaacggcgtcctgggcgacgaggatgaggatgaggcggaggacgaggaggaagatgagctggacgaggaggaggataatgaggcggagctagaggctgacgagagcaatagcagcaacggcattgtgagggacagtaaactgcagcagctggcggcgaacaaggcggtggatgcggtttcaccggtagcagcgggtgcagactcggcaccagccattggacagaagcgtactgccctgcactgcgatatggagctgaagaacgccggcggagtgggtgtgggcgtgggggagaagtcaccggatctaaagaaactgcgcagcgaatga

SEQ ID NO: 4137 - protein, 550 aa, DROSOPHILA
MSNGKATVSFFETGSTKQFEYCYQLYPQVLKLKAEKRCKKPQELIRLDQWYQNELPKLIKARGKDAHMVYDELVQSMKWKQSRGKFYPQLSYLVKVNTPRAVIQETKKAFRKLPNLEQAITALSNLKGVGTTMASALLAAAAPDSAPFMADECLMAIPEIEGIDYTTKEYLNFVNHIQATVERLNAEVGGDTPHWSPHRVELALWSHYVANDLSPEMLDDMPPPGSGASTGTGSLSTNGNSSKVLDGDDTNDGVGVDLDDESQGAGGRNTATESETENENTNPAALTPLQSGEAKNNAAAVGAALQDGDSNFVSNDSTSQEPIIDDNDGTTQTTATTSTEDGEPIALDIGIGIGSSGTPLASDSESNQEAPPKTNSLPILTPTQHSSQNQNQKQSPSQPHKTNNSITNNGQPAPLAEEEAVTAAPQPASKATAAPANGNGNGNGVLGDEDEDEAEDEEEDELDEEEDNEAELEADESNSSNGIVRDSKLQQLAANKAVDAVSPVAAGADSAPAIGQKRTALHCDMELKNAGGVGVGVGEKSPDLKKLRSE

SEQ ID NO: 4138 - DNA, 3017 bp, DROSOPHILA
cgattgggattcaaaacacaaactcaacgaggtatgacattccatatttggattattattttcaatgttttgattaaaaaaccgattattttttttacaaaaaatcagggaaaccatttttccgaaaattgaaatatttaagatcggttttttgggtataacttgactaaaaatggcctcacagcaaaaagaattaccattttatactccctattaccaatactaacctccctatcacttttgaacggattttgttaaataattttttggccaaattttcgcattttttgtaaggggtaacatcatcaaaatttgcgaaaaattgaaaagtcctagaatacccaaacttaaatgcaattcgattgggatttaaaaaacaaacgcaacgaggtatgccattccatatttggattattattttcaatgttttgattaaaataccgattatttttttagcaattgcgaaaaattgaaaagtcctagaatacccaaacttaaatgcaattcgattgggatttaaaaaacaaactcaacgaggtatgccattccatatttggattattattttcaatgttttgattaaaataccgattatttttttacaaaaaatcagggaaaccatttttccaaaaattgaaatatttaagatcggttttttgggtataacttggctaaaaatggtcacagagcaaaaagaattgccattttatactccctattaccaatactagccatccctatcacttttgaacggattttgtaaaatgttttttggccaaattttcgtattttcgcatcatcaaaatttgcgaaaaaatttaaaaaacctagaaaacccaagtgtttgaacttggcgccagcttagaaatagtaatcgagagcgcactaatatatcgaagctgtactaaaaatcgtttaaaataccatatctaaccggctgtttcgtgtttttgttatttcataataaattcttgacggaaagcacctaagaatcaacaaaatgcaaactacgaggagcacccggctgctgtccttggccaggagattcgtccacacccgaacggcatctcaatcggcccagaactccaaaggaatggcaagtggcgcggaatccatctccggaaaggagaaaaccacacatttcggcttccaaacagttcgggaaagtgaaaaggaacaaaagggtgagtggttgtaactagcccataaacggagcaccgaaaatatcccttcttcctccagttcacgaggtcttcgaacaggtggccaactcctatgacgtgatgaacgatgccatgtccctgggcatccatcgcgtgtggaaggatgtgttcgtcgaacgactgggtcccacgcacggtatgcgcttgctggacatggctggcggcaccggggacatcaccttccgctacctgcgttatctgaacaaccagccgaatccccaacagcgtcccagccacgtcactgtgtcggacatcaaccagcacatgctaaacgtgggcgaggagcgggccaagaggctgggacttaccaccgaccagctgtccaactgcaccgtcgcatggcagtgcgccgatgccgagaagttgcccttcccggacgctagctttacggcctacactattgcctttggcatcaggaactgcacacatgtggataaggtaggcggatcatgaaatgtactctttgtacttatttctcccttccatctaaggttctttctgaagcgtatcgagtgctgcagccgggcggacgattcatgtgcctggagttcagtcatctgacgaacgaaacgatgcaatggctatatgaccagtactccttccaggtgattccgcccatgggccaattgctggctggtcagtggcaggcgtaccagtatctcgttgagagcatccgacggtttcccaagcaggagcaattcaagcaaatgatcgagcaggccggattcgatcaggtgtcctacgagaacctaaccttcggcgtggtcagcattcactccggcttcaaactgtgacagccgaggatgatatttgttgtaagcgattaggaaatcctaagaccatttgatggggcttaactataatctatattgttggttttttgcgttttttcatgctgctcacgtcgggcaggtcataaagcatcgaattaaacaagctcctctggcggcttttatttctgtatgtttacattttgaggtttatgtagctctttgtcaaatatatgtacttcatgtgccaaaaggcaaacccaaacggcaaactgatgacatctccggcggcaaggcctgggaaagaccttgaggattgtgtgccagacccacttagatgcaaagggcgatatggtggtagcccaataaccgaactgtaccagatgccaggtgtaaggcactgtaatcgatttaaattccacacacccaacgggtcgtttccaaaaaaaagtgaaaatctccatgtaggctaatcgaaagtccatttacggcgatgggatgtgatataatgcagaaactatccacttatctattgacttcagttcgccatcagatgtagtgcaggtgaaatttatgcgtgtgaatgttgaattttaacgaaattcaaataatagcattgaaatgccatcaaaataattgaccgtgccatgcttaataggtaattgctaattggtgctttgcaattgtgcgcttttgcttttattacaatggctttattatgctttcacccggcgactgattaacacggattggacacccgaatagccgcccatattattggccggattatgtaagcggagacacatttgatttgtatctaaattgcagccaaatcataaaccttcggaccttccatctccggcaatcgaaagtgaaaagagtccggcgataaaaaacaaaaaaaactgagcacaaaaagcatgcggaacatgcaggccattgaaagcaaaagtttggtgcgtgcggcaacgtgctgcgcatgcgtaggtggattccggccaatgggacagtggagcggggccag

SEQ ID NO: 4139 - DNA, 906 bp, DROSOPHILA
atgcaaactacgaggagcacccggctgctgtccttggccaggagattcgtccacacccgaacggcatctcaatcggcccagaactccaaaggaatggcaagtggcgcggaatccatctccggaaaggagaaaaccacacatttcggcttccaaacagttcgggaaagtgaaaaggaacaaaaggttcacgaggtcttcgaacaggtggccaactcctatgacgtgatgaacgatgccatgtccctgggcatccatcgcgtgtggaaggatgtgttcgtcgaacgactgggtcccacgcacggtatgcgcttgctggacatggctggcggcaccggggacatcaccttccgctacctgcgttatctgaacaaccagccgaatccccaacagcgtcccagccacgtcactgtgtcggacatcaaccagcacatgctaaacgtgggcgaggagcgggccaagaggctgggacttaccaccgaccagctgtccaactgcaccgtcgcatggcagtgcgccgatgccgagaagttgcccttcccggacgctagctttacggcctacactattgcctttggcatcaggaactgcacacatgtggataaggttctttctgaagcgtatcgagtgctgcagccgggcggacgattcatgtgcctggagttcagtcatctgacgaacgaaacgatgcaatggctatatgaccagtactccttccaggtgattccgcccatgggccaattgctggctggtcagtggcaggcgtaccagtatctcgttgagagcatccgacggtttcccaagcaggagcaattcaagcaaatgatcgagcaggccggattcgatcaggtgtcctacgagaacctaaccttcggcgtggtcagcattcactccggcttcaaactgtga

SEQ ID NO: 4140 - protein, 301 aa, DROSOPHILA
MQTTRSTRLLSLARRFVHTRTASQSAQNSKGMASGAESISGKEKTTHFGFQTVRESEKEQKVHEVFEQVANSYDVMNDAMSLGIHRVWKDVFVERLGPTHGMRLLDMAGGTGDITFRYLRYLNNQPNPQQRPSHVTVSDINQHMLNVGEERAKRLGLTTDQLSNCTVAWQCADAEKLPFPDASFTAYTIAFGIRNCTHVDKVLSEAYRVLQPGGRFMCLEFSHLTNETMQWLYDQYSFQVIPPMGQLLAGQWQAYQYLVESIRRFPKQEQFKQMIEQAGFDQVSYENLTFGVVSIHSGFKL

SEQ ID NO: 4141 - DNA, 4682 bp, DROSOPHILA
gaggaaaatttttagatttttcgtaccaggcgatcataaccagtagcagaaaacaaactgccagtctgtacaaaatgcacatttttatggtaaatatattgattttttgcatcaggcgattacaataaatagcaggtgtatactgaaaacgaaattccaaaagatcgttggtctcattctgaaatttctgttcgcctggtagcgaagcccacagcccagagttgcagaaaaggtaaatcgctttcaatatttgctttttaaaacattactatttatttcttttactatgacgcttgaatttatcagttttagttttgttttgcgttcgttttttatctttgtttttgttttctttcaactattttacaggtgatagactatattgcgcttagtgaaactacatgcacttctatatataatttatttatatatataaatatctttatgtatattcttgtcaacataatttcttcggctttcgacttacatcttattaaaagacttgtacaaatgcagaataagaataagaataagattcggaatcgaaatcagagcgtaaaagtgcgcagacgagaacatgaagaaatagtcacatattgatggacaagtacagaaagagcgagatttcatttgagattctggacattcgatagattctggtgatgctgatccgagccgaatcgatatgcaccatggaaattccaggtggaatgcggcagataggatttacagatcgatcaacaacatggccgagaatgtagtgatgtgagcaactaactaaatgcccgcatagagaggcagcttggcggtgtccaccttctcctccaccttgaacgaggggaataggccgccctggttggtgcgggtattcttgcccttggaattgccatcccaatggttaccagccaccgagacgaggtcaccaacacgcagctgtagatcctcgtgcgtgcgcggcttgtgggcgataacgacgcggcgattgtgcgcattctggccaccgtagtagtatatgtcgtccagcgacttgaaccgatgcgctgcatccggatacatcgtctgcattatctcgtaggccacgcgacacacctgcgacgagaaggtgcacaccagatgatcggacatggaaagcaggtggatatccagaatgatcccgttcagggcggtgtccgtgtatcgtgtggatacggacgccatgcgcgccacctccggatcaccaatgatctggtactgcgggtactttcggcgcgcctcctcaataacctgggcatcatccgatgcgaggaaaatccggcgagccacagtgctgccgtttacctccagcgtgcggtagtagtcctcgacataggtcatatactcctccacactgtggcaggccgcttctgtgcccactttgtccgtgcgacggacatgaacgctgtaagaaaaaacccgaatatttaatttttttcaaaagaacaaatcgactcttggttcacttacccaacaatgggacgctcccaacccaaattgcgcatgccagaggtaagaaaatcccgcgtcgttggttgcggtcggagcaaatacttaaggaactgacccacccaccaaacgatggggtctccatgcagacgcttaagtctcggcgccagatcctcgggaacggcgagcggcaggtacggcggtctcggcatcagcgagtcaatgatgggcaacaccagcacctgggtgttcggcttgcccggccaattgtatgtgttggcggtgcccgcatcatggcagctgttggacaccggttggaacacctcctcccagccgcccttgtgataccgccatccgcgggattttaagatgagcgtccgctcggtggcgtaggccactataaagcaatacaccacatggtgcagttggcagccgtagccacagccctggggatttaggaataacgaattagattaatggctgacaagtaaggtggcattatagtaaccgaaagattagctcaagaaataggaataataagaatatataacgcaccttgttgagcttacagaccagcttgcgagcattctggcaatcactgggattctgtagatggtgcaggcgccgctgtaccaaatcgctcaaatcccgtgcctccttgtgtcgccaggcctcgtagccatcggactgacgcatccgctccatatcgctcagcagggagcgcttgtgctcggcgccttggagcagcacctggttaatggactcctccaaatcggcactcgcatggccggcggccactgccttacgcactttgcccagttcactgctgaagaaattccagatctcaccgatgttcgtctggatgcgtctgcgcgtgaactcgtactctaggctgggctcgaattcgccatgatccggaacaccggcctccagatcattgggcgctccctcggccacattattccaaccgcgcagatcagcgggggcggactcgaacatggattctggttccgggccggcgacctcgggcgccagctttggatttagcgcatcgttctccagcctttgcaccagtttcattgcgctctgcttgtccagttggtcactggaaaataaaaaaaaaaaagagggagatgggggttcaggttagcaaagcagcttatcgcatgtaattccgcctacgtgccatgaataattagcctggctgctgacaaaacatcattatggtgatcgcaaaagtgtaactgctatggtacaatgtttcaggaagctatatttaatacaaatactattgaagcttctttatttctacataaaccgagaactggttattgattgatgctaatctctttgatatcacagctatggcggtatttaaaatcgcaattaacgtgtataatcatttgtttactttatagcaagaccaaaaggggttccaggcgagtgctaacaatgatatattttgtgctattgtgctgcccccggctgtatccccacagctccagccacctacctcatcaactcgtcgatgagctgtttaagctcctcattgcgctgtctcgtgtgctccagcatctggagcgcctgtgatatgcgacgggcgttcagctcactctccccggccgcctgctggccctgagtattggtcagcttgaccacgaacacgtagaccaacccgatccaggccagtacgaatatgatgagggcgcgtgcccaggagttggccgaagccccgaatagctgacgcaccagcagcatgccggcgtttccactgctgctcctgctcctcctcctcctctggattctgccctccgctcgccgggaccacaatcgatcttccaggggatcaaggaacggggctccgaacgggggcggactcggaaatgctctctacgtgtacttcaatgcggagctgtttcgattccggtgcatagtctcaattaactccgatccggccagcaaccaaggcgatccaatgacatggtcggcggggctaggattcctcttcgatttatagatattttataaaggatatatggacgtatgggatggtggccagctggaatgcaagtttcacggagctcgatcaatgccagaatgaaattgactgatgggccggtggtctatatcgccgatcgagttggccaggtagtcgtggcaagtcaaattaagtgcaaaagtattctatatatttccgtcctgttctgtgttttcttttgattagcactagagctgtgttgttagcacaccatgctatcgatgcatagacatcgatacatctgcccacttgaagagcgttgccatattcggacgagccattacattattttcgataagtcgatgactagttccaacggctctcgatgtaacgcctattcaaacaccaaatgcaaaaaccccattgaagtgataaaacaattgaagatgattgtgggatgttttcagttttatgccgtgttttcttaatatttcacattttattcgcacttatgctactaataataaaaatgattataattttcagatgtgttgttactttcaaagttccgaccgatctgcgagtggtatgggtcgtggatatcggggaaaccacccggtaccggcaacccaaaccacgcggagatcggacgacctgcgtcgggtgcaattaagatgcgggccgtatgcttccgtatcttcttttttctcttttggaaatcaaatgaaacgtgattatcgtataaattataaaaaattcagtatatgtaaagttaaaaaaaagttttacacataatataaattatattattataattacgaccacaaaaatttcttagtgttgaaatgagttttgttttgttttgtttcttccgagtgtttgtgtgtttatgtgtgtggggagggggtgtattctgtgtgcggcgtgttttgagtgagagagatagagagagagcgcgagttgctgcgggtcgacggtcgaagggggtggtggtggagttggtggtggggggcttggtttatacgacaagttttgatttattattaaatttaaatacctatgtatataaattacgtttctgtttattataattattgttgtttccatcttaatcattttgttttctttcgctttttatttttcatattttttttttgttttttgtatgtagtgggcaactgcggcatttgtaaatttctttatatttaaatgttccttttgactgtgtaaaaatatcgatttc

SEQ ID NO: 4142 - DNA, 2761 bp, DROSOPHILA
atcaaaagaaaacacagaacaggacggaaatatatagaatacttttgcacttaatttgacttgccacgactacctggccaactcgatcggcgatatagaccaccggcccatcagtcaatttcattctggcattgatcgagctccgtgaaacttgcattccagctggccaccatcccatacgtccatatatcctttataaaatatctataaatcgaagaggaatcctagccccgccgaccatgtcattggatcgccttggttgctggccggatcggagttaattgagactatgcaccggaatcgaaacagctccgcattgaagtacacgtagagagcatttccgagtccgcccccgttcggagccccgttccttgatcccctggaagatcgattgtggtcccggcgagcggagggcagaatccagaggaggaggaggagcaggagcagcagtggaaacgccggcatgctgctggtgcgtcagctattcggggcttcggccaactcctgggcacgcgccctcatcatattcgtactggcctggatcgggttggtctacgtgttcgtggtcaagctgaccaatactcagggccagcaggcggccggggagagtgagctgaacgcccgtcgcatatcacaggcgctccagatgctggagcacacgagacagcgcaatgaggagcttaaacagctcatcgacgagttgatgagtgaccaactggacaagcagagcgcaatgaaactggtgcaaaggctggagaacgatgcgctaaatccaaagctggcgcccgaggtcgccggcccggaaccagaatccatgttcgagtccgcccccgctgatctgcgcggttggaataatgtggccgagggagcgcccaatgatctggaggccggtgttccggatcatggcgaattcgagcccagcctagagtacgagttcacgcgcagacgcatccagacgaacatcggtgagatctggaatttcttcagcagtgaactgggcaaagtgcgtaaggcagtggccgccggccatgcgagtgccgatttggaggagtccattaaccaggtgctgctccaaggcgccgagcacaagcgctccctgctgagcgatatggagcggatgcgtcagtccgatggctacgaggcctggcgacacaaggaggcacgggatttgagcgatttggtacagcggcgcctgcaccatctacagaatcccagtgattgccagaatgctcgcaagctggtctgtaagctcaacaagggctgtggctacggctgccaactgcaccatgtggtgtattgctttatagtggcctacgccaccgagcggacgctcatcttaaaatcccgcggatggcggtatcacaagggcggctgggaggaggtgttccaaccggtgtccaacagctgccatgatgcgggcaccgccaacacatacaattggccgggcaagccgaacacccaggtgctggtgttgcccatcattgactcgctgatgccgagaccgccgtacctgccgctcgccgttcccgaggatctggcgccgagacttaagcgtctgcatggagaccccatcgtttggtgggtgggtcagttccttaagtatttgctccgaccgcaaccaacgacgcgggattttcttacctctggcatgcgcaatttgggttgggagcgtcccattgttggcgttcatgtccgtcgcacggacaaagtgggcacagaagcggcctgccacagtgtggaggagtatatgacctatgtcgaggactactaccgcacgctggaggtaaacggcagcactgtggctcgccggattttcctcgcatcggatgatgcccaggttattgaggaggcgcgccgaaagtacccgcagtaccagatcattggtgatccggaggtggcgcgcatggcgtccgtatccacacgatacacggacaccgccctgaacgggatcattctggatatccacctgctttccatgtccgatcatctggtgtgcaccttctcgtcgcaggtgtgtcgcgtggcctacgagataatgcagacgatgtatccggatgcagcgcatcggttcaagtcgctggacgacatatactactacggtggccagaatgcgcacaatcgccgcgtcgttatcgcccacaagccgcgcacgcacgaggatctacagctgcgtgttggtgacctcgtctcggtggctggtaaccattgggatggcaattccaagggcaagaatacccgcaccaaccagggcggcctattcccctcgttcaaggtggaggagaaggtggacaccgccaagctgcctctctatgcgggcatttagttagttgctcacatcactacattctcggccatgttgttgatcgatctgtaaatcctatctgccgcattccacctggaatttccatggtgcatatcgattcggctcggatcagcatcaccagaatctatcgaatgtccagaatctcaaatgaaatctcgctctttctgtacttgtccatcaatatgtgactatttcttcatgttctcgtctgcgcacttttacgctctgatttcgattccgaatcttattcttattcttattctgcatttgtacaagtcttttaataagatgtaagtcgaaagccgaagaaattatgttgacaagaaaagtgcatgtagtttcactaagcgcaatatagtctatcacctgtaaaatagttgaaagatgataaattcaagcgtcatagtaaaagaaataaatagtaatgttttaaaaagc

SEQ ID NO: 4143 - protein, 619 aa, DROSOPHILA
MLLVRQLFGASANSWARALIIFVLAWIGLVYVFVVKLTNTQGQQAAGESELNARRISQALQMLEHTRQRNEELKQLIDELMSDQLDKQSAMKLVQRLENDALNPKLAPEVAGPEPESMFESAPADLRGWNNVAEGAPNDLEAGVPDHGEFEPSLEYEFTRRRIQTNIGEIWNFFSSELGKVRKAVAAGHASADLEESINQVLLQGAEHKRSLLSDMERMRQSDGYEAWRHKEARDLSDLVQRRLHHLQNPSDCQNARKLVCKLNKGCGYGCQLHHVVYCFIVAYATERTLILKSRGWRYHKGGWEEVFQPVSNSCHDAGTANTYNWPGKPNTQVLVLPIIDSLMPRPPYLPLAVPEDLAPRLKRLHGDPIVWWVGQFLKYLLRPQPTTRDFLTSGMRNLGWERPIVGVHVRRTDKVGTEAACHSVEEYMTYVEDYYRTLEVNGSTVARRIFLASDDAQVIEEARRKYPQYQIIGDPEVARMASVSTRYTDTALNGIILDIHLLSMSDHLVCTFSSQVCRVAYEIMQTMYPDAAHRFKSLDDIYYYGGQNAHNRRVVIAHKPRTHEDLQLRVGDLVSVAGNHWDGNSKGKNTRTNQGGLFPSFKVEEKVDTAKLPLYAGI

SEQ ID NO: 4144 - DNA, 6274 bp, DROSOPHILA
tctaattgaaatgcaattatagaatcactgaaatcgcattcattaaagtttatgcataaaaatacatatacgcctattgcttttcaacttgccttaacctcatcggaggcacgatccgtaccgagaaatggctcgcattcggtagcattgtatttcatgaccgtgacacaggtctggtagagtatctggttctggtaaacggcatctgatgtaaacaatctgatttataaacgcccccacaacacagtaaacacatacatgtatgtacacacctgttaggaatctgccaaagaaaaccagaaacacggcgggctctaaaataagcgagcggggtcgttttagccagctagagaatgtcctattgctgggtggcggcgaccgcacttcgatgtccagcggttcatcatcagcgccaataattggctcctcatcatctctcggcattttgtggttcagtaaaggtcgcggtgatcgcagcaattatcgtgtagacaaaggaattaacgattcattcagccaagcaatatatcgtagcgggaactgagttaaacatctgtgcgcgccgaactcgagtgatagactaactggagggagcagctgaaatagacgacgtaaacaaacaaagcaagcgattgccaatttgagcaaaccaaagcgtttgctgcgccctatctgcgcacgaacgctcgagcggctccctctcgagaaacctcacatcgcgacacacaattcccattcgatttatgctcaaagatattgaatgctcgatgtattcacactttattgtcacactgcaaacagttaaatcttttgttcttaactttacaatgcttgcacatgcaaaacacagtccaaatagcagatatagtatatatatacatatacactgatcaaaatcataataatacttgcaaaaatatacaaggagtacaaacactagattaatttacacaaatagtttctaatcttttaaaacgagagctcttcgcagcgcctgcagaaggaatttaacttatgagatacattcagctaaatcggtgctctggagagtttgttagctgccaatggcctggtagacactgctactacccatcgacttctggatgccgaagatcacgctgtattgaaaagtattcgctttaaactggacttgaactgtgcttggtaggacttacgctatcagaatgtaacacacaaagtagagagcggcgctaataaagttgaaagctccgggataattttccaaagttgccttgtagacggttgtgtacagaggtgcagcgcccagtggcgaaaccgattccatggaggtggtcagagcaaagatcttgcctaaattatttcatatggttttagttaatggtatttgcaggctaaacactttgggtacgtaccaacttcagtcgcgggtgcaacgtgcgagagaatcgcgcggcacataggtcccatgacgccacgcatcatacccagcgtcatgcccagatacagctcttgccagtagactgctgtggctcgaaccgtgctctccagaacacagcaagccagggagagcattgccatggttacgatagacatctttagaacgcggcgcaataccaacatgccaacgatgctgcccacaatctggatcacgatgcgggatgcgttgaatagactgaagtccttaatggtccagttgaatttatcctgcacgaacatgtaatttacagtgctctctccctctgaaatcattataaattaactcatataatcttaagtttgaattatgttacccatgtcgaaaatggctatcgtaagggcaatcattgtaagccagatgattgtgcgatcaaagttggggcgcctcttaaagcaggtgcgaatcaggtccgtgaccaaatcgaaacggaagaactcacggactcgcgactaaaaatgagggaaggagtgttgagatattcgtttcttcttagctatagaaattacttactccggtgtgaatgtcacctggatttaggctttcaggtacaaacagaagcacgtacatcaaggcaaacatcatcaggctaccagcaatggaaaacaacaccagagcatttgtggcagcatagatataaccgctggccacattgcccaccattatgccagcacagagggaggcttcattgaggaccattctttcaaataatatatcaaaatgaaatggcattctttggattaataaatcaagactacccatactcacctcagagccttctttcgctccttggccacatcggatatgtagcaatagattccagtaatcaaggcgcaagttccgccgcttacgacggaaggaaccgaggaaaggaggaaccaccatggacttatattcgtggacctcgttatgtaagtgattactatcagtatgagtgcgccagtgaggtagcctttaaatacaataagagtcatttgtacaagatgcaattaagatgtcctgactgatgattatatacccgtaaaagttgtcagcaggattggccgccttccgaacttgtcggaccagggacccaggaacagactcgcgaaggcaggaataatgctctctagcagagaggttgtcatcataatatttgcagaatacgtctgtactatcacctcgacttcctgaaaaaacagaagttcactttagtaaactgcacaactgtacaactgtggatgagtcaatgtgccatatctcgtacgtataattataattttaacgctttcctagtaaatacttcgatactgcttcgaaatgcagtaacaaaggattttgcttacttctattccggccgttgataagcctcgactggcgttctaattaccttatctctagcctccaaacaatggcagttttgcattaggttgagacgatttgctaatttgattttactttgtcacgtcggatgctgatatagtaagatatactaagtaggtcacgtcttggaagaatatcggcgagccaaatgcgaaatacattgttctatacagcaaaggtcataatagtagcaattactcgtaaaacaagttaatattgtgatacattaattgtggttttaaaattgttcagcagtttttgtaacttaaacttcagtttttgtttacagttactggataaatttgtttaaaattgccattttcctcatcgccataaaatcacaacacgaaacgcccagcaaagcagcaaaaataatttgcacagagataaaaaccaggcaacgagaacagaaactacacaaagtacagatatcaaattgtacatgatgtgtatactataagggtcaaattaaatacttactttatccgcgtccgatccgcgatcaatgcccagcagcggttcacattgcgtggcattgaatttctcgatggtgatgcaggtttggtagagaatttggttctgataaaccgcccctaaaacgcacacaaagttaattcaatgatgcaatccaatcggttttactgccctatagccattataccaattaaatttctggcgaagaagattaaaaaaactgcgggctccaggatgaaccagcgatagctgctgtagtcatgaggcggcggtaccggaggcgggtccacctgctcactgctggccgcagatgatgcgtccagtatgcgtggtgccgaatcttcgccagtctccacatcggccaccaaagcctccgtatcagagcgaggcatactgccgttccgttccgttcctacttgctcgctatcgagaacggaactcgtggatgcgtctggcttacaccagtctaccggagataatggaatttacaattcattcaccagaacgctgcgcagttccctgaaagtcttccaaacgcgacggagagttttcagatactaaagcttcagctgctttactgctgattaacgtggatttattgttgcttaaatccctggtacgtgtattattttcacaagtacagctggctggattctcccgcagttaacgttactctattcgaaactttctaaatgcaagcagcaacagctgattgacttcttcttcttctgtgttattgttttgatttcgattttcgattcttagtgctagggatgccaacttgcgggcgaattgagagtttgtggtttaaattttctgacactttttactggttaattaattcaatttatttataattttagtagcgtcgtcggtcacgctctcctcgcgagtcccgttcccgctggtcgtgacggccacggtcacgttctcgctctcgttccctatcccggcgatctctgtcgccgtccctctcgcgctccctgatactgtcgcgatcttggcgctctcgttcgcgatcgtggcgtccattgttttgccgacggtcatagtcctcgttgtgggtgtcccgattgcgcaccctatttcgctggcggtcgtagtcttccagttcgtcgtagtaatcccgggaacgggcgctgttgccctgcccagatcttcgctcgcgctcccgactgcgggaccttgacttggagcgaactctccgtggtcgtctcactgctgtcgaattctccttaggccggttggtctcgtctgccttctcctcgtcgctgggcagttcgtcgtccaagtcctcatccagcactgacaccttgggctcgatttcgttgttttcctcgagaatggagcgcttctggatgcggggcagtataatgtcgcagacacggtcgttgcgcagcagttcgtcaatgtactcatccatgtagacaatctcgaactggccggcgcgattctggcggcgcagctttcgattgtctatgtacaacggctccaggtacttgtagcagtccagggcagctcctgtgagccgtagatagaaggctcccaatgctcgaacgtacttgaactcctcgttcttgataaactccactacgatgtccttttccggctgaatctgcagcatcttgagtgtgaggcagaggaactgggtgggcttgatgttgccgccgtagacgcctccgacgaatcgcagctccattgccttgtccaccagaagctccgcagtgagagcaaagcattgctccttccagtacttagagtcgtatatcctcgaacggatgatcttctcgatgaggtactgcggattggtgccgtgcacgtttttggcctccttcaccgtgcggttggccattttcagttgaacccttgttccttgtcaatcgtaactcaaataggacttttcaatccagaaattcgggtatctattggcagcagtgcaaaatgtgaaaatgcaccgaatatatttatttatttttcggcgtttgctaaccagagtggccagctgcgtaagggagaaatatgccactccgccaagcgcatacacaaaggcgataacgataggggacggcaatcggtatcgggtgacgcatacgaacaacagctcccagacaaccaagaaacgcaatagcagaaaaaaactcacttgttcgctaaattcgggtgaaaaaacagatcagccaggatgagtttcttcgggaagatgttcggcggcaagaaggaagtggcccccaccaccggcgaggcgatacagaagctgcgcgagacggagaacatgcttatcaaaaagcaggagttcctggaggccaagatcgaggacgaactgaatatagcccgcaagaatgcgtctaaaaacaaaagaggtatgagaggagtgcgccgaggtccttggcttcctagttggtcactcaaatgggccaaggggaaatgactcattgctttgtttttgttgcggccgcgaggcctgctcccagttaatcagtatcccatactgccagcaaatagaaaactcaataaacaatatgtatctctttgccttttcacccgcataccattcgatgcctggacgtgtccgcaaatcgctcagaacgtaatataaacattacttttaatacccaaaacaaactcaagccatgcagtagagtaatttcaaagcacgcattgcgaattggccaaatcatatttcggatatatacataagccagtcctcgaaaccttctaattcctccacttctcacattttcagtggccctgcaagcactcaagaaaaagaagcggctggagaagcaactccagcagatcgatggcaccctgtccacaatcgaaatgcagcgcgaggctctggagagcgccaacacaaacactgccgtcttgaccacgatgaagaatgccgcggatgccctcaagagagcccatcagaatatgtgagtcatggatttgtgccattgtatcaaccaggaactaactttcacttttatgcaggga

SEQ ID NO: 4145 - DNA, 2755 bp, DROSOPHILA
acgccgaaaaataaataaatatattcggtgcattttcacattttgcactgctgccaatagatacccgaatttctggattgaaaagtcctatttgagttacgattgacaaggaacaagggttcaactgaaaatggccaaccgcacggtgaaggaggccaaaaacgtgcacggcaccaatccgcagtacctcatcgagaagatcatccgttcgaggatatacgactctaagtactggaaggagcaatgctttgctctcactgcggagcttctggtggacaaggcaatggagctgcgattcgtcggaggcgtctacggcggcaacatcaagcccacccagttcctctgcctcacactcaagatgctgcagattcagccggaaaaggacatcgtagtggagtttatcaagaacgaggagttcaagtacgttcgagcattgggagccttctatctacggctcacaggagctgccctggactgctacaagtacctggagccgttgtacatagacaatcgaaagctgcgccgccagaatcgcgccggccagttcgagattgtctacatggatgagtacattgacgaactgctgcgcaacgaccgtgtctgcgacattatactgccccgcatccagaagcgctccattctcgaggaaaacaacgaaatcgagcccaaggtgtcagtgctggatgaggacttggacgacgaactgcccagcgacgaggagaaggcagacgagaccaaccggcctaaggagaattcgacagcagtgagacgaccacggagagttcgctccaagtcaaggtcccgcagtcgggagcgcgagcgaagatctgggcagggcaacagcgcccgttcccgggattactacgacgaactggaagactacgaccgccagcgaaatagggtgcgcaatcgggacacccacaacgaggactatgaccgtcggcaaaacaatggacgccacgatcgcgaacgagagcgccaagatcgcgacagtatcagggagcgcgagagggacggcgacagagatcgccgggatagggaacgagagcgagaacgtgaccgtggccgtcacgaccagcgggaacgggactcgcgaggagagcactggtgtaagccagacgcatccacgagttccgttctcgatagcgagcaagtaggaacggaacggaacggcagtatgcctcgctctgatacggaggctttggtggccgatgtggagactggcgaagattcggcaccacgcatactggacgcatcatctgcggccagcagtgagcaggtggacccgcctccggtaccgccgcctcatgactacagcagctatcgctggttcatcctggagcccgcagtttttttaatcttcttcgccagaaatttaattggggcggtttatcagaaccaaattctctaccaaacctgcatcaccatcgagaaattcaatgccacgcaatgtgaaccgctgctgggcattgatcgcggatcggacgcggataaagaagtcgaggtgatagtacagacgtattctgcaaatattatgatgacaacctctctgctagagagcattattcctgccttcgcgagtctgttcctgggtccctggtccgacaagttcggaaggcggccaatcctgctgacaacttttacgggctacctcactggcgcactcatactgatagtaatcacttacataacgaggtccacgaatataagtccatggtggttcctcctttcctcggttccttccgtcgtaagcggcggaacttgcgccttgattactggaatctattgctacatatccgatgtggccaaggagcgaaagaaggctctgagaatggtcctcaatgaagcctccctctgtgctggcataatggtgggcaatgtggccagcggttatatctatgctgccacaaatgctctggtgttgttttccattgctggtagcctgatgatgtttgccttgatgtacgtgcttctgtttgtacctgaaagcctaaatccaggtgacattcacaccggatcgcgagtccgtgagttcttccgtttcgatttggtcacggacctgattcgcacctgctttaagaggcgccccaactttgatcgcacaatcatctggcttacaatgattgcccttacgatagccattttcgacatggagggagagagcactgtaaattacatgttcgtgcaggataaattcaactggaccattaaggacttcagtctattcaacgcatcccgcatcgtgatccagattgtgggcagcatcgttggcatgttggtattgcgccgcgttctaaagatgtctatcgtaaccatggcaatgctctccctggcttgctgtgttctggagagcacggttcgagccacagcagtctactggcaagagctgtatctgggcatgacgctgggtatgatgcgtggcgtcatgggacctatgtgccgcgcgattctctcgcacgttgcacccgcgactgaagttggcaagatctttgctctgaccacctccatggaatcggtttcgccactgggcgctgcacctctgtacacaaccgtctacaaggcaactttggaaaattatcccggagctttcaactttattagcgccgctctctactttgtgtgttacattctgatagccgtgatcttcggcatccagaagtcgatgggtagtagcagtgtctaccaggccattggcagctaacaaactctccagagcaccgatttagctgaatgtatctcataagttaaattcctt

SEQ ID NO: 4146 - protein, 856 aa, DROSOPHILA
MANRTVKEAKNVHGTNPQYLIEKIIRSRIYDSKYWKEQCFALTAELLVDKAMELRFVGGVYGGNIKPTQFLCLTLKMLQIQPEKDIVVEFIKNEEFKYVRALGAFYLRLTGAALDCYKYLEPLYIDNRKLRRQNRAGQFEIVYMDEYIDELLRNDRVCDIILPRIQKRSILEENNEIEPKVSVLDEDLDDELPSDEEKADETNRPKENSTAVRRPRRVRSKSRSRSRERERRSGQGNSARSRDYYDELEDYDRQRNRVRNRDTHNEDYDRRQNNGRHDRERERQDRDSIRERERDGDRDRRDRERERERDRGRHDQRERDSRGEHWCKPDASTSSVLDSEQVGTERNGSMPRSDTEALVADVETGEDSAPRILDASSAASSEQVDPPPVPPPHDYSSYRWFILEPAVFLIFFARNLIGAVYQNQILYQTCITIEKFNATQCEPLLGIDRGSDADKEVEVIVQTYSANIMMTTSLLESIIPAFASLFLGPWSDKFGRRPILLTTFTGYLTGALILIVITYITRSTNISPWWFLLSSVPSVVSGGTCALITGIYCYISDVAKERKKALRMVLNEASLCAGIMVGNVASGYIYAATNALVLFSIAGSLMMFALMYVLLFVPESLNPGDIHTGSRVREFFRFDLVTDLIRTCFKRRPNFDRTIIWLTMIALTIAIFDMEGESTVNYMFVQDKFNWTIKDFSLFNASRIVIQIVGSIVGMLVLRRVLKMSIVTMAMLSLACCVLESTVRATAVYWQELYLGMTLGMMRGVMGPMCRAILSHVAPATEVGKIFALTTSMESVSPLGAAPLYTTVYKATLENYPGAFNFISAALYFVCYILIAVIFGIQKSMGSSSVYQAIGS

SEQ ID NO: 4147 - DNA, 4915 bp, DROSOPHILA
gaattgcatgaagacgaaaagcaatcagaaatgaattactaaatgcacagactttaaatctttattaagaatagttcacgaagctcacgtatttaaaccataatggttttaatgactaataaataatgtagtttatctgacatttaaattagtaagcaaaacgaaagcaaaccattgaacaaatttttgtattatatatatatgtagcaagccaaattgttgtatataattcaaaattgctcgaaacaagtagcaacagtacgttattaattatagaaagcagtcattgcccagccacattttcatgaagtattgcccaatttttgttttatcgcaaactcagctatcaagtttcatgagttttattgaactcaacccgaggcctgcagatattgtcccaattgcccaaactattgttacagacaatttgattatagcttatcggtttgctattttagaaaagcgtggagaacgccgagggacagagaaataacttagtgtccgtgcgagaatccgatttcgaggtgttccaggccctagccaaagacagcgagaacgtgaccaactatgcggagaaggagtactcgcaggaggtgccgcaggtgaagccctgggagaaggtatctggcccgcccgttctgccgccccatctgctccaggtcatcctcaacaaggatacaccgctatcggtgggtattgtcgctgtctcgagagctaccgaccgtaaccttaccctattctgtttcagtgtgaacccactctgctgccggaacccaaccacgtgatgcttaaccacttgtacgccctgtctatcaaggatggcgtcatggtcctgagtgccacgcacaggtatcgcaagaagtacgtcaccacgctgctgtacaagcccatttaggcaactcgcaattggtattttagctgtaggaacatggtttttatgagggataccacgtcccgcttgtcaaatttaccttattatgagtaaaagtgttttagttttctctctattaagcgttgtatttttattagttataaatatacggaacttgtaaaaatataagattattgcattgtgtcataatttgtaatttgtatttgaatttactacgaatcgtacagcttatttgcaatttcaacctgatatgtcactaaagtcacgatctaagagtaatttaagcaactatgcatattgactgactgataatttggttccctgttcgctgtatataagtataacaacactttggattttgatcaacgtttcatatcacatgtgtacaagagtcttcgccgacggcaatctatcggaatacaaacattctcgtatatctacgtgttcaactggacaaaaactgaactagactagcggaccgaccgaccgaccgaccgaccgaccagcttcacatcagcttgaccttgtggtccaactgatcggcgtcgatcttcttggcgaacagcaccggtgacgaggaggccagcgccaccgtctgcttggccaagaatcgctcgtgcatcttgttggccgtgtgctggaactcgccatcctcgtcgaacagcgccttggtgaagtactccgtgaagaggcggcccatgtactggtctttggtggacggccaccagccctcgaggaagccgatgtgcccgccacgagccgtaatcacgatggccacatgggtgcactggttggccgccttgatgggaatggcatccagtggctggaacggatcatcggcggcgctcaggcaaagcagcggcaccgaaatgtgatcgagtttgttgtgcaacgtggcatccgagtaatagtcattcacatgggcatatccgaactgcttagccgtaaaaagcgcgtcgaactctttgatcgtcttgcagcgcagaatgcgctgaatatcaatgtcagagtcctggtaaatatccctgtagatgtccaggtgattgcgcaaggttcggcataggcttccagccaagtggcgtcccagcaggctgttgatcactggcttctcgatgctagcgctgcccttgtggacgtcccaagggacagatattatctttgcagccgaaaggaagctcctggcctcgtcgctcttgcgggctaaataattgcccagaatcaagccgcccattgagatcccagtggctcccagcttgcatttttcgggcaaagtgcgtcgcacatgctggacgacctcgcacagatcctcgcagttggcggcgcagtagagacgcggtgtcttcagctctatgccgccgagtccgcggttattaaacaccaccactcgcatgccagcctgctgggcggcgaagacgagacacttaatgtactccgcctgcgactcaccggtcagacccggtaggatgagtatgcatggagcactctggtcgcagccctcctccatccagtccagggccacctccccgccatctttcagcgagagtatctcacggcggtagttgacgcgcggcagactcttggagcgcagcaggctcgcaaggacggtctgggcacgactctccacacaccaaaaggtgggccagtacttgttctccagcgtcggcaccttccggatcagatactgcttgaacggcccgtccgaacatgcgattatcggtcgctgcaattagacggtaaatgcggtgattagtcacgcaccggacgtgatgcaatggctgatgttacactcaccttgaccacctggataaggtaatagacgacgtaggccaccacagccatgcccaaaacatggaggcgcggcaggttggacaggtaggcgtacatcgagtagaacatggcgtcgttctctgagtgaaggctccgcacagacaatttcgaacttaatgctggacgggaaagcgagctgaaaaaacgaacaagccacaaatgaaatgattacagcgcagcgcgacttgttagcggcatgaatgggctatttcgggctaataagtacaaggaggcatatctaatcgccgcgcgctaatgtatgcatatggattctgattgaacgagtggtcgtccgtatcaaaggcagacaaaatacgccgcgaaagggtgcaggcggggcgggttcaggtacacttggctcgttcacggcgcttatcgctcactcacagcaggtctggacggtgggctgggttctggagctgtgactgcgactgcgattgcgaccgggactgccgctgatagacgcctcttccggcggacaggcagcgaatgtcgtgcactgggccaagtagctcggccacggagcgatacaggaccaacttgtggccggtggttggaccacggacaagggcgcacagcatggcggctctaaactaaagactattactagcttggtgtgcttaaaccaatggtttgtgtccgggggctctgtcaattgtgctgggttccacaatttatgtgtgcttaccttaaaaagagggcaaaataaaagaataaatacaagtttagacaaggcgacttaataaacctgtgacgcggctgtgacacaaatcgaaactgagtccgcagaccgatagtatctgtaattattggattgaccccggacattcgttgttgggctcggacttcccagcggcgtcgtcacgtgcactaacagaacaatgggcgggattgggtagtggtggcggtggtgggcggataatggtgttctattgatttgcctaggtcggtgagtgcaggtaattaccgtgccaaatgtgacggaatcgaaactattgtgtactatacgcagctctcgccgagtagctgcaatacgtagatcggagtacagcaatctcttagaggcaaactgcttcggttacacgcacttatgtaaccttataacaaatagtgtgcatttttcgaatcgctgtcgagagaggaaccttggggcaagcgttggggatccaaagaaactcgggaaaaacctagaagggtgcacactaccaaaatataaacacaatcgcgggacgctaacggtgcaactgcagtgagaccagactaatttaaaaaggcgcccgtgtggtgcggaacttggctaatggacgcgttcctcagtgatataaaaatgaacacgttcagcgagcaacaatattgttgatcccagtgttatgcgatagttttgtagaacacgattggtgcaactatgaataagataaaataggtatatacaaaaataaaaacctttaaattatttatgtaataacttatttattcattttagtaatattatatttggctacataaagaatcattagaattcggtgagggcctcgaaacgataacacatcatcacaacatgcctatttatgatgtaaacattaaaaatatttaactataacaatatgtctatctaccttttattttaaaaattttttaaaaatgttccaagaaattaatatttttgttatctataggtaatattatatatcgttgttagaccttaaaatgtaagcttcaaaaattatcgatataaaaaaacagtagtgtcaaaagactataataaatgagcttttcaaatatttgagcaagcacaacttttggtatattccaaaaaattcccgtagttatttattcgtggctcagtgacgtttttgaacggtccaccgacggttacactgttcgcgatttttgttgtaaaagtgtttttgttgtgcttgcttgcataaaactgcgagttccaagtgaaatatctattgttgtggcccgaaaatgccaaaaaattagtgagcagtggtccccgccccaagtccgcagcaagcaggtgccaaaaccacccccgtgatcgtcgaaatcgaaccaatgacgtcgcgaatctgaggcgacaaagagcagcgggaggaaagtggtcgcccaaacgaccgtattgtgtcagcgtaatcagtattagaagcattagcagtccggattggacacaccagtcaaacgaacaccccc

SEQ ID NO: 4148 - DNA, 2136 bp, DROSOPHILA
cccttctaggtttttcccgagtttctttggatccccaacgcttgccccaaggtaagcacacataaattgtggaacccagcacaattgacagagcccccggacacaaaccattggtttaagcacaccaagctagtaatagtctttagtttagagccgccatgctgtgcgcccttgtccgtggtccaaccaccggccacaagttggtcctgtatcgctccgtggccgagctacttggcccagtgcacgacattcgctgcctgtccgccggaagaggcgtctatcagcggcagtcccggtcgcaatcgcagtcgcagtcacagctccagaacccagcccaccgtccagacctgctctcgctttcccgtccagcattaagttcgaaattgtctgtgcggagccttcactcagagaacgacgccatgttctactcgatgtacgcctacctgtccaacctgccgcgcctccatgttttgggcatggctgtggtggcctacgtcgtctattaccttatccaggtggtcaagcgaccgataatcgcatgttcggacgggccgttcaagcagtatctgatccggaaggtgccgacgctggagaacaagtactggcccaccttttggtgtgtggagagtcgtgcccagaccgtccttgcgagcctgctgcgctccaagagtctgccgcgcgtcaactaccgccgtgagatactctcgctgaaagatggcggggaggtggccctggactggatggaggagggctgcgaccagagtgctccatgcatactcatcctaccgggtctgaccggtgagtcgcaggcggagtacattaagtgtctcgtcttcgccgcccagcaggctggcatgcgagtggtggtgtttaataaccgcggactcggcggcatagagctgaagacaccgcgtctctactgcgccgccaactgcgaggatctgtgcgaggtcgtccagcatgtgcgacgcactttgcccgaaaaatgcaagctgggagccactgggatctcaatgggcggcttgattctgggcaattatttagcccgcaagagcgacgaggccaggagcttcctttcggctgcaaagataatatctgtcccttgggacgtccacaagggcagcgctagcatcgagaagccagtgatcaacagcctgctgggacgccacttggctggaagcctatgccgaaccttgcgcaatcacctggacatctacagggatatttaccaggactctgacattgatattcagcgcattctgcgctgcaagacgatcaaagagttcgacgcgctttttacggctaagcagttcggatatgcccatgtgaatgactattactcggatgccacgttgcacaacaaactcgatcacatttcggtgccgctgctttgcctgagcgccgccgatgatccgttccagccactggatgccattcccatcaaggcggccaaccagtgcacccatgtggccatcgtgattacggctcgtggcgggcacatcggcttcctcgagggctggtggccgtccaccaaagaccagtacatgggccgcctcttcacggagtacttcaccaaggcgctgttcgacgaggatggcgagttccagcacacggccaacaagatgcacgagcgattcttggccaagcagacggtggcgctggcctcctcgtcaccggtgctgttcgccaagaagatcgacgccgatcagttggaccacaaggtcaagctgatgtgaagctggtcggtcggtcggtcggtcggtcggtccgctagtctagttcagtttttgtccagttgaacacgtagatatacgagaatgtttgtattccgatagattgccgtcggcgaagactcttgtacacatgtgatatgaaacgttgatcaaaatccaaagtgttgttatacttatatacagcgaacagggaaccaaattatcagtcagtcaatatgcatagttgcttaaattactcttagatcgtgactttagtgacatatcaggttgaaattgcaaataagctgtacgattcgtagtaaattcaaatacaaattacaaattatgacacaatgcaataatcttatatttttacaagttccgtatatttataactaataaaaatacaacgcttaatagagag

SEQ ID NO: 4149 - protein, 525 aa, DROSOPHILA
MLCALVRGPTTGHKLVLYRSVAELLGPVHDIRCLSAGRGVYQRQSRSQSQSQSQLQNPAHRPDLLSLSRPALSSKLSVRSLHSENDAMFYSMYAYLSNLPRLHVLGMAVVAYVVYYLIQVVKRPIIACSDGPFKQYLIRKVPTLENKYWPTFWCVESRAQTVLASLLRSKSLPRVNYRREILSLKDGGEVALDWMEEGCDQSAPCILILPGLTGESQAEYIKCLVFAAQQAGMRVVVFNNRGLGGIELKTPRLYCAANCEDLCEVVQHVRRTLPEKCKLGATGISMGGLILGNYLARKSDEARSFLSAAKIISVPWDVHKGSASIEKPVINSLLGRHLAGSLCRTLRNHLDIYRDIYQDSDIDIQRILRCKTIKEFDALFTAKQFGYAHVNDYYSDATLHNKLDHISVPLLCLSAADDPFQPLDAIPIKAANQCTHVAIVITARGGHIGFLEGWWPSTKDQYMGRLFTEYFTKALFDEDGEFQHTANKMHERFLAKQTVALASSSPVLFAKKIDADQLDHKVKLM

SEQ ID NO: 4150 - DNA, 5317 bp, DROSOPHILA
taacacaactaactactcgagacgacacgaataaaagacacgggacgtaagcaaagtgttttggtgtgagccaactgaaaaaaggggcagcaacaatctggccgatgggggagcacatggattcattcgggaacaggggaccctctcctacaaaacctgtctgttatgcctgcgtcctgcaacacaagaattacaagcatcagttggtggctcgcgattgatagagtatgaataatgaggtgatgcaaggcggcgaatcgaacgccgaagaatagcctctaaggtaatatgtggccgtgcgccaccggaagtgaaaccgaaaacagaaactggacgggccaatatagggaccataacagtaagagaccgcgagccgcgagatgtgcgattaatgtgtgtgggatgtgggtcctgcctacgggccggcattctggctctggccggaggacgccgtggcagctgcagcagccgcaaccgcagccagatccaacagttggaagtgcttttgatccgcgaccgcagcagccagggattccaggagggaggcatggacggctgccgtcgctggctgctcgtgctgttgctgctgcagttgctgctctgagactgtctgcttctctggcgattggcggctggcctgctgttctggggattctacgagttgcatcggcggcagcatggacgggtcacacaaaaagatcaggggaagaagagaaagagagagagagaaagaaaaaagacaaagaaatgcacaagttacttgaattagtttagttattatcatcatataaccttgggtttaggttaacacaacaacaatcggaaaagaggctctcaacaaaaaccttcactaacaaactggcatgatttattaaaattatcacttaaaataagagtacatatcgtgaaataatttagattcggtgacaacagaaaatacattgaaaatgaattaggacaaatggtggtataaaaccgaaaaatactctattaactttgcttagccgacgtttgggcgccttgagctctctggcttgggttttctgtaagaatgttctgattaagtatgggattcttgttccaaacccgaaccatttcacaatcgatcgacggaaaacataccgtgggcgcagccaaactcctaaatgaacacgcttgtaaagctcctccgctttctgaggttttttaaaaacattaccacctacaatacaagcaacgaaagcggatagagtcaatttatagcctacttagtctatacaagttttggctaggggattttacgaaatctacggaaaccttttcgatgctggactccgtagatctaacacaaaattatcatgataaatagcccttctggtcacttttttgaaacataaacatatgtttgtacatactacacgtaaaattgggttaattttaactgggtgtactcatactaaaatcaaatgatgcactaaagtcataagcggaatcggggacctaattatatttgaataacaataagtgatgatgaagtcagaatcatatgtaacatatatgtaattttcattttggacaatgtgaatactctttcgaacttttgcagttaaaattttctaatattatttaagacaattgatgcaccaaaaaaatacttttacgttaaatgatgtcctagaggtgtgccgtaaaaggtgaaccgaaacctaaatgcttgatcttgttaggatttcattcctttgtctaaattattggtgccgaagcgtggttgagtcagtgtggatgtatgtaaatgggatgtgtatggattcttataactactttaccctagggtctacaattagcaatttgtaaacataaagatttcttggctatacagagatataattctcgttactggcttattgcaaaaagggatccaacgtaccggattgctggggctgctgtgccggggtataggcacgttggccgccaccgctgccgttcgacgtggaactggcgacggcttgcttggcgggcggacgacgcttagccagcggcatgtcgtcgtctgaatcgcttaacgttaggtcaacctgttgcgcagacagaatacagtcatatgataagacagtttggtaggttgtagattggtgctctctacttacagtttcactgtttgacgttgatgtgggctgttcgtcctgtgctggggacaaatccctctttactggcttggcgtcatccgagataagttctggtaatgtccgaaaaacttgattaatgtcaaaacaatttaaaaggttgcgtgttaggcgattacctatgtcatccgatataacctcaaccttttgggcgggctttgaaggcgtatcaaggatctgcgtctcgctccgtagtcctggtgtgctccaagatccatcctgatgaagttgaatctcagtatcatcactctttagaagcgacgagcccaacacctcctggaagtagctggaaaacagagtttaatcagttacaaatatgctaaatgaaatgacatttcttacccatctatgaccaggttgtcataaatggccggcttgtcgcatacagggcagttccacgtgggcttacgctcattcatttgcaggtagagactggcatcgaagcattgcagatgcgagcaggttgatgctcgacaaggcagcaacattttcatcttgcccaacgggcagttaagggaaaccttcagcatagtggtggctatttcgcagtcagcatcctcagtcagcttctctttgactttaaaaaaatggtatttattattaagtttgcatcattggagcacagaaaactcacttaagcctcgcgtgtagtccgctggttttacgcccttcgtcttcattcgctgcaaaagctgtgttgaggtgagcttctttaccaggtatacggccagacagtagctacgagtgtagtccggacaccactgaaccgttatggtgttggtgacggtaggcgacagctttacattggacgtgacattaacgggtcgcggcggacgcttgggctccacatttggtcggtttgtaggaatgacattctgcattggaataaagagcaggatattataccaggtcctgattggataatcggataatacttacaggcagctgacagagtttgttgttcactttgacgtttacgttcggcgggaagcagtcctcctggtcgcacgaagtctccaccaggcaaaagcgcagttgaacctgaatggcgtgctccaccttggagctgttgcgaatgtcgcgattagaggcaatctcggtggcctgctgcggcgtgagcgtgaagtagaaaggcacctcttggacgcgctgagtgttgcgtggcaccagagttgaaggcttaattagcgttccgagtacatcgtagaaggctagctttttcagccgcacatcggggtgaataggcagctggctgttgatgctgtgtgtgtggaggaagggtgcgccgccgaccacattcatctggccgccgggcacttgcacaccttggccgctgcccacgaggcccacgggattgggctgcacggtgggcggcagctggatgtgcgagtacatcctggttgggtcgatgtactgcagcgtggcgttttgttcctgcacggactgggcgtagacttcctggaccttcggggcaagcagttccaagttggtgcgcaagaacgagaggatgcggctctgcaggtcagtttttcgtccagcgaatgagatgttcagaaacgacaggattttttgcagctcgaccactcgaagcatctgcaccatttgctcacattcctgaagagacggaaatggcatggcgaacaatgaaaattttgtatttcggaaaattgggaaggtgtctatgtccaaatagcgggacttagcaccaagcgtccacacgaacacacacacaagcgcgctctatatgcaaatatcgcgttttcgcacatatgtacacatgcgtatgccttgtgcggctttatgcagaaaaaatcataaattcgctctacattatatgccaagtgattgcttgacagtcggacaaaagcctggcttccacatttttcccatctgtggataatttactggtccgaaactgccgcatgccaccaaatcattacctagatgctcaaacatggcgttctcgcaaaaagtttcttttcgtggaaccgatcgggtttcagtggcttttaacgttggtatatgcagaaaatttggtaaggcttgtgttcgccactggcagccttccttctttcgcaaattgcacttaaacaaactaccgcaaaaatgcccccttttttgtcacacgaattttgttttgtccgcacggtctgaagaaatatggcggatgatagtgttgttaagcgccggcggatttggctggcaaatcactctgttcgtgggtggggaagggtacagacaccatttttttctgcggtcacactgcttatcaataaccatggcccccatatttatgaaaaattctttggactgaataaactgagactggcggaaacataccttgtacttggtggaatcaaagggattaactgctattggcgctgacgaagtcgactggtgcccggggctcgaagatgttgcggcattttccgcctgcgtgcgagccgtctgagagcgggtctttcgcatcactattattttctattcacggtggcgttaggcgttcggcaattgaagtcgcggactcgtttgcatttgcctgggacgcgcaccacacataaaaacaagcaattgccgctgtttttcaacgaatgcggagaaacaaaaatattttacgcggcgtcgtcgctgtgggccgactagagttgacactatcgatcgacactgcggaaatctctaccgcctggccgagtcttgtctcacgcagcccgaaaatgccctaacgcgtgcgtttgtttactttgttagcaaccgttactttcgtagattcctaattcgctaggcatttatttaattgtacaaatatgggtctatctatgcaagaatagtataaaaggggcccgccgcttggcgtgggcctagaaaaagtccatgtccccgcaattgacgtccagaaagtcgtggtcgtagctgattaaatccttcagcggcgctccctgagccgccgccgctgctttggatgtggagggaagttccgcattgtccacaagatttatattgatctcgtgggtcctgtactcagggctgtcgtgctcctgctcagcgccaacaggggagggtggcgggttggacactgaaatagtcaaaatagtcacataggagatttaacaataataatgggatcttcttacagctgcccggttgcttatcttcac

SEQ ID NO: 4151 - DNA, 1880 bp, DROSOPHILA
ttcagaccgtgcggacaaaacaaaattcgtgtgacaaaaaagggggcatttttgcggtagtttgtttaagtgcaatttgcgaaagaaggaaggctgccagtggcgaacacaagccttaccaaattttctgcatataccaacgttaaaagccactgaaacccgatcggttccacgaaaagaaactttttgcgagaacgccatgtttgagcatctagatggtgcagatgcttcgagtggtcgagctgcaaaaaatcctgtcgtttctgaacatctcattcgctggacgaaaaactgacctgcagagccgcatcctctcgttcttgcgcaccaacttggaactgcttgccccgaaggtccaggaagtctacgcccagtccgtgcaggaacaaaacgccacgctgcagtacatcgacccaaccaggatgtactcgcacatccagctgccgcccaccgtgcagcccaatcccgtgggcctcgtgggcagcggccaaggtgtgcaagtgcccggcggccagatgaatgtggtcggcggcgcacccttcctccacacacacagcatcaacagccagctgcctattcaccccgatgtgcggctgaaaaagctagccttctacgatgtactcggaacgctaattaagccttcaactctggtgccacgcaacactcagcgcgtccaagaggtgcctttctacttcacgctcacgccgcagcaggccaccgagattgcctctaatcgcgacattcgcaacagctccaaggtggagcacgccattcaggttcaactgcgcttttgcctggtggagacttcgtgcgaccaggaggactgcttcccgccgaacgtaaacgtcaaagtgaacaacaaactctgtcagctgcctaatgtcattcctacaaaccgaccaaatgtggagcccaagcgtccgccgcgacccgttaatgtcacgtccaatgtaaagctgtcgcctaccgtcaccaacaccataacggttcagtggtgtccggactacactcgtagctactgtctggccgtatacctggtaaagaagctcacctcaacacagcttttgcagcgaatgaagacgaagggcgtaaaaccagcggactacacgcgaggcttaatcaaagagaagctgactgaggatgctgactgcgaaatagccaccactatgctgaaggtttcccttaactgcccgttgggcaagatgaaaatgttgctgccttgtcgagcatcaacctgctcgcatctgcaatgcttcgatgccagtctctacctgcaaatgaatgagcgtaagcccacgtggaactgccctgtatgcgacaagccggccatttatgacaacctggtcatagatggctacttccaggaggtgttgggctcgtcgcttctaaagagtgatgatactgagattcaacttcatcaggatggatcttggagcacaccaggactacggagcgagacgcagatccttgatacgccttcaaagcccgcccaaaaggttgaggttatatcggatgacatagaacttatctcggatgacgccaagccagtaaagagggatttgtccccagcacaggacgaacagcccacatcaacgtcaaacagtgaaactgttgacctaacgttaagcgattcagacgacgacatgccgctggctaagcgtcgtccgcccgccaagcaagccgtcgccagttccacgtcgaacggcagcggtggcggccaacgtgcctataccccggcacagcagccccagcaatccggtggtaatgtttttaaaaaacctcagaaagcggaggagctttacaagcgtgttcatttaggagtttggctgcgcccacgaaaacccaagccagagagctcaaggcgcccaaacgtcggctaa

SEQ ID NO: 4152 - protein, 554 aa, DROSOPHILA
MVQMLRVVELQKILSFLNISFAGRKTDLQSRILSFLRTNLELLAPKVQEVYAQSVQEQNATLQYIDPTRMYSHIQLPPTVQPNPVGLVGSGQGVQVPGGQMNVVGGAPFLHTHSINSQLPIHPDVRLKKLAFYDVLGTLIKPSTLVPRNTQRVQEVPFYFTLTPQQATEIASNRDIRNSSKVEHAIQVQLRFCLVETSCDQEDCFPPNVNVKVNNKLCQLPNVIPTNRPNVEPKRPPRPVNVTSNVKLSPTVTNTITVQWCPDYTRSYCLAVYLVKKLTSTQLLQRMKTKGVKPADYTRGLIKEKLTEDADCEIATTMLKVSLNCPLGKMKMLLPCRASTCSHLQCFDASLYLQMNERKPTWNCPVCDKPAIYDNLVIDGYFQEVLGSSLLKSDDTEIQLHQDGSWSTPGLRSETQILDTPSKPAQKVEVISDDIELISDDAKPVKRDLSPAQDEQPTSTSNSETVDLTLSDSDDDMPLAKRRPPAKQAVASSTSNGSGGGQRAYTPAQQPQQSGGNVFKKPQKAEELYKRVHLGVWLRPRKPKPESSRRPNVG

SEQ ID NO: 4153 - DNA, 3630 bp, DROSOPHILA
ggacaaaagcctggcttccacatttttcccatctgtggataatttactggtccgaaactgccgcatgccaccaaatcattacctagatgctcaaacatggcgttctcgcaaaaagtttcttttcgtggaaccgatcgggtttcagtggcttttaacgttggtatatgcagaaaatttggtaaggcttgtgttcgccactggcagccttccttctttcgcaaattgcacttaaacaaactaccgcaaaaatgcccccttttttgtcacacgaattttgttttgtccgcacggtctgaagaaatatggcggatgatagtgttgttaagcgccggcggatttggctggcaaatcactctgttcgtgggtggggaagggtacagacaccatttttttctgcggtcacactgcttatcaataaccatggcccccatatttatgaaaaattctttggactgaataaactgagactggcggaaacataccttgtacttggtggaatcaaagggattaactgctattggcgctgacgaagtcgactggtgcccggggctcgaagatgttgcggcattttccgcctgcgtgcgagccgtctgagagcgggtctttcgcatcactattattttctattcacggtggcgttaggcgttcggcaattgaagtcgcggactcgtttgcatttgcctgggacgcgcaccacacataaaaacaagcaattgccgctgtttttcaacgaatgcggagaaacaaaaatattttacgcggcgtcgtcgctgtgggccgactagagttgacactatcgatcgacactgcggaaatctctaccgcctggccgagtcttgtctcacgcagcccgaaaatgccctaacgcgtgcgtttgtttactttgttagcaaccgttactttcgtagattcctaattcgctaggcatttatttaattgtacaaatatgggtctatctatgcaagaatagtataaaaggggcccgccgcttggcgtgggcctagaaaaagtccatgtccccgcaattgacgtccagaaagtcgtggtcgtagctgattaaatccttcagcggcgctccctgagccgccgccgctgctttggatgtggagggaagttccgcattgtccacaagatttatattgatctcgtgggtcctgtactcagggctgtcgtgctcctgctcagcgccaacaggggagggtggcgggttggacactgaaatagtcaaaatagtcacataggagatttaacaataataatgggatcttcttacagctgcccggttgcttatcttcactttgctcgtcgccctgcatgtagtactctttgcgctgatttaacgtcggcagttccgtaacctgcttgctgaggcacttcttcaactcttccaccttacggtcccgcatcaacgtttcgatctgctttcgagacttgctcagactctggcgatcctcactaaaaatgcgcttctgctgctcctgagtgatgttatcgtggtgctttattaggaacaggaataccccgcctggtgtacgtctccgtatgccgttctgtttcgaggtatcgtgttagtatattcgggggaacatcctttactacttactttgatcatcatgccgccatcggcttcaatgcgctgagtttccttgtatagctctaggcacacatctatgccaagaacctccacgactcgaactggtaaaactggcattatttactaagtagggcattatttatttcacatactcaccaagtaattcgtccttttcctcgtacagtttgctggccatttcggtagccacatccgaaggatctctctcacccacttcgtttaagtccagaatgtgtctgggctcgcagaaatcggaagatccgctggccgaagatgtcccacgacgtgaccggtgacccgttctactcttgaccaaaccgcgctgttgattcccggtgatgggccgactagaaggtcttcccctcttgtgagctggatgggagcattcgccgccgtcctccgaagagtttgagagtcgtcgctttagagtgttctcgccgttcagccggtatcgcaatgagaagtcgtagttttcaacatttcgatcccgaccgcttcgggtaacgtcgcagccacgcatattctcgctgagcgcatcctcttgcagggcagaagcccacacgttgtacttcttgaaacgggctcgattcggttgcatttcagcatccgtgggcggaacgcgccgcattaccgtgcgccgaatgcgctttttccgcttcttgtggccgtcgggtccggtggattccgtacgaagcttcttgatgcacccgtcctcggaggattcggcagtcgaggagtcgctgttgctttgtgactcgtcctctaacgcagtctggatctgatggcaggtggtaaggggactggccaccttctccgcaccgtcaggtcgctgcaacggcgtgtaaacgccatcatcgtcgctctccgatagctgaaaggccggcagatatggtcattagatgctcggtagtctgggtgcttatgattacctcgccgtcctccaggtcaacgtcatttgcgtgcagttccatcattttttttatggcgagtcgagagaaaatcttcgcccaaagtgcagctgtttgtgcaacactgagcggcagagtgaccatacttactgaggattacttggtgcatagttaaattattatgtttatattattggtctttaatagtgcaaagatgtaaattagattagctcgtgttatatttacaataataaaaagatcagcgtaactaggtgttactaggcaaattaagttttgcgtaatttaatacttaggtgggggtgaacaacatagcttatattaattaatatattttttttattgaattatatgtaaataagactaaatgtatttaatttaattaaattaataaacatagttttaggtgaggcatttctgctatacccacaaacggtcacacaccacacgtgcgtttactttgcgaaccaaacagaacgtggttgaaaataatcgtagtttttatactgttataacggctcaccatggtgcggcccaacaacaaccagctgccggagaaccttccgcagttgcagaacctcatcaagcgggatccggagtcgtatagcgatgagttccacatccagtaccaacactttcttagcttgctggaagtttttgcgctgaatcccagcgaagaaaacaaatccctggatgacatcgtcatgtttgtcgcccaggtggctcagtgctatccggccgtctgcgaggagttcccaaagcgtctttccgatttgctgaagaactatgccaccgttctggacccggctatgcgtaactgctttgtgaaagctctaatcctgctgagaaacaagaacctagtgcccgcgctggacatactggaactgttctttcagttgctgcggtgtccggacaagaatctgcgcacctttctgcaaacgcacattgtgacggacatcaagaatatgaatgccaagcacaaggacatgaagctcaattcggtaagacgcagtcgtcagctaccactgttggactcaatcaatattcatttatgtctttgcagagcctgcaggcattcatgtactccatgct

SEQ ID NO: 4154 - DNA, 1406 bp, DROSOPHILA
ctgcactttgggcgaagattttctctcgactcgccataaaaaaaatgatggaactgcacgcaaatgacgttgacctggaggacggcgagctatcggagagcgacgatgatggcgtttacacgccgttgcagcgacctgacggtgcggagaaggtggccagtccccttaccacctgccatcagatccagactgcgttagaggacgagtcacaaagcaacagcgactcctcgactgccgaatcctccgaggacgggtgcatcaagaagcttcgtacggaatccaccggacccgacggccacaagaagcggaaaaagcgcattcggcgcacggtaatgcggcgcgttccgcccacggatgctgaaatgcaaccgaatcgagcccgtttcaagaagtacaacgtgtgggcttctgccctgcaagaggatgcgctcagcgagaatatgcgtggctgcgacgttacccgaagcggtcgggatcgaaatgttgaaaactacgacttctcattgcgataccggctgaacggcgagaacactctaaagcgacgactctcaaactcttcggaggacggcggcgaatgctcccatccagctcacaagaggggaagaccttctagtcggcccatcaccgggaatcaacagcgcggtttggtcaagagtagaacgggtcaccggtcacgtcgtgggacatcttcggccagcggatcttccgatttctgcgagcccagacacattctggacttaaacgaagtgggtgagagagatccttcggatgtggctaccgaaatggccagcaaactgtacgaggaaaaggacgaattacttgttcgagtcgtggaggttcttggcatagatgtgtgcctagagctatacaaggaaactcagcgcattgaagccgatggcggcatgatgatcaaaaacggcatacggagacgtacaccaggcggggtattcctgttcctaataaagcaccacgataacatcactcaggagcagcagaagcgcatttttagtgaggatcgccagagtctgagcaagtctcgaaagcagatcgaaacgttgatgcgggaccgtaaggtggaagagttgaagaagtgcctcagcaagcaggttacggaactgccgacgttaaatcagcgcaaagagtactacatgcagggcgacgagcaaagtgaagataagcaaccgggcagcttgtccaacccgccaccctcccctgttggcgctgagcaggagcacgacagccctgagtacaggacccacgagatcaatataaatcttgtggacaatgcggaacttccctccacatccaaagcagcggcggcggctcagggagcgccgctgaaggatttaatcagctacgaccacgactttctggacgtcaattgcggggacatggactttttctag

SEQ ID NO: 4155 - protein, 453 aa, DROSOPHILA
MMELHANDVDLEDGELSESDDDGVYTPLQRPDGAEKVASPLTTCHQIQTALEDESQSNSDSSTAESSEDGCIKKLRTESTGPDGHKKRKKRIRRTVMRRVPPTDAEMQPNRARFKKYNVWASALQEDALSENMRGCDVTRSGRDRNVENYDFSLRYRLNGENTLKRRLSNSSEDGGECSHPAHKRGRPSSRPITGNQQRGLVKSRTGHRSRRGTSSASGSSDFCEPRHILDLNEVGERDPSDVATEMASKLYEEKDELLVRVVEVLGIDVCLELYKETQRIEADGGMMIKNGIRRRTPGGVFLFLIKHHDNITQEQQKRIFSEDRQSLSKSRKQIETLMRDRKVEELKKCLSKQVTELPTLNQRKEYYMQGDEQSEDKQPGSLSNPPPSPVGAEQEHDSPEYRTHEININLVDNAELPSTSKAAAAAQGAPLKDLISYDHDFLDVNCGDMDFF

SEQ ID NO: 4156 - DNA, 10113 bp, DROSOPHILA
atgtctcttcaaaaatcagctgtggtctattattattatgcgttttcattagactgaactaaagagtgtagaattactgtcatttaacgatataatttagtgatttcggttttaattaaattattgcctaacgttgaccagtcattttgtaaaataacgtctctgagaaacctggaataaaggtgtgtaaaactataacttaatgtttttattacctcctgtagtacaaaatacgataggcatgcatgattatataaataaaggattttattttactttaaatcagacgtattgttttataatttcacattaccttctagacatccagtccccaggaggttgttccttgatcttatgtgatgccatcatttacgatcgcttggcttagtcttatcgccgatctttcagcttgctagctcaactaaccaagaactttaacaccacgatactgacttgcaatttgcttgaagatggtgaatggcgtttattcaagatttacagcttttgttttcgtctttatttttggtgcggatatctctgtccgggtttacgattgtgttaccgtaccgagctttacagaacacaattgcgatcggactttgaagcacgtacctctgcgttcggatacccggacatacttctaagtccacagacccacggagctcatcagttggccgtggaccgtgccgtcagacgcaacgcaatccttgcttcgcctcgaagtttcaggacatcatggataatcctggatatgtgattgactgcgatcgcgagttcggtgagtgaaagaagcaatgtggttccccatgggttctacggttttaagtgagatctaatataacatggaaatctgtgtgaaacaaagttgtgaaatatatgatgctaaatactataacaatcgtagtcgtatggatcaaatgactgttttttttttttacaagtgatgatagtaaaaatatcccaatgcaacagtgttcgttgaataaaaaaaagaccttgcttaatttattgttgtttgctatgctttattattgccaaaatgactttgtttttcttggtatacatatataagatatatgcggtatataagatatatatgcggtatatgcccatcagttacagattcaattctatatcgtatgcatatcgtttatacgtatgttattattgatgaattcaattctcgtgtctttggatgcagatgcagttttactatctctccctttcactttcactttctctctctctctctctcgtcctctcttgaccactttccttaactatctctgccgctttttcgcttagtgtagttggtttttgataggtttgcatttagtgtttaagtatgtgaatagaacgagccaatgtcacgtcacacatcggttatatgccccatatatgtatatatgtatataaccacatatttgttcttgagttgagcacgccaggttttatcttgagaagcgaagcgcctatgggtaatgcgtcagctatttttaggccactttcgtgggctttatagtgcgaatctttggagtatcataaacgttgtaatttggcttacatttgtttatccgataataaagtttcaaaaactaatattttgtttgaaaaacatacgttacatagaaagcctaaaatgcttttcgaaaatattgaaaacctttgaattggtttttgccaatttgaatgaaaagtatagcgaaaacttaataaattacatatttcgaagtacataatatagaatgcatacaccgatatctgatcatgacatagttctcttcgcgtgaggcgactaggattgtgtgtgattcaatctgatgatgctgaattctagtgacatttatccgcttccccgtttgcaaggggggtatactccttggatgggttactggtaattggtaattgattactagttactggttactgtttactggtaaactgattactctagggttggctaattattgtagttggtgtagcgttcgctagctgcctggaagcagtgtcctaggtggggtgagtttgctgctgagcttggtgaggtgagccgcctgtgtgatccgtgatacgtattccgtgatccgtaattcgtgatccgtgatcgctgatatcgtgtgactttctactgaagtgggtcccgtattatgcgtgagtgtgtgtcccttacgagtgtgttgttttgaattgatttgagtggattggattggattggattggagtggagtgtggttggtacatcgactatcgtttagctatggtttcaactatccttttgcagtacataacgtttattaacctctatatgtggccaggcctggctacgtatatatggaccaatttatagctcagtactgatacaagtcaagacttatctatagcagaaatgagttatacaaccgatctacttgctttggctttagttaacattattatagaataagcgagtacaacttttgttcctaagttcttgctataaaacgttaaatttgttcaattgcaaacgcattctacgcattaactgagattatatttgtacctgtaaatttcaatatgaaatgtctaatatcgctatcaatttggaaaacatatctactcgaactgattaattgaaatattttccccatgcttatgccagtactgagcttaactgagttatttctccattcaaataggtatgacaaggtattgagggtattattgcccatttgttagtcatttctttttttgtttcttgggcagttaccatttctatgagctaatctccaattccgatcttgactgtagtgtatatccctctacatgcattaaaaaaaaaaaaaaaaaaaaacaatgaaccgcgacgtttcctgatctgggtgcagtcccttacttctcgaagatcagctcgccggtgagaaacggattgaggtaggtctgcgcctcgtagccagaaaccgatgccgtcgtggtccttcgccggccgccggattgcgccccgttccgcctctcgccatggacatgtccgtgggcgtggtgcgaaggacgcttttcgtcgctgggactcaggatcagtggaatgggcatcgaggtgtatagctgcagttgtggtgcctggacaatggttcctgccgccggatttagtggagcgtccatataaccatgtggcaaagtggccgcagtggccattgacgcatctcctccggctgtggtgctcggcgtggagctggccatcgaattggcaatggacagtttcttttgaccaccggctcgggctctatgatgtttgtagtgaccgcgatgtgtcttccgcttcaggtgacccattccggttacttcgaccggcggtgaggtatccaggattagaggcatgtgaccctgctccgtttctgcatccaactgatcaccacccatagcgtgacttatgttgccgggttgcgggctatatggtcctaaaagcggcttcttgggcggctccctgggatgtggatggggatgcggatgtgcctgaatgatggtggccgtggcaaagacctcctggaagcgattgtttgcctccagctgctgcagttggagatgttggcgctgcagcagttgctggcgctgctgttgcatgtggctgaggatgcggtactgctcgaggatgtgcttgtagaactgctccgcggtcacttccgatgagttcaggaggcgaatggctattttctcgggtatcacaattttatctgcaagaatcaggaatcataaggatttaattagtttgttatttattatataagtagtattttatggaaatcttaacacgtttctcattcaaaatcatatttctatgacttagtccaactttttttacacctgttacgattcaaatattccttgttgtgtcttaattcaaatttaagctgatgctccaaatgggcaaaacttttaaagcgaacactaagcatattaccttacattcagctctggaacagtgcattctcgctatcataaattgcaatttgtttggctttctggcgtataactttcattgagctcccagattccgcatttaattgcatcaaattagatttattgaactgcaaatggaaagtacaccaagaaaaactgcaccctaacgtgcttagggcggtgggtggctgggtggtttcggttggttttgggtggttcgggtgtagtcgtgtgcatgacaccccattgacccaattccgagttgatttacaaaaactgaacaaaaagccaagaatcagcggaaggaaggaggcggaacaagctgaagccgaagcgagtggagcattgtgggcggctttttcacgtcctttcctgagaaagtgctgccaattgcgatattttgccaagaaatttgggcaaattctatttcaacgtaataacaactacagaatgcttggtagtaagctgaagaacaattacattcagaccctttactatttcgcatgcatataaccatcaatttaaaaaggaaaaaaaaaactttaataactgtcacttctttgaatcagatatggcagtacacttatccatactgcactttccgttaaaagcactttataatgaggcttcaaaaaagaaaagggtcaaccctatcctgccagccatcgaagcccatctaatggtaatggctaactactaatgggtagtccagccccaacgttcaccctaatacccatccccatccccttggcaatcgtaatacagctagctcttaactctggtagcctagattcgggctttgtcccagattgaccgctggccgcaaattacccggcgcgtgattggtttctggcttttttggtcacatggccagtggtcattggtcaccgttcattggtcattgttcaccggttggcagtcatcggtttatgatggagcagtttggccgttgatgtggagtgtacagtgattacacggttgactaaccgccgccttaccgcaatgcgtggccttggtgacaaagggccggatggtggggtcccagatgaagatgtagtatagggatagcatgatggccgccagtgaaacgcaaaggacatagacggcgacggtcaggatgcggatgaccttgcggttgctttgctgcggctggtagcatcggcttattgtctccgtgggcggcagtttcactttctcctccagcgaactgtgtttcgagttcatttttgattcgatcgtttgttttttgattgtttcgatatggctcttcttgattttggtagctttcctctaaaaatttatttgaattctcttcacgttgttttggcagtgtcccgttatagtctagtattttgtttttgtttgataaatgcaaagttcttttcggttcttagcttgccacacgcgattagttttacatgtaaatgatatatatttgatttgaattaatttattattgttgtttatgcgtggcgagcttaaaagtacaaaaaagggcgcgcaaaaacttgtctgccaaccgacgcgtcgaaagtgtgaaagcgaaatgagagcagagagagagattctggcaggagttggtaccgtttttcgccttcgtgcttttgcagttcctgcttcgtgcgagagcgaatcgctctctcgcactcggttatttcttccttcgtggcaatttcggctgcctttgggggagtttaccattgcattaggcgatcttcgcttttaatttcattcataaaatccgtctctctcactcgcgctcatttgcattttcggctgcccacgctcattgttgtttcttctgcttctttttttttgtgttcttttcattatttcgtgggcattccttgaaggcgaaataaaaacaaaaacaaaccgcacgtcggcacgttgccgctctttgtgtgtcaagtgcagttttcactcccccgaaaatcagcgctcccctttttgcgttcgatttacatgcggaaattaaaatgcgcgcttgaattaattttccattatttcaataatttcaatgccaatcaattgttgtgccaattggggcgattgttcgcatcgataaaatcaaatgttgtgcaatttctggtgggctgttggtgggcggtgggtggtgggtgcctttggtgggcgtgggcgtggcggtgcactgctggctttgacagcaaccttcgcaggtgtcgcgaaggacgttcaaactttcacacaaccccacctccccccacagcctacctttaacccgccgtgcacaccttcgttttccgttgccttcggggggttaacaaactgcaactgggtcactaggacaagtcgagagagagaatgaaaaagagcggcagaacgagcaggagagagctaacggagagagcgaaacgaatgcagcgctcggcgaattgaaatgcagacgtgcgagtgagatggccaaacggtattgcaatgttggccattgattttgttgtgtaagttccatacacacacacacacacacacacacaaagaaagtgctgcgaaaagagatagccagtcacacacccacatgcatgtgcagttacaggttgcactccaaaacggaaacactggattgtaatgcccaaaagtatgctacaaaaacaaaaaatatgtatttatcgtatgtgtatcatacttgaaaacctataaacaataactatttatggtcgaaacttcaaagtattttctaaaatataacagagcagtcataagtcgcaggttcttaatcaaaagctaaaatggtaaattttaactttacgtggttacgagggtaaaacaaaaaaacctagttccggaaagttctactggcgcacgtttgctcaaacaaagctccactgtacttgcacttaaatgcatattcatcatgtgggccaggatgtaggacacgctcacactcacacgcaagttcacatacatttgccgagcagcattgttgcaaagtttccttcaaggagtttaattcgccaacgtggccaggtagagccctcatcctgcctattctggcctcgaaaatgttttgggcccggcctattgcatttgccattttccatcccccccttcccaacaaccatttcccacttccgtttccctccagccattttgcccatggcaagtttaaggatggtttatccatctgcttacttatgtgcagacaaagctgattaagcagctcgggcagccggaacgatgggataacttgggctatgggccttggtaagcgaataagggtaaacttattcccccaacatgcatgatacagagttggatacacataattaaacttaaacttttgttgggcgaaaagtttctgggctaagaaacgatgggcgagacgggcggtttatcaacttaataagaactaatggcatggctcgagtaaatgtgtgtgcaggaaagatattggctttgaattaattagactaagaaggtttgccattcataataaaatgtaaaagcaaaaaatgctctgacaacattgcgtatgagtaacaaaagcgtgatcctcgaatattacgcatacgccacatatgccagaacgggattcttaccaaaaatcaaatgaaatttcactaagttgggaaatatttcggtgaatgaagtggatgtgttaaccaggcagctctagccgaaggcaggccccttcttctggcccttgtaaacgggtggcatgcgtgaatcccagaagaagatgtggtagatggacagaaagaatcccaggctgcagagcccgcacaaatagatcacgatcacaaagtatcgggcaaatcgctcggtatacgtgggctctgcgaacacaatctcctccagctgcggtgacttggggacatacgatgtggcacaggcacttctacgcggggcactgctgctggccaagcggacgctgctgccacttccggttccggttgatcccctgaccgcttcctcaagcacctccacatcctcgctcttcacgttcgattcgatgagattgacaatcttggcaagattcgccatgctggcggcattgcccaggcccgccctggcggattctgacgcagtggacattactgcggatatgtacttttctggtcgcgtccgtccagttcgcgatgtggcagctactgatttggaatcgctaccacgattaaatcaaaatcacacgaatgacgccatattccacccaccaggctgtgtggatagtgtagagcaaatggaaattggtggttcaaactctgcgattcgttggcacgtagcaaagcggattagttttgtgcctggctgtcaacttttgatatcggccacgggggctaattaagccactaaaccaagcccacaaacagtgttgactgctttttgccgaataaaatctcttcagcggcggcacagacatccacaataggattaaagtacttttgtttaaatgttaatgcaaaatataaaggtaaatattctgttttttccagacattaagccttctgaagaagattcatttgaacagaaattgttaaataaataaaaaacatggtatagtaattattaatgtgcgattatgattgcttatgatatgattatagtatgatcgtaagagccaaattttgtagcatactttttcgcgccgtttctcaagatttaaaatcagtgaatattttctgtgtgcggcatattgaagtgacaatctaattaggtagcaacgatttaattgacaaatcgccgagctgacagcactgtcacaatgcgaatggccccaaatgccagtttcacgtggccacttacccaattccggtcactgatgtcgctgggagatggatggctaactaaatgatagccatccgatcctagccaatcggatgcgtgtgcttgaacacgggcagcggcggcatgcgtgaatcccagatgaacaggtagtagacagccagagtcaagcccatgccgctaacgccgcccatgtagagcaacagggtgagcaggcggaaggtcttagactcgaagaagtcattcgatttgggcatcgggatctcctcatccttggcctccttgactacatcggccagattggccatcagtgccgacggtccgctcattatgccgcttcttatttatttcgagaatgtgctgaatgacccaagcgatatggaaaaaggtggccaatcgcaaccgtaaccgcctcttcgaacgaactgaacacaattgagcaattgctccgactgtccgtggatctggtcttttggttgtgtttcttttgctgttcgtgcttcctcgattttcgcattccgctcgacggttttttgcggtttctttgggtttttggatggcgtggacacccaaagggatggggaggagcgggcgtggattcatcgtcttggcggccacgctaataagattcgccagttgcactttgagtatcccaaccgagcgcaacccattccaatcggatccgcatcacgtgctgcgttcttcgacgccgtcgacgaccacttgacccggttaggcgtcactcctccaatcctgattccgagaccacttcgctttattctttattctttccccttctatacgtttccctcctattctttccgttccgttcaaatgcagattctatattcatgtttggccagcgaaatgaaagtgacgatggtgatgggcagtgtgtctataagatataatcgaattgaaaatcttctagaatattttagttcattcatagtgatttttgactttcgaatagatttgaaaactattcgagttatttgattcatgaatcatatagacatgttattcgtcccttaaatggttccatttccaaattgtttttaaattgttttgtttgaaatatttgtaatatttccttcttttgtagcttgaaaataattgcatattcaagggtatctttcagtcgagatttcaacttggccatatttggcccacctttgctagcattcccaaatccaattagcagcagtctgccctccatctccaacccgccctgcctgcaattgtgaaggtactggtacttaccacccggctgggtcaagtggtcaaatggtcactggtactcgtgcaccttctgcactggatggccgccaatggagacgggaaacttgagatgaatgtccggcatgctggagtcgaagaacatgagatagtagagggccagcaccattcccaggccactgatcccgcccagatacagaa

SEQ ID NO: 4157 - DNA, 3123 bp, DROSOPHILA
ctcaattgtgttcagttcgttcgaagaggcggttacggttgcgattggccacctttttccatatcgcttgggtcattcagcacattctcgaaataaataagaagcggcataatgagcggaccgtcggcactgatggccaatctggccgatgtagtcaaggaggccaaggatgaggagatcccgatgcccaaatcgaatgacttcttcgagtctaagaccttccgcctgctcaccctgttgctctacatgggcggcgttagcggcatgggcttgactctggctgtctactacctgttcatctgggattcacgcatgccgccgctgcccgtgttcaagcacacgcatccgattggctaggatcggatggctatcatttagttagccatccatctcccagcgacatcagtgaccggaattggataaaattgtgatacccgagaaaatagccattcgcctcctgaactcatcggaagtgaccgcggagcagttctacaagcacatcctcgagcagtaccgcatcctcagccacatgcaacagcagcgccagcaactgctgcagcgccaacatctccaactgcagcagctggaggcaaacaatcgcttccaggaggtctttgccacggccaccatcattcaggcacatccgcatccccatccacatcccagggagccgcccaagaagccgcttttaggaccatatagcccgcaacccggcaacataagtcacgctatgggtggtgatcagttggatgcagaaacggagcagggtcacatgcctctaatcctggatacctcaccgccggtcgaagtaaccggaatgggtcacctgaagcggaagacacatcgcggtcactacaaacatcatagagcccgagccggtggtcaaaagaaactgtccattgccaattcgatggccagctccacgccgagcaccacagccggaggagatgcgtcaatggccactgcggccactttgccacatggttatatggacgctccactaaatccggcggcaggaaccattgtccaggcaccacaactgcagctatacacctcgatgcccattccactgatcctgagtcccagcgacgaaaagcgtccttcgcaccacgcccacggacatgtccatggcgagaggcggaacggggcgcaatccggcggccggcgaaggaccacgacggcatcggtttctggctacgaggcgcagacctacctcaatccgtttctcaccggcgagctgatcttcgagaagtaagggactgcacccagatcaggaaacgtcgcggttcattgtttttttttttttttttttttaatgcatgtagagggatatacactacagtcaagatcggaattggagattagctcatagaaatggtaactgcccaagaaacaaaaaaagaaatgactaacaaatgggcaataataccctcaataccttgtcatacctatttgaatggagaaataactcagttaagctcagtactggcataagcatggggaaaatatttcaattaatcagttcgagtagatatgttttccaaattgatagcgatattagacatttcatattgaaatttacaggtacaaatataatctcagttaatgcgtagaatgcgtttgcaattgaacaaatttaacgttttatagcaagaacttaggaacaaaagttgtactcgcttattctataataatgttaactaaagccaaagcaagtagatcggttgtataactcatttctgctatagataagtcttgacttgtatcagtactgagctataaattggtccatatatacgtagccaggcctggccacatatagaggttaataaacgttatgtactgcaaaaggatagttgaaaccatagctaaacgatagtcgatgtaccaaccacactccactccaatccaatccaatccaatccactcaaatcaattcaaaacaacacactcgtaagggacacacactcacgcataatacgggacccacttcagtagaaagtcacacgatatcagcgatcacggatcacgaattacggatcacggaatacgtatcacggatcacacaggcggctcacctcaccaagctcagcagcaaactcaccccacctaggacactgcttccaggcagctagcgaacgctacaccaactacaataattagccaaccctagagtaatcagtttaccagtaaacagtaaccagtaactagtaatcaattaccaattaccagtaacccatccaaggagtataccccccttgcaaacggggaagcggataaatgtcactagaattcagcatcatcagattgaatcacacacaatcctagtcgcctcacgcgaagagaactatgtcatgatcagatatcggtgtatgcattctatattatgtacttcgaaatatgtaatttattaagttttcgctatacttttcattcaaattggcaaaaaccaattcaaaggttttcaatattttcgaaaagcattttaggctttctatgtaacgtatgtttttcaaacaaaatattagtttttgaaactttattatcggataaacaaatgtaagccaaattacaacgtttatgatactccaaagattcgcactataaagcccacgaaagtggcctaaaaatagctgacgcattacccataggcgcttcgcttctcaagataaaacctggcgtgctcaactcaagaacaaatatgtggttatatacatatatacatatatggggcatataaccgatgtgtgacgtgacattggctcgttctattcacatacttaaacactaaatgcaaacctatcaaaaaccaactacactaagcgaaaaagcggcagagatagttaaggaaagtggtcaagagaggacgagagagagagagagagaaagtgaaagtgaaagggagagatagtaaaactgcatctgcatccaaagacacgagaattgaattcatcaataataacatacgtataaacgatatgcatacgatatagaattgaatctgtaactgatgggcatataccgcatatatatcttatataccgcatatatcttatatatgtataccaagaaaaacaaagtcattttggcaataataaagcatagcaaacaacaataaattaa

SEQ ID NO: 4158 - protein, 241 aa, DROSOPHILA
MQQQRQQLLQRQHLQLQQLEANNRFQEVFATATIIQAHPHPHPHPREPPKKPLLGPYSPQPGNISHAMGGDQLDAETEQGHMPLILDTSPPVEVTGMGHLKRKTHRGHYKHHRARAGGQKKLSIANSMASSTPSTTAGGDASMATAATLPHGYMDAPLNPAAGTIVQAPQLQLYTSMPIPLILSPSDEKRPSHHAHGHVHGERRNGAQSGGRRRTTTASVSGYEAQTYLNPFLTGELIFEK

SEQ ID NO: 4159 - DNA, 5617 bp, DROSOPHILA
tggtgcttggacacggcgaatccgataaggacaaagcacacaggtccgagcagtccgatggccttgtatgcgtcattgcggcactcgaatccgaggtatgccaccaccacagcgagcacaatcgccagcattacgccggacactatcctagaattggagaaaatggaaaataaggattaaagcatttagctttttagaagaatcttttggagcctcaaatacattgtggacaggagctaaagttcttaaccaatatatatatattgtattcgaatggataatctttacaggtcctgaacatctacaattttttgacttatggtactgctgttcaagtctgaagggagatcatctcaaaggatcttgtactcaccactggcgactaaacgcaatccatttgtcaatcactggttccaggtagttattatacagcttgatgcccacgaatggcttaaatacccagtagtacagccataggatataaaacaagatgaacaagacgatgagaaacccgtatccatgacaccagttaatttggcacaatagttttggcttaacctctggcactggcttctcagaagtttcttctgtgtcataatcatcatcatcatcatcttcggttgagttatctatcgattcggttgtggcttccgagcccctattgggccagcattctttggaatccttgtctgggtttttcctcataaacatttacattcgaactcaaaggggtaacttaccgtaaaagatgaaaatgattgtggctgccgtaaagtaagatatgaatatgatatggagcagcacatggagtaccagataggtgattcgctttgccctcgatggcggaggcttttcctcctgttcgccttctattggttctgccattgtgtgtataaatgagaaacagtgtgtagtgtaaagaagtgttgtgtggatcttatgacttatatcccacagccccttagtaaacaaataggtaaaaataatcctaaacatctttaataaataagaattgtattttgctaaatttgatcagctaattatcacgaactacaactttaaggaactaaaactgagtaacattctttcgacccaacttctcgaatatcctgttgtagttcgcccgctcgtcatcttcttgtataaggatgcctataataaagtaaaactagttaaaataataagaaatatttatgatcgtttatcgactgacctgcaaagctggcggatacgaaacagactatgctgcccaccacaaacgctcggaaagccactgctgtaatggtggagcgacgatgtggtgccatagcactgagggatccgataaggatgcccagggaactgggattggcaaagccgcagatggcgaatgtggcgattccagcgctgcgggcctacaaaaatcgacctcaaacgttagtttccagatgagctatgggtttcacaccatctacaacttacagtgatatcattattttcgatgtattgacccagacgctcataggccacaaactcattgataatggttttggtggccaccaccttggcgatgatatcgcaatcctcttttggcacccccatggcccagaccagcgggatgaacagcttagagaatatccactcgaagtcgatttgctcgagacccaccaggtaaccaaaccaactgaccagaccatttaggaaggcgatgaaggcgacgaaggcgactatgttagcgataatgcccagaacaatgggcacggcgttgctggcaccactggacgctgcgtccagcagcgaagagtcctgtctacaaggatgacagtgaactagttagacatttgggttaaactaggcgccttagaaatacgtacgatttttccagttcaattgaatcggatgaggtctggctctcctccgtttcgggcatgtaaagcttagagatggccagagtagcgggagctgccatcaccgaggaggtgatcaagtgcgcggccgatgcaccgaatgacaagtaggccgccaacacggttccggacacggtcgcaaatccggacaccatgatgctgtggatttcgctcttggtcagcttgttgatatacggccgaatgagcagcgggctctcggacatgccaaggaagatgttggctgcggccgtcacgctttcgcaaacagtggtgcccagaatctgctgcaggatccagcccagtttgatcaccacccactgcattgtacccatgtagtacaggatggagatgaagaagctgaagaagaagataaccggcaggatggcgaaggcgaacacattgttgttcaccaggaagtcgccgaacacgaactcggctccatcggtggcatagcccagaaacgtggccaccttgttgcccaagcactcgaagatttttcgtcccacctcccagcggatgcagaaaatgccgagcagaaactggcacgtgattcccgtgatgactatgcgccaattaatggctcttcgattcgtggagaaaacgtagccgcacaggatgaagaagcagggtgccaccagggacaccagtttttgggtctcgtcccggcactcgaagtacacaaagatggccaaaagggccaggagcaatgcgatgctggccaatgacacaactctgggaaaacgaagaggagtagttagaagatttaaacatatattttcttcataatagtttacctggttctgctgaagttgtgccatttctttgaaaatggtttgatatagttcctgtgcaggctgtgccccaccatcggcttaaagacatagtagtagaatagacccaaatagatgaatcccaggaggagcaggagcattccatagcccgtgcagaagttgatgccgcacaatgggttgtctttccaatagcactcatagttggctgtagataaataatggtatacttcttgctaattattttggcgatatacttacttatgtcgtgatagtggtaggttgcatatgagaagtaccccacaacacacagatgcagcagtacataaatcgagatcctcaccagtcgcgctacttttggattcttttcaaaatatccctttttatttgccacctcgctggtgtcatccagtggatgttccgtgaattcttccgagtcacggatgtccaactccttctatgacattttataatatttaatctggtttacaaagcttttttaattaaaaacctacatgatccagttcgtagccattgttaatagctccttttgatgattcggctgacatctataacaaaaaacaagagagaacgtttaagttaagtgtatcgactattatatacccggtacaacaaagcgagttgttgctttggcagcaaatttacttgctatattttgttaataagctttcagcttactcttaatacctttctaatggtccaatttgaacgagtcctatttttgataagcctatcacaacattatttagacgttaagcatgtgggcagactttagcgatatcggtgggcgtggcaacggcttaaaacaaacttgcatgcctaaagttgcctagagttctatatcgaacttcatgcggacggacggacggacaactgacggatccttatgaagaatatactatttatagggtcaaattctttctatatatattctatatatatcttatataccctaaacgaaactaatatacttagagaaaaactacgagtatgtggtattaatacccagcgacaagtaatttgccgcaatcataatctggcattatctctttcaaattattttagccctcgactcgagtgggcatatatgccaagtgtcgcacagcacaagataggtgtgtgttagctatctgaatcaaagtttggcaatttgaacgattcatgccactcaaaagcaagcgataggatccgcggattccaattttaaaatttgcacatgggccaggatttttgaattgggcacttagtttttcagagtcaatgactaaactccagcacgtggatggccactcaaataatttccgggcattaacttaagaggccaacaacgggactgggctgtaaactacagcacaggctataaataatccacttcaattctcattcctgataaattcgggctgtaaatcccattcaatatagtatagttcctcgttaggtggtctttcggttaggattttccattctgggtaatcgaaacagagttgatagcactatcagagtggcatttagccaaactcgtgaaagttaataaagcacttatatttaatagaccagctctgagaacatggttatatgtatattcagcctcgagaacacgtgttttttgccgattattgttttttctacaaaattgactaaaatcatacagagttcacattcaaaaacacgttttttatacgagtattcagtttgtattttaagtctatataatgatcgcaccttgaatttttggaacgacagttaattcacctttttactgtttgttttgcttcgtatctgatgagtactataggtttgttatggccgaaacgggtttttaacgtcgttattgtctgcccgaatacaaatgactgataaatgcatctgtttagccagactaaaaacgttggctaactgccattgtagctcgttgaaactcgcggcaagactaaattcggtttgctccgaacgggcctttttaatacaatcgctactacacggtatctgataagaaggtatcaggtttaggattcgcactgccttttttctatctaataatttatggtgtcttgataccatttggcctttttgatttacagaaatataagttgagagcaaagcttacctcaaattaacattaaagctcgtaagaaatttgtaatttctcgattttaatatttaatgaggctttttatttcatcatagcaatcaatgggtacttgagtacccagctaatactgtgtgataccgattggtaaggtgttaatttggtttaactacacagtgaaataattattaaataaatattagcttgattgtaccaactcaatttttacaaattgagttttaacttaaagtgcaatgccgcaaaatggatcactgatgaaaaagatcaatttaatatcaattaaaaaattataatataaaataaaaataataatttaataacatttgaaaacaggcagataatattagaatccacattggtttcaatcatcttatacttttcttattttaataaaaaaaaatttctttgaagatattataaataatatttattgagatatatcagtctaatattaagttaatgatgatcaattgccctattttcaagtaggttcgattgataatctttttaagttctttatacttatttttccctgtgcatcctaatacacttgcgatggcagtgtaccgctaaataggcaattgagatgacatgttgcctgttttatcagctggctgttaacaatgagatgttctcggcatgcgttctaggccgatattagtgccagataattttcagaagggccataaacccctcagcagattgaatgcgatagcgatgacgtttgaggaatctgatagctatattgcgatagaggaaggctaccgcgataccgagtcgtacacccgcccattgataaagacttctattgg

SEQ ID NO: 4160 - DNA, 2048 bp, DROSOPHILA
cgagtttcaacgagctacaatggcagttagccaacgtttttagtctggctaaacagatgcatttatcagtcatttgtattcgggcagacaataacgacgttaaaaacccgtttcggccataacaaacctatagtactcatcagatacgaagcaaaacaaacagtaaaaagatgtcagccgaatcatcaaaaggagctattaacaatggctacgaactggatcataaggagttggacatccgtgactcggaagaattcacggaacatccactggatgacaccagcgaggtggcaaataaaaagggatattttgaaaagaatccaaaagtagcgcgactggtgaggatctcgatttatgtactgctgcatctgtgtgttgtggggtacttctcatatgcaacctaccactatcacgacataaccaactatgagtgctattggaaagacaacccattgtgcggcatcaacttctgcacgggctatggaatgctcctgctcctcctgggattcatctatttgggtctattctactactatgtctttaagccgatggtggggcacagcctgcacaggaactatatcaaaccattttcaaagaaatggcacaacttcagcagaaccagagttgtgtcattggccagcatcgcattgctcctggcccttttggccatctttgtgtacttcgagtgccgggacgagacccaaaaactggtgtccctggtggcaccctgcttcttcatcctgtgcggctacgttttctccacgaatcgaagagccattaattggcgcatagtcatcacgggaatcacgtgccagtttctgctcggcattttctgcatccgctgggaggtgggacgaaaaatcttcgagtgcttgggcaacaaggtggccacgtttctgggctatgccaccgatggagccgagttcgtgttcggcgacttcctggtgaacaacaatgtgttcgccttcgccatcctgccggttatcttcttcttcagcttcttcatctccatcctgtactacatgggtacaatgcagtgggtggtgatcaaactgggctggatcctgcagcagattctgggcaccactgtttgcgaaagcgtgacggccgcagccaacatcttccttggcatgtccgagagcccgctgctcattcggccgtatatcaacaagctgaccaagagcgaaatccacagcatcatggtgtccggatttgcgaccgtgtccggaaccgtgttggcggcctacttgtcattcggtgcatcggccgcgcacttgatcacctcctcggtgatggcagctcccgctactctggccatctctaagctttacatgcccgaaacggaggagagccagacctcatccgattcaattgaactggaaaaatcacaggactcttcgctgctggacgcagcgtccagtggtgccagcaacgccgtgcccattgttctgggcattatcgctaacatagtcgccttcgtcgccttcatcgccttcctaaatggtctggtcagttggtttggttacctggtgggtctcgagcaaatcgacttcgagtggatattctctaagctgttcatcccgctggtctgggccatgggggtgccaaaagaggattgcgatatcatcgccaaggtggtggccaccaaaaccattatcaatgagtttgtggcctatgagcgtctgggtcaatacatcgaaaataatgatatcactgcccgcagcgctggaatcgccacattcgccatctgcggctttgccaatcccagttccctgggcatccttatcggatccctcagtgctatggcaccacatcgtcgctccaccattacagcagtggctttccgagcgtttgtggtgggcagcatagtctgtttcgtatccgccagctttgcaggcatccttatacaagaagatgacgagcgggcgaactacaacaggatattcgagaagttgggtcgaaagaatgttactcagttttagttccttaaagttgtagttcgtgataattagctgatcaaatttagcaaaatacaattcttatttatt

SEQ ID NO: 4161 - protein, 603 aa, DROSOPHILA
MSAESSKGAINNGYELDHKELDIRDSEEFTEHPLDDTSEVANKKGYFEKNPKVARLVRISIYVLLHLCVVGYFSYATYHYHDITNYECYWKDNPLCGINFCTGYGMLLLLLGFIYLGLFYYYVFKPMVGHSLHRNYIKPFSKKWHNFSRTRVVSLASIALLLALLAIFVYFECRDETQKLVSLVAPCFFILCGYVFSTNRRAINWRIVITGITCQFLLGIFCIRWEVGRKIFECLGNKVATFLGYATDGAEFVFGDFLVNNNVFAFAILPVIFFFSFFISILYYMGTMQWVVIKLGWILQQILGTTVCESVTAAANIFLGMSESPLLIRPYINKLTKSEIHSIMVSGFATVSGTVLAAYLSFGASAAHLITSSVMAAPATLAISKLYMPETEESQTSSDSIELEKSQDSSLLDAASSGASNAVPIVLGIIANIVAFVAFIAFLNGLVSWFGYLVGLEQIDFEWIFSKLFIPLVWAMGVPKEDCDIIAKVVATKTIINEFVAYERLGQYIENNDITARSAGIATFAICGFANPSSLGILIGSLSAMAPHRRSTITAVAFRAFVVGSIVCFVSASFAGILIQEDDERANYNRIFEKLGRKNVTQF

SEQ ID NO: 4162 - DNA, 4433 bp, DROSOPHILA
aaaccattaaatatgtatagtaaactcttattatcaaataatcccgactaggctatgtggtgaagaatgccctgcctcacgagagactccacctgagctcggggcagatagtgctggctgttcttcttcaggtggatcacctcgccgtcgtccagctcgaacttcccatagtcctccatgcagcgcacctcgatgtaaagtgacttgggcggacgcagattgttggttagatcaatgggcaagccctggttgtagcccgcactgcacatgtaggcagccagggacttggagtagttgttgaagaaggtgacctccggttcgcagagtgcctgcttgatgtccccggggataatgggtccaaactcccacctgagggccttgatcctcctgcaccgctcgtataggtaggccagcaggcacctcttgttcctctggagagctgcgtgcctgaagttgagcaggggccacagactgcgatccccggaagcattgtagctggaggcctgggccacgttctcctcgaatatcgccttgatctcctccagcacctggcgcaccccatcgtcgtcgaaggcgggaattgtctgcgacgatctctccagttcttttagcaggtcgaaggctttctcgccgaacatttttgtttgtcggctcattgttgatcctctctgtttttctttggtttggggatctagtgatggattcgcgccaaaatgttcgtcgacttgtggtatcgatacttggtatttcttttggtatatttcaaaaaataacaaaaatttcatcctcagtagccatgttcctttaaaatagatttgaaacggtgatttatcaaaatttagcttacgaggcccaaattatgccgtcctaagaggaaatgccatcctggttagattggtgcaactgcgggagtggagtaccacatgcaagtaagtgggtgtgaacatcttaaagtatcgaatatattagctattcgctattcggctatttagccaactggtccatccctatcacacacgtagtggcaaagagttggcccaaaaatcagatgaactgcaatttgtgtgttaaatcaataaagaacgagtaacctcctgattgtgtggctgattttggtgctgtgcgtgtgtgacagcggtgatagcgacagtgaatccccgattacaggaagtgagcagagaaagaggaagcagcactggctatagctattaacccttatcccatttttaacccttagtcttcgaagtgggccagccaccgcccccggaaatcatggacagcagggaggagaacgccgtgtacgatgacatgaacctgtacatcgcaccgcagagcttcatcatcgagccgaatggaggagatgagttgctggtcatcgggcgccacgacaaagtcaccagggttcagccagcgagcggaggtcttgtggccaaccttcgccccaccaggaggatttgtggtgtgctgggaaccattcacctactgagctgcgactaccttctggtggcgacccaccgcctcttcgtgggcgtgctcaatggcgcagttgtgtggagattagcgggctatgacatcataccttacattccgaattccttccagcgcaaggagaacgaaaactacttgcgactgctacgccagacacttgacaccaagttcttttacttctcctaccgctacgaccttaccaattcgctgcagcgacagcgggaggtggcacaatcgcggcctgaagtatccgggttgctccagcgcgctgagcagcgattcgtttggaatggctatgtgctgcggcagttcaactgcgataagatggagaagttccagctgccactcgtcctgggcttcgtgtctatcaaccaggtgcagatcaacgggcagacattcttctggagcatcatcaccaggcgttccgtgcagcgggcgggcacacggctcttctgccgaggcagcgacgagcagggccatgttgcgaacttcgtagagaccgagcaaatagtggagttcaacgggcagctgactggattcgtgcagacacgaggcagcatgcccttccactggcaccagctgcccaatttgcgctataagccacgacccgttctggtgccgggcaaggatcatttggccgcctgcgggctccactttaaggaacagatccggctgtatggcaacaatgtggctgtgaatctagtggatcacaaaggtgccgaaggcgagctcgaggcgacctatgcccgcctggttcgagaaatgggaaatccacaagtgcgatacgagtctttcgacttccacagcgagtgccgtaagatgcgctgggaccggctgaacatactcatcgatcgcctcgcccatgagcaggatcagttcggtgtctatcatgtcttcgacgacggcaaattggtgtccacgcagactggtgtcttccgaacgaattgtatcgactgtctcgataggacgaacgtcgtgcagagcatgctggcccgcaggtccctcactgcggtgctccagaagctgggagtgcttcatgtgggccagaaagtggaacatgcctccgacattttcgagagcattttcaagggcgtgtgggcggacaacgcggatctggtgtcgctacaatattccggaacgtgtgcgctcaagaccgacttcaccaggacgggcaagaggaccaagtctggtgccatgcaggacggcaagaactcgctgatgcgctactatctgaacaacttcgccgatggccagcggcaagacagcatcgatcttttccttggaaagtatctggtcaacgacaacgagggcggtgccgtgccatcgccgctggagtcgaagcatggctggcggttcttcaccttcccctcggtgctgcttgtggctgtggccatgttcatgatcacgatgacctatccggccgagtttaacacggagaacctgctgttcatgctcttctggggcgcaatgatcgctgtcagtgccacgggcatcctgcactacggcgtcgagttcgtgcagtggccgcggctttttccgcccatctcctttcgagacccatgacgttagtgtcgtctagcagagtcactgggaactacctctgcagctaaactgtcccattgctccgagaaagaacaattgtaaaccaattctgtaatcgattcgacttcctctcaatttctgttttgttttattctgtttttgtttagtcttaaagccccccccagtccattcccttctgcaacttgttagtcattatatacacagatcacttacacttaggcgagcttcaggcggctggaaaaggggaatgattggggtttcgatcgggaagaagtggagttgtgaaggcgccgcttattaactgcgattaactgcaatgtagatcaatcacttttgtagaaccatttaatgacattaaataaagtattttacgcattgctagaaaacctcagaccggcgtctttctatctacttgtggaggtgaaatgtaattaatgatatgggtatatggcgtttatgacaaccataaaagatggccagtaaaggttaagagtacaggttacccagagggtgttaatcatataaagaatgtcattgttgatattttagtaggaatgcagagctcttagctttttatttatatattttgaatcgtaggcaggccttttacattcagtcgcatagatccatttcgaaaatcagtctttccttttcggcacgtcgtcaaaatctgaattcaaaattcaacatatttatttttcgtcaaaattaggtttcagtgactgaaaatttctaaaaacgttttcaacacataacaaattctttggtatagtaattttgtcaaatttctagtttttaagcttttatatgagaatggacaagtcggagaaacgctctaatcttgctgataacttcctgtatatgttggagttcatggtggacgatctgctgatcactcgtcccaacctctgcgctccggaggagtatcccacttgcacggagatcacgttccgttcggttttcctgaacatccgcgatcgggagaacggaagctgtgtcaacccctgttcgcccaagtgcggcaagtgcaccctcttcacgctggaatcgccgatcacggacgaggacgtgatgcacattcacgtttacaagaagcgcacggagagctgcaagttcctgctcgggctgaccgagctgccgatgaagccgatcttcgatagggtgaagaaggagttctattcacagaacataaactgggagagtaacgtcgagtcccatttgtcgcgaatgcccaagctgaggggcccctgcaagaaggccaatgactgtgtgtgctacgagaggaatagggagcggcgcgaacagtggtgtcccacctcagagctgaccaagcggatgctgccgctcttcaacctctgcaaaatgcagacgggcaatatagt

SEQ ID NO: 4163 - DNA, 2366 bp, DROSOPHILA
tccatccctatcacacacgtagtggcaaagagttggcccaaaaatcagatgaactgcaatttgtgtgttaaatcaataaagaacgagtaacctcctgattgtgtggctgattttggtgctgtgcgtgtgtgacagcggtgatagcgacagtgaatccccgattacaggaatcttcgaagtgggccagccaccgcccccggaaatcatggacagcagggaggagaacgccgtgtacgatgacatgaacctgtacatcgcaccgcagagcttcatcatcgagccgaatggaggagatgagttgctggtcatcgggcgccacgacaaagtcaccagggttcagccagcgagcggaggtcttgtggccaaccttcgccccaccaggaggatttgtggtgtgctgggaaccattcacctactgagctgcgactaccttctggtggcgacccaccgcctcttcgtgggcgtgctcaatggcgcagttgtgtggagattagcgggctatgacatcataccttacattccgaattccttccagcgcaaggagaacgaaaactacttgcgactgctacgccagacacttgacaccaagttcttttacttctcctaccgctacgaccttaccaattcgctgcagcgacagcgggaggtggcacaatcgcggcctgaagtatccgggttgctccagcgcgctgagcagcgattcgtttggaatggctatgtgctgcggcagttcaactgcgataagatggagaagttccagctgccactcgtcctgggcttcgtgtctatcaaccaggtgcagatcaacgggcagacattcttctggagcatcatcaccaggcgttccgtgcagcgggcgggcacacggctcttctgccgaggcagcgacgagcagggccatgttgcgaacttcgtagagaccgagcaaatagtggagttcaacgggcagctgactggattcgtgcagacacgaggcagcatgcccttccactggcaccagctgcccaatttgcgctataagccacgacccgttctggtgccgggcaaggatcatttggccgcctgcgggctccactttaaggaacagatccggctgtatggcaacaatgtggctgtgaatctagtggatcacaaaggtgccgaaggcgagctcgaggcgacctatgcccgcctggttcgagaaatgggaaatccacaagtgcgatacgagtctttcgacttccacagcgagtgccgtaagatgcgctgggaccggctgaacatactcatcgatcgcctcgcccatgagcaggatcagttcggtgtctatcatgtcttcgacgacggcaaattggtgtccacgcagactggtgtcttccgaacgaattgtatcgactgtctcgataggacgaacgtcgtgcagagcatgctggcccgcaggtccctcactgcggtgctccagaagctgggagtgcttcatgtgggccagaaagtggaacatgcctccgacattttcgagagcattttcaagggcgtgtgggcggacaacgcggatctggtgtcgctacaatattccggaacgtgtgcgctcaagaccgacttcaccaggacgggcaagaggaccaagtctggtgccatgcaggacggcaagaactcgctgatgcgctactatctgaacaacttcgccgatggccagcggcaagacagcatcgatcttttccttggaaagtatctggtcaacgacaacgagggcggtgccgtgccatcgccgctggagtcgaagcatggctggcggttcttcaccttcccctcggtgctgcttgtggctgtggccatgttcatgatcacgatgacctatccggccgagtttaacacggagaacctgctgttcatgctcttctggggcgcaatgatcgctgtcagtgccacgggcatcctgcactacggcgtcgagttcgtgcagtggccgcggctttttccgcccatctcctttcgagacccatgacgttagtgtcgtctagcagagtcactgggaactacctctgcagctaaactgtcccattgctccgagaaagaacaattgtaaaccaattctgtaatcgattcgacttcctctcaatttctgttttgttttattctgtttttgtttagtcttaaagccccccccagtccattcccttctgcaacttgttagtcattatatacacagatcacttacacttaggcgagcttcaggcggctggaaaaggggaatgattggggtttcgatcgggaagaagtggagttgtgaaggcgccgcttattaactgcgattaactgcaatgtagatcaatcacttttgtagaaccatttaatgacattaaataaagtattttacgcattgctag

SEQ ID NO: 4164 - protein, 592 aa, DROSOPHILA
MDSREENAVYDDMNLYIAPQSFIIEPNGGDELLVIGRHDKVTRVQPASGGLVANLRPTRRICGVLGTIHLLSCDYLLVATHRLFVGVLNGAVVWRLAGYDIIPYIPNSFQRKENENYLRLLRQTLDTKFFYFSYRYDLTNSLQRQREVAQSRPEVSGLLQRAEQRFVWNGYVLRQFNCDKMEKFQLPLVLGFVSINQVQINGQTFFWSIITRRSVQRAGTRLFCRGSDEQGHVANFVETEQIVEFNGQLTGFVQTRGSMPFHWHQLPNLRYKPRPVLVPGKDHLAACGLHFKEQIRLYGNNVAVNLVDHKGAEGELEATYARLVREMGNPQVRYESFDFHSECRKMRWDRLNILIDRLAHEQDQFGVYHVFDDGKLVSTQTGVFRTNCIDCLDRTNVVQSMLARRSLTAVLQKLGVLHVGQKVEHASDIFESIFKGVWADNADLVSLQYSGTCALKTDFTRTGKRTKSGAMQDGKNSLMRYYLNNFADGQRQDSIDLFLGKYLVNDNEGGAVPSPLESKHGWRFFTFPSVLLVAVAMFMITMTYPAEFNTENLLFMLFWGAMIAVSATGILHYGVEFVQWPRLFPPISFRDP

SEQ ID NO: 4165 - DNA, 3905 bp, DROSOPHILA
taatcattacccaatactttcagctcctcgcgctgctcgcattgtgatgcaggcgaaacgcatcaagaacaatgtccacccggattttgctcggctcttcggcacatgcgtgacgagtatctggggctaccgcagactgatgcatcaggtggaacagctgcgggcggagaaatacgactcggataacctcgaccacgagcaaaagctgttgcgattgtggcaactgctgatgccagacactcccctcaccggtcgcgtgaccaaacagtggcaggacatcggcttccagggcgacgatccgaagacggactttcggggaatgggcatgctcgggctagagaaccttctctactttgcaactgcctataacgacgccgccaaacatgtcctgctgcactcgatgcatcccaccctgggttacacctacgccattgtcggcattaacctcacctccatggccttcaatctagtgaaaacgggcgccgccaaaacccacttctacaatttggtggtgcagcacagacaggactttagcaccgtggaggatttccacaagttgtactgctatctgttcttcgagtttgaccgcttttggatggagagcgacccacgaaacattatggacttccgcgagatttaccagtcatttgaaattacaaaactagaggccttgcacaatgatagcactatttttaagaccaatttggttgtagaatccgtctaaaaacacgaataggtcaattaatgtgaaaatgaatttgtatctcgctgtatctgaataatttctaactctgacgatattgggaattgattgaatcagatcaggctgaccatttttgtaaatacatgtttagagtggggctaaataaaataattatcttgtcatttttcaatttaaattatcaattcatttcgcttctaaatcactttgtaataaaaaaaaaaggaatcctaaaataagtatccaaatacgacaagcccttttaatttttgtataaatgcagattttatgcgtttatttgagagccatatataatgtatatttgtatatgtattcatatatatttgaatgcaagtatgtaaatcgttaaactaagcctggaatgtcacacaataatactttaaattcaagtcggagattgcccactgagacagaataaataataatttaaatatcacgcaaaagcataaaaactaaacgaaataaaatcagtagagattgcacaagaaaatattttgacgactaaagcctatttggtaatgccataagaatgctcaagtcaaatcccgatgctcaatagagcttgcaagctagtttttggagtatccatatagatagtattcgttggtctagcgatagaacttgacttccgcctcgacacagtccttgagcagttcgtccagctcgtcactggcgtgatcctgcagagagaaatagttatttagctcgtccacgcaggagagctccaagctgcgcaagtgctccaaggcggccggcttgcgttgcgagtgtagcttgtgcagcaacgtcaagtccgcttccgcttgcacttgggttagcggcgagatcctcggatttggggcaaaaacgaacggcttaaacacagactcggcggcattgggcgtcccggtgaaccaatggcatgagattcccttcaccgacagcaccgaaacggtagccgccctcgagctgctcgcattactggcggatcgcagcgtctcgaacatgtcgtgctgggtatatgttccatcgccagctggcttgggaccacaccaatccactgccggggcctgggcctctgcatcgtgagcagcggcaaaactggcagcgtcatctaatccctcgcttgacttgttcaccacagtggtcacagccagtcctccggagggcaaacgcaagaagctggcctccaatttctcagcggcccataccttgccagagcaactcacaagccaggcagcagctgcatcgcaagcgatgaagtttagtttggagttgtcgtgaccgtgactggccaccaaagctccaatccggtctacagcatcgtccacatctttggcgacagccaaagtcaagctacaaaaaagttattagatgatttattatttcatgatttataataattgtaaaagccttagtttctcgacaacattaaatttctgattgattcgtttttaattaacttatgaaataatgttgaaataatagtatcttcaagcattaataagccctaaaggacacgaaaggattggaatgctaattacaaacatcagccacaaaatgtcatcctttgaataagtatttacgttctgcattatatagacttcatatgtacatacatttttagtgatgaaagttatttatattaagtgcaaataatttgctttgttgtgcatagtttgttgatacgcagatattgaaagagaacttaccgcactatatccgtgcccagcaggctgtcgctgtccttggcctcgttttcacctgccgcccaggtaagacctagggccactccgcgttcattggccccgaagtccccaccccagagacccggctgcggtttttgcaatataacacgcaacatatcgccgcctgtctcggcagaagctccaccgtcagtctgaaatgtgaggtgtttgggtggtgagtcattgatcgagcttcgttttcggaggagtctgtctttaccttcccctcaagcacttcggtggcatcgtagaagcaaacctccgaagcaacgttgacgtttttttcgtcctccgcattgcgaccgatgatcaaagttccttcggcacagttctcgggcagaacaacaaagcagtcaccgttggtcatttttatccgtgcttttctcgcgaagaagtttcttcagaagtgcgcgagggagttgcaaaattgatttttcccacagctgtttaaggttcaaacgttattcaacactgcccaatatatatcgtggaaatgaaccgtggcgatgagccgttgactcgtctggcaacatcggacgttatttatttgtttagtatggagaattctaaaagaactataaggattaggtattttagtgttctatatataaaatatttccttatacatctccattatttaaatgacgagcattaatgttgacaatactatgatccaacaccaataagaattcgatttacttaaattacaaccttcatttacaccataattagcagcattgaataagagagggaagttataatgaatatcgggttttcctttgaatctggaaaaatgcagacaagtcgcatcccatctctaagcattttacccttctctgataaagtacccatcgctagaaatctgcccattcgtctggtaaccgaggtttttcttgtttcggcgttaaaatgctcaaaaacctgtctgcatagaaggaaaacgcggaacgtctcggaattgcaagcttttcgcgatattcgggcaattggaaaaaccgcgcatccagcaaaattgtatccactaagctgcatttgtatacagagcaggtggtgttgtctccctctcgcgcccgcactgctcgctcccgatgtgcgagcgaaacaacaacaaacaagttacaaggtgtgtggagtggtgtgtgctgctggtgttgttgtagctgtagttgtaaatactcgcgcacacagtgttgttgttgcgctggtggatggtgttgttcagcgccttttttgagtgttgattattttacttgcgtgcgtttgctactcgtgggcggctgtgaagactgtgagacgcggaaaagtgctgagaaaagccacgaaaagctagataaacgctaacccacagctgcgggctggaaaccatttatttaaagtgccaaattgggtaaagaaatttagaaaatcaatattctgtgagggtgctagcggccaat

SEQ ID NO: 4166 - DNA, 1481 bp, DROSOPHILA
aaaaatcaattttgcaactccctcgcgcacttctgaagaaacttcttcgcgagaaaagcacggataaaaatgaccaacggtgactgctttgttgttctgcccgagaactgtgccgaaggaactttgatcatcggtcgcaatgcggaggacgaaaaaaacgtcaacgttgcttcggaggtttgcttctacgatgccaccgaagtgcttgaggggaagactgacggtggagcttctgccgagacaggcggcgatatgttgcgtgttatattgcaaaaaccgcagccgggtctctggggtggggacttcggggccaatgaacgcggagtggccctaggtcttacctgggcggcaggtgaaaacgaggccaaggacagcgacagcctgctgggcacggatatagtgcgcttgactttggctgtcgccaaagatgtggacgatgctgtagaccggattggagctttggtggccagtcacggtcacgacaactccaaactaaacttcatcgcttgcgatgcagctgctgcctggcttgtgagttgctctggcaaggtatgggccgctgagaaattggaggccagcttcttgcgtttgccctccggaggactggctgtgaccactgtggtgaacaagtcaagcgagggattagatgacgctgccagttttgccgctgctcacgatgcagaggcccaggccccggcagtggattggtgtggtcccaagccagctggcgatggaacatatacccagcacgacatgttcgagacgctgcgatccgccagtaatgcgagcagctcgagggcggctaccgtttcggtgctgtcggtgaagggaatctcatgccattggttcaccgggacgcccaatgccgccgagtctgtgtttaagccgttcgtttttgccccaaatccgaggatctcgccgctaacccaagtgcaagcggaagcggacttgacgttgctgcacaagctacactcgcaacgcaagccggccgccttggagcacttgcgcagcttggagctctcctgcgtggacgagctaaataactatttctctctgcaggatcacgccagtgacgagctggacgaactgctcaaggactgtgtcgaggcggaagtcaagttctatcgctagaccaacgaatactatctatatggatactccaaaaactagcttgcaagctctattgagcatcgggatttgacttgagcattcttatggcattaccaaataggctttagtcgtcaaaatattttcttgtgcaatctctactgattttatttcgtttagtttttatgcttttgcgtgatatttaaattattatttattctgtctcagtgggcaatctccgacttgaatttaaagtattattgtgtgacattccaggcttagtttaacgatttacatacttgcattcaaatatatatgaatacatatacaaatatacattatatatggctctcaaataaacgcataaaatctgc

SEQ ID NO: 4167 - protein, 353 aa, DROSOPHILA
MTNGDCFVVLPENCAEGTLIIGRNAEDEKNVNVASEVCFYDATEVLEGKTDGGASAETGGDMLRVILQKPQPGLWGGDFGANERGVALGLTWAAGENEAKDSDSLLGTDIVRLTLAVAKDVDDAVDRIGALVASHGHDNSKLNFIACDAAAAWLVSCSGKVWAAEKLEASFLRLPSGGLAVTTVVNKSSEGLDDAASFAAAHDAEAQAPAVDWCGPKPAGDGTYTQHDMFETLRSASNASSSRAATVSVLSVKGISCHWFTGTPNAAESVFKPFVFAPNPRISPLTQVQAEADLTLLHKLHSQRKPAALEHLRSLELSCVDELNNYFSLQDHASDELDELLKDCVEAEVKFYR

SEQ ID NO: 4168 - DNA, 3074 bp, DROSOPHILA
aggacggcaagaactcgctgatgcgctactatctgaacaacttcgccgatggccagcggcaagacagcatcgatcttttccttggaaagtatctggtcaacgacaacgagggcggtgccgtgccatcgccgctggagtcgaagcatggctggcggttcttcaccttcccctcggtgctgcttgtggctgtggccatgttcatgatcacgatgacctatccggccgagtttaacacggagaacctgctgttcatgctcttctggggcgcaatgatcgctgtcagtgccacgggcatcctgcactacggcgtcgagttcgtgcagtggccgcggctttttccgcccatctcctttcgagacccatgacgttagtgtcgtctagcagagtcactgggaactacctctgcagctaaactgtcccattgctccgagaaagaacaattgtaaaccaattctgtaatcgattcgacttcctctcaatttctgttttgttttattctgtttttgtttagtcttaaagccccccccagtccattcccttctgcaacttgttagtcattatatacacagatcacttacacttaggcgagcttcaggcggctggaaaaggggaatgattggggtttcgatcgggaagaagtggagttgtgaaggcgccgcttattaactgcgattaactgcaatgtagatcaatcacttttgtagaaccatttaatgacattaaataaagtattttacgcattgctagaaaacctcagaccggcgtctttctatctacttgtggaggtgaaatgtaattaatgatatgggtatatggcgtttatgacaaccataaaagatggccagtaaaggttaagagtacaggttacccagagggtgttaatcatataaagaatgtcattgttgatattttagtaggaatgcagagctcttagctttttatttatatattttgaatcgtaggcaggccttttacattcagtcgcatagatccatttcgaaaatcagtctttccttttcggcacgtcgtcaaaatctgaattcaaaattcaacatatttatttttcgtcaaaattaggtttcagtgactgaaaatttctaaaaacgttttcaacacataacaaattctttggtatagtaattttgtcaaatttctagtttttaagcttttatatgagaatggacaagtcggagaaacgctctaatcttgctgataacttcctgtatatgttggagttcatggtggacgatctgctgatcactcgtcccaacctctgcgctccggaggagtatcccacttgcacggagatcacgttccgttcggttttcctgaacatccgcgatcgggagaacggaagctgtgtcaacccctgttcgcccaagtgcggcaagtgcaccctcttcacgctggaatcgccgatcacggacgaggacgtgatgcacattcacgtttacaagaagcgcacggagagctgcaagttcctgctcgggctgaccgagctgccgatgaagccgatcttcgatagggtgaagaaggagttctattcacagaacataaactgggagagtaacgtcgagtcccatttgtcgcgaatgcccaagctgaggggcccctgcaagaaggccaatgactgtgtgtgctacgagaggaatagggagcggcgcgaacagtggtgtcccacctcagagctgaccaagcggatgctgccgctcttcaacctctgcaaaatgcagacgggcaatatagtgctgatcctgagactggtgtgcaatgggccctctgtggtatcctccttccccgtccagagaccagtgtgcaaggatccctgcaactgttgctgtccttgcccgcccacttggcctgctccctgttcgtcgccattcgatccctgcgatccttgcaagaccgtgccagccaagaagacatgagtaggaaatgcagctgcgagcctttatattccgtactcatttagttgccataagcatttttattgtttgacaagggatgcgcctagcaactgataatcattcgcatatcttaactataaataaagtatttgaataatttttataccaattctggtgtttcagtgacttgaggaggctattgtccattataatataatttaatattaaaatttatatatatgttagaaataagaccttactaggcattttaggcgtaataaaatctacatacagacagactcatctgcctaaaagacaatcttaatatcgaaaatcaaggaatcaagttttcaaaattcatccgattccagtagccctcgcaaatccagtcggtttagcagttcgaacaccacagtctccccgtctggacggccattcaaaatcagaatctaaattcaaatttactcacaaaatttttggaagtgcgagtgttcgggcatataaatttctagtttcgacaaaacaaaagcctagccaaaattatttcctttgaaaatggacaagtctgataaaactgagaaaactgagaaatccgataagtctgagaagccagagaaacctcccaagattgcaggaaacttcctctacatgttcgagttcgtagtggacgatctgctgatcacacgccagaatctttgcgctccggaggagtatccaacctgcacagagatcacgttccgctcgtcggtttacgtgaatctctgcgatcgggaggtgggcacgtgtgttaacccctgttcgcccaagtgcggcaagtgcgccctcttcactctggactcccccattacggacaaggatgtgctgcaggtgcatgtctataagaagcgcacggagagctgcaagttcctgataggactgtcggagctaaaggtgaagcccatcttcgacagggtgaaggagtcctttgacatcgagaatcctgactgggaagacgccatgctggggcacatcgcccagctgcccaagatgaagggtcccaccagcaagggcctcctggacaactgtgcctgctacgagaagctgaacgaacgtcacgagcagtggtgtcccacatcggagttgtccaagcgactgctgcccctcttcaatctctgcaagatgcagact

SEQ ID NO: 4169 - DNA, 1074 bp, DROSOPHILA
aaatcagtctttccttttcggcacgtcgtcaaaatctgaattcaaaattcaacatatttatttttcgtcaaaattaggtttcagtgactgaaaatttctaaaaacgttttcaacacataacaaattctttggtatagtaattttgtcaaatttctagtttttaagcttttatatgagaatggacaagtcggagaaacgctctaatcttgctgataacttcctgtatatgttggagttcatggtggacgatctgctgatcactcgtcccaacctctgcgctccggaggagtatcccacttgcacggagatcacgttccgttcggttttcctgaacatccgcgatcgggagaacggaagctgtgtcaacccctgttcgcccaagtgcggcaagtgcaccctcttcacgctggaatcgccgatcacggacgaggacgtgatgcacattcacgtttacaagaagcgcacggagagctgcaagttcctgctcgggctgaccgagctgccgatgaagccgatcttcgatagggtgaagaaggagttctattcacagaacataaactgggagagtaacgtcgagtcccatttgtcgcgaatgcccaagctgaggggcccctgcaagaaggccaatgactgtgtgtgctacgagaggaatagggagcggcgcgaacagtggtgtcccacctcagagctgaccaagcggatgctgccgctcttcaacctctgcaaaatgcagacgggcaatatagtgctgatcctgagactggtgtgcaatgggccctctgtggtatcctccttccccgtccagagaccagtgtgcaaggatccctgcaactgttgctgtccttgcccgcccacttggcctgctccctgttcgtcgccattcgatccctgcgatccttgcaagaccgtgccagccaagaagacatgagtaggaaatgcagctgcgagcctttatattccgtactcatttagttgccataagcatttttattgtttgacaagggatgcgcctagcaactgataatcattcgcatatcttaactataaataaagtatttgaataatttttatacc

SEQ ID NO: 4170 - protein, 249 aa, DROSOPHILA
MDKSEKRSNLADNFLYMLEFMVDDLLITRPNLCAPEEYPTCTEITFRSVFLNIRDRENGSCVNPCSPKCGKCTLFTLESPITDEDVMHIHVYKKRTESCKFLLGLTELPMKPIFDRVKKEFYSQNINWESNVESHLSRMPKLRGPCKKANDCVCYERNRERREQWCPTSELTKRMLPLFNLCKMQTGNIVLILRLVCNGPSVVSSFPVQRPVCKDPCNCCCPCPPTWPAPCSSPFDPCDPCKTVPAKKT

SEQ ID NO: 4171 - DNA, 3514 bp, DROSOPHILA
ggataccacttggcccgcacgttctcgaacgatgccggattcaccagcgagaagcagatgaggaagacatcggtctggggataagacagtggcctcagtcggtcgtagtcctcctgcccggccgtatcccacaggcccaggttgatgggcttggcgtccaccatcacgttggccgagtagttgtcgaacacggtgggtatgtactcgccgggaaaggcattggtcgtgtagctgatcagcaggcaggtctttcccacggctccgtcgcccacgacgacgcacttgatcgcctgcatggttcgatttcctcgactttctggactggagtgctatgtgcctagagattggagattgaagattgcagatttctgattgcgggggtgcttcttcttcaggcgtttttggttctttttggggcggcggcggaggactgttgcttgcgtgggtccttttgcggggttatctctggaagcgcgactccttttccagtgccttgtggtcctcggggcgactgatgatcgcgccttacgttctgggcctctttaactcgcgttttgtgcgttaatttccctaattttctcaacaaaaaaagtaaattttctgtgtactgcagtgtgaccgcggctggactgttcaaatttaccatgggaaagctgtaaaatactaaaacaaattaaaactgcattgaaatggtcaccctaagatttgtaaattatttcaaggcttcgtccttaaagcaaacataaaacccttaagtttcgcatttacttataattaaatccgaattacaaaatatataatttcattgtcttcctgtttatgtcagtgatttgaagtgagaacaagctgtttttagtagggctgggccccagaagtgcagcttctgggctttggctgcacctggtcacacttctggcagcaaataatacaatttcgaaaattagaatttatttgctgctcaatagccaagtcaataacacctgttccttgcccatccagaatgtctgacgtgttcatcgtgtccgccgcccgcacgcccattggtaaaaccaagataaatcggctgcaccatacacgataaccacattctaattggaaactttctcttcgtgtttgtccaatctgaaaaatcaacaggtagcttcaatggaacgctttctaaactgaaggcctccgacctgggcagcgtggtcatccaggaggtactccggcgggcgaatgtggagggccaggaggtcaacgaagtcatcttgggccaggtgggacccatatcataactgtttctcctcctatcttaccgatctatttgttatgtaaatatctttgttaggctctaagcgccggtcagggtcagaatccagcacgtcaggcttcactcaaggcgggtctgcccattcaggtgccagcctacggcataaacatgctatgtggttccggcttaaagtgagtttgtcccgtacaattccgtacatttacaatggtttttaccatttccagaactgtagcgctgggttaccaggccatccgctcgggagacgcacagattgttgtggcaggaggtcaggagagcatgtccctggctccacacgtcatgcatctgcggcagggcgtcaaaatgggtccgggcactatggtggactcgatgatccacgacggcctaaccgatgccatggagaacatacacatgggcatcactgccgagaatctggccgataagtataacatcagtcgtgaggcccaggatgcctatgccgtgctgtcgcaaaatcgagccgaggaggcccaaaaaaagggttacttcgacaaggagattgtgcccgtggagatcaaggatcgcaagggtacgaccacattcagcaaggatgagtacatcaaggcgggcagcaccgtcgagggtatacagaagctcagggcagccttcaaagaggtgggtctaagataaatacaagaagagcgagagttaacccactttctcttgcttatgtagggcggctctataaccgctggcaatgcctcaggcgtcaacgactccgctgctgccgtactactgatgtccggcgaggaggtggccaggaagggtcttaagccgctggctaggattgtgggctggactcagagtggcattgagccaaaggtgatgggactgggaccagtcacagctgtggaagcattggtagttacacggaaattccacttctatacatgctcctaagttttcacatttttcagcttcaaaagattaactggaagcgtgaggaagtggatctttacgagctgaacgaagcattcgccgcccaatcactggctgtcctgcaggacctgcagctggatgctcagaaagtaaatgtcaatggcggtgccattgccctgggccacccgattggagcttcaggtgcccgtgtcttggtcactttgctctatgcgctggagcgcaccggtggaagaaagggaatcgcatcgctctgcatcggtggcggcatgggaatcgccctggccgtggagcgcctcagctagtcttaattcattgtcattcaagctatttattgccttttcctgtttcccacttaagtgtaaagtttatttctctattcgcgtagtattcgcacgtacttaaaggcacaacctcccaagtcgcaaaatctactcaattaaaattcaattgaaaatacttgcattgcagcatatttttagctgttgaaaagaggaattgtatacatttttccagttgcgtcagctgaaaactatttataaaacagcatttgttatgatgatgcacaaccgatttatttgcttttgtttctgtttctacactagaaattatttgtacattgtaaattcaattagctattaactgcaagtcggagagaacagtattgggtcgattccttgctattttaaaataagtaagggcattgcatcattataaaataggtaggctgacaaaactagtaactatccaaatgtaaacttatacatttaattgagctaacgcttgagttaaatagcattgcttgagaacaagacaccctcttttccgctcattgtcacatgtatcatttcatatgtagactccgagctctccgagtacttttccagtaccagtaacaggtaacttgtttagatcttcagcataagcatcgcggtcatcgaaggtcccactgcccaaagatcgaaaaaataaatatagtatttacagagacactactggcgatttataaacactcttcgtaatttcttatcgtggaagttagttatttattgtgccaataacaataatatcgggcatagttgtggcctttggaataagaccacgaatctcgcatttcgcaaaggggagagcccaaaatataatacagtaaacatattacaaaagtactagctattgctgacatgaatttgttaaggggaactaaactagttgtaagtctagtgtggaaaatcttattgctatggcgtacactgtagaggctaaattgaataattcagaatctcgcgtttttattgctattatcaa

SEQ ID NO: 4172 - DNA, 1071 bp, DROSOPHILA
atgtctgacgtgttcatcgtgtccgccgcccgcacgcccattggtagcttcaatggaacgctttctaaactgaaggcctccgacctgggcagcgtggtcatccaggaggtactccggcgggcgaatgtggagggccaggaggtcaacgaagtcatcttgggccaggtgccagcctacggcataaacatgctatgtggttccggcttaaaaactgtagcgctgggttaccaggccatccgctcgggagacgcacagattgttgtggcaggaggtcaggagagcatgtccctggctccacacgtcatgcatctgcggcagggcgtcaaaatgggtccgggcactatggtggactcgatgatccacgacggcctaaccgatgccatggagaacatacacatgggcatcactgccgagaatctggccgataagtataacatcagtcgtgaggcccaggatgcctatgccgtgctgtcgcaaaatcgagccgaggaggcccaaaaaaagggttacttcgacaaggagattgtgcccgtggagatcaaggatcgcaagggtacgaccacattcagcaaggatgagtacatcaaggcgggcagcaccgtcgagggtatacagaagctcagggcagccttcaaagagggcggctctataaccgctggcaatgcctcaggcgtcaacgactccgctgctgccgtactactgatgtccggcgaggaggtggccaggaagggtcttaagccgctggctaggattgtgggctggactcagagtggcattgagccaaagcttcaaaagattaactggaagcgtgaggaagtggatctttacgagctgaacgaagcattcgccgcccaatcactggctgtcctgcaggacctgcagctggatgctcagaaagtaaatgtcaatggcggtgccattgccctgggccacccgattggagcttcaggtgcccgtgtcttggtcactttgctctatgcgctggagcgcaccggtggaagaaagggaatcgcatcgctctgcatcggtggcggcatgggaatcgccctggccgtggagcgcctcagctag

SEQ ID NO: 4173 - protein, 356 aa, DROSOPHILA
MSDVFIVSAARTPIGSFNGTLSKLKASDLGSVVIQEVLRRANVEGQEVNEVILGQVPAYGINMLCGSGLKTVALGYQAIRSGDAQIVVAGGQESMSLAPHVMHLRQGVKMGPGTMVDSMIHDGLTDAMENIHMGITAENLADKYNISREAQDAYAVLSQNRAEEAQKKGYFDKEIVPVEIKDRKGTTTFSKDEYIKAGSTVEGIQKLRAAFKEGGSITAGNASGVNDSAAAVLLMSGEEVARKGLKPLARIVGWTQSGIEPKLQKINWKREEVDLYELNEAFAAQSLAVLQDLQLDAQKVNVNGGAIALGHPIGASGARVLVTLLYALERTGGRKGIASLCIGGGMGIALAVERLS

SEQ ID NO: 4174 - DNA, 11331 bp, DROSOPHILA
gttgttttacttgaattgagcgagggcttcataaatttacattcattcacatataggtacatatgtatgtgcatatgtttgggcattttcctcaaactgcgtcagtgaaaaaatcaaaaaatgcgcattcatcatttaaaatatacacttgggaaaataattgtataaatctcaaaggaaaaaaattttgctattttacttcatgttgttatttatttacttcattttatgtcttaaggtaacggaaaaacgtttttttttttctgattttgagaatttgaatatttaaccctttaagcattttatttcctagtggtttgcatattaaacttcattttgcaatttttgcaaatttgtctgataatatatctccttttacaagggcagatctgcaaatatatttccactcgattgtggaggtattgaaatgttttttgaaatcccacaagcattccgtgtgtggtttcaaatttaagaagtaatgaaatgaaaccaaggccgcctttgttagtggatacatttatttatttataatttaattcaaattgttttagattatacacattttggaaggcttgcccagccaaaaagcgaattaaatatgtaagtttgtttatacggctgtagcaagtcgctttcgctgattttgcgacaattattatttatcaattaaacttatagtatatgtcttggacggattagtactaatgttacgcgaaaattgattatcatgagaaagtatatcgtatatcgtgtgtgaaccctggaaagtcatccgatccatcatggatttgcaatctacttgtgtgtcgtttgttcaattaggatacccgaacattaggctactcgtactcaattccaatatgcagtgtatcgagaagaatactattcagtagtaatacttttatttcaaacctgtgtatgtatctatcccaactaccatagtgtatgtttatgtatatttttaaggactgaagtatcctcgaatctgttcaaaatcaatcgtgtgcatgtggcagtttgtataacattgtatatacacatatatacatttgtaactagaaagtattggacttgcaatcaactaatttcgacgataagttgagaagtaagatccgatcagttggacaggattttgtgacctgctcatacaaatttcccatcaaacggcagcgtaacatttaaagaacacttttagctagaattaaaaccatctggttaattaactaccctgctcttttccctcatctttgaacatctttgattaaatgcaaaatctcagttggaagtgcagaacacacgtatcgaatggagttgatggtaccactgggaaaagaatttcaaaatttcgatacatattagagttacgatacacaaaaaaaaaaatatatatatatatattttcagaaaaccgaaaactaaatcatcatacgcttcgaactgacaatcagatttttctttatagtggctactttgtcaggcaattgtaattggcacgtttgttaattattgtaaggttattgagtactcatgcataaatgacccattgattcgaattacatataaggggcattctcgaaactggctgaactgccctcgattactcgctcctgatgggacaggatgttttgtgctatatcgattgttaatttcaatgggcgttgtcttccgatccgtttaccacttgcgtggaggcaagggcatctccttctccgcgtggtagacccttcgatgggtctccacgtattcactctgcgtctgggtctgggacagcacacgctcgccgctcctgccggtggctaaggctacttgttgcgacgataggggctgcaaagattcgatttaggttgtgcgcatataggatccatgatatgagaagtaattgggattcgattcgaaggctgactcacctgtcgggcgcggcgagtgtgcggtgtgccctccggggaggagacctccatctcgtcgggcgcggtccagtgctcggtgaactcgctggctgatcgggccagcgagggatggctgagggagcgatggaaggagcgccggtcgtcgtcgtcgtagtactgcatacgatagtagctgctggcgtcgctcacgttgtccggatgatccacctggtgcgggcgcccaaagtcgacggtcacctcggacatcgagcggaagtcgttgtggtcggtctggtaggaggtgcgcgaactgcgacgcgatcgctgcagattgaagggtccaccaggtgcgccgccaggtcctgctcctgtcatcagcacgccggacatgcccggatcgttgcggatggtccgcacactcgatccaccatcgctgtcgtactcgtagagcgtgggcagcgagctgcgacgggaacgggtgtcccatggctgcggcgatgccttcttgccgcgccttggcgtgcgcatctccacgtcgggatcatcgtcgccgggcggagccaggatgcgaatgatcacgtcccaggtctgtggctcgaacatgcgttcgtaccgggtgtcctgacggatccgctcgaagtcctccctcaccaccgcctcggtgagcatggtgcgcagcgaggattgggtagtgatgatctccttccacttggcccgatcgtcgtaggtcagattgtgcacggagcttacgtcgtcctggcccacctccgacatctcgggctcctctaggatacggatgagcacgtcccaattgggcacatccttgtcctgtggcggcacctcgatcggcttcatgttgcccaccagctccggactggtcagctttagcttgttgtcgtggatctgagctggtagctccgccggcggcaaacttagctcgctgcgctccatcttgggcgtaagggtcagtccggaggcactggaaatgtccgagaagttctcccacagctgctgctcccggtcgccaggatagttgcgcacccgcacatcgaacttgggatccacttgcggtggcggtggtggcggcggcagtggtgccctcggcttgctcttgtactccgtaaccctacgcttgtggctctcgatgtcctcgatggtcttcttctcggtcaccgtgcgcagatagacatcgtcgacggtgtgcgaggtcaccggtggctccaccgccggcataaactcatcctcgtagtagtgcatcgtttccaccgtcatgtcaggtgcctcggatgataagtccgtgatctcacttggcgccgggccgtcggtgtaatcggaccaggtctctgggcgaccatccaccacctcgtgatgggttcgtgtgtacaccgagaacttgggctcgacgacagccggcggcgggaggggaatagactgcggcacttgcggtgccggatggagttcgggaacataggtgaactgcgagtgcatcgtctccacctgcggcggcagggagtccatggtgagcacgctctcgcgatcctcgtaggcctccatgatggtcgaaagattattgcgatccggacgcaaagtggccacactctcggtatccgaggtcactggggatggaggtggcggtggtgacttcttcacacgcacctgtacatcgaatttgggcgaatcaacggctgccaccgcctcctgtatgggaatcgagtgacgggtcaccgaggtggtggtcatcacagcattcgcagacggcatctcctgagccggagcatagtgatcactgtagatgctcgaggtttcatggacaaaggcgcgattctcgaagctacccgctgagctaaagggcagcgatctcgtatcgatctcctcgatctccgagtgcgattcactgggatagtcagagggtatcagtgcaccctcgctgcccgatgagctatataccgcctgcagggcggcatgggctctggggatctttacgccctcgaaggcactgatgttgcccacactgctgccactcagcttggtgatctccgatccgctgcccatgctcatcggcaggcgacgcaccaccggaatggagcgactgcgcaggcagtagtaggaaacggcgagtcccaggaggaggagcgtgaggaacatgatggcgcagatgatcatcaggatttggatgctcttcagcggcggttgcagcacagaactcgtggcgatcgggttcaggctgtgaaggagcatagatagtatccaagcggataagtttggatgggggaacttacattggagccggcagtgcaggtggaagcgagggcactggaggtggatagcggcagactatcgtgatgatctcgtcgccgtccatttccagattggcgtggaatcgaacaatgatgttgttggtgaacacacgggtggggttctatagatgagaatggaataaccaagactcagatctatttgcaaggtatgtagctttcgccctgaggatactcacctggatggtaccgcatcccttgagcggcaactcgagtcggtagctgagtgctccctttccactaacgcggcacgcactactgcgatcatagtcagcctggataatgccatggaacggatcgttgaacttgagatcaacctgttcggggaaaacgcttagttaattgcggctttgggtcggggtaatcctcgaaaggaaatccaattacctgcatggaaccggcggcgcaattgagagcggccttcgttcggttgaggaaaatcagtggactgatgtcgtccagcttggtaacctttaagaaagtatagtattgtagttttttaaagccatatttttgcaaccacaagaattccgtttggtatttccataaacaatataaaacccttctccagattcccaataataattcccatataaacgtataagcttagacattccacaacaaactaactaggtggctaggttcatgcatatttaatggccactttctgccatgctcgtgctccatttcgatcaaaaacaatgggcctgggattttccctaggatctgtgcaactggctctgtggcaatccgagcatccattgtgacttccatcggaagtgcagttgaatatggagcccaaagttactgatataacactagcttataaaacggaaagatgcaaatgcatctttaatttgtggttgcagttgcatttcctcattaaaactaagacaaagctgtcaagttcgccagttttctttagcccattaacgatgtatctattcttttcagctgcgattaggcccagtcttagatgcagttttcgacattgacgtccgtttaaatggataaactagccacgcttgatggatggcacaaccatgacgccccacctggcttcaactggcaattccaagggcgttaaaccgagcgaatggagtgtggttggagtgatcactcaccttgccatccagtgtcgcctcctcgggcaatccgttggtagtgtagttaccgctgtctccatgctgcacataattggactgggccgccgtctggccggcgaggcaaatcagcaggagagcggccagcaggccatgccgtcctcttttggccaagagtggcccttggtccgagctcatttcgcttggcagttccacgcggtgctctttagagccaagaaaaacagacaaaatcgggttcgggctgtgaaaaagaaagctcaattagggttttcccttaagggaatggaatgaaaagggttaggttttacaaaaataagaagtatcctgcttgtgccataatgttttgaattttttaaattaattttctttaataataatgtagtatatattaaggagttacatattccaaatggtaattaccgtacaacatggcgtatgcgtgataaacacctaatacgacctgtgtaccataagatcctaatctatttttgacatacatacatgtaagcttaaattgattacagtgttttctttgctgatgttctatctttctcctagactttcgcgaaactttaaagtagctttgttaaacaactgaggataaatcaggtagttgaagtgcataatttattgctatcgcaaaaggtaccgttcagttgaaccatcatccgagtttttgaataaactacctccacctcgcccattgtatttcttttgcttttggtttttggcggccttctgtcaacgaccttcgccccaaatatcgcgatacggagatacatagatacatggatacatggatacctaggcacatactaatacatatgtgattcaagtggagcacggcttagctataaagccgagaatttatttttcaatcttagttcttatgtatcttttttcactttgccttcaattttggctttgattgacaagcatggaccgccgctgatgaacagatgttcgatgcgaagattgataggtcagccaacttgggatttgaagagatttgcgactgccatacgtagattacactggctaacacaaagtacacaatgacacagcagtacttttgctacagaaaataatagctttctacaatattaaactttacttgggtgcttataatttggttttgtcatccagtttatttatttatgcacgccgtgccatccacttacacttattgcataaaagcgtctggtctcacgcaatgctgaaagacaagatattcgatgtagaagttgaggcaattggtagaccaatatagacagacacctacgacaatttagccatatttgtcacaggcactcgccttgaagcggatctccatccatctgccgactgcattgcgacaaagcaaagcaaagcacaagcaaagcacaagcagagcaaaagcagagactaagcaaagcaaaagcagagccagttcgagtcgagccaagacaaaagtgtagcgaaaacccagcaatggcagtggctaaaactctactcctccgatataagcataccattttttgcaagaacgggtttttcactcagccaaccaacacacaaggcacaccacagtttcagcagacagattcagatacgacaaagctcgactatagctacagatacagatacattggcagggcaacaagctgggcacgtaggagcggattttggccacagccctggcaaggtaacttaatggtacacctggtccacaatcctgttccagccgctcgatttaagccatgcagcactcgaactgcactgaaaatgtatgtacttgtcaaggttgctgtcgcgtttcaatagacaaactttgttatcattcgagtgactcacgaatctggcttaaatatgcgcaaagaacttgtttttggttccatcggaaacccgctatttgactgcccatttcaaacggaacttgaaatataatatttctctaaactctgatctttaaaatcctgtgtttttgaatttcgcttgaactgctaagcttttaagctgagttattttatatatgcatacatatatactatattatatggggcttgtaaatgcagtcaagcggaaaaattctaaggtcctatgagataagatgttgagtcaatcattaaaattgccatgagtcagttgaatgtgcctaaggttttttttgtattaatttttcacaaaggtaattgtgcgatgaagcatataagtaaacatagaaacctatttatgtttcttatttttagttggaagaaaatatatgaaaaactaattttaaaagtataatcagttagatatcgctttctgaaatatagggttttatgaattatgagtctctttataaatataataacaaccaaaaaaaataaaatctttcccagttggaaaataaaatataagctcacaactttgaatactttccaccaaagaaacagattttttttgtatgttactatcctaattgcaccggaaaaatcataaaaagttttctagttttttttcgtgtacgtgaggccgcgcaaaaaaatgcaattaattggattagtgttctttctcatgtaaaaatttcggcacacacatcgaaacacctttagccatgtaagtgggtatgtatatatgtatatatacatatgtatgcacaggtaggtgagtatcttttgtatgcagcctcacgggcgcactcgcacaccatcacaccagcacacacacaaaaccaacactgagagaccagaaggtatctatagataggttcgcattgtcgctcagttggaaaaaactggtattttgactggtcgctcgctccgagtctcaaacacccctggtagctccaccatgctccacaatactccgcaccgctcccttcagatccgagctatggtttaatgattacgcgacgaccgagagttggcaaggtatgagtaccagttgaaatacaagtgcaccgagagaaataacacagcacattcttgaaatctaatcaattcagtttcatctatatgaaacattgcattctcatcgcaatataatagattgtaaaatggacttgtgcttttcaaaagctttgatatcatattatattaaattttataataatattgacagaatcttggcagaattagaactttagattttcaactaagaatggaatgcatattacgaagtaccgccttattttgctcggtgtacgtcaggtatgtatcgcaaactcgggctgcgcatgcgctgtgcgcttattgagccgtctccctcgctcttcgccgccccgcatcgctgcctctctttcgcgccccaaagacaagcttgcctcatcgaaatgcgtaagcatcggagacacagctcggtgtttggtgttcaagctctggaaaacaacagcttctacggcggcgtttcgacagcattcccaactgggcgatacccacgcattagccatgaatacttgtaccttctggtgtacaatcagtactgaaaatctgctgcctggtacctactacattctggtttggcacacgttttgccttcttaagtggtgcagcgacgaaactggattatacttgtactatacttgcaacatatttggtagcaatcatcttatataatctcaaaagtacacatatcatcgttttaattgttatccattcaatatatctatgcttgtggtgaaaccattggtaccttgctctatttgaagaaggtacgataaagtacttttaaagatttctaagccagttctaattggcttatataccaattacttgatgacttgtaggaaatgtaaatgcagaatctaactgctaactgagtaccttttaagatcacattaaccaaaagaatgcacttccaaagccactccaggtaatcgattcaaattcggtcaagagccaattgatgtgcagcgactcaagagccccataagcccagtagcatccgttcacaaaaaaaaaaggcagtcgtcacgatggcgataacaattaaatttgatgaaatcatcaaggcggtgagaactctccattctgccacacttccgcacacgatcagatacaattgagtggagtggagtggtgaaactttctcggatcagaatcaaacgccatttattctgccaggttctgccagattactgtaccttattttttgatctctctccttttcatttgtctggcagggaaagcccaagattggttcttttgtgaattgacctgcctattggaaactgggcgccgccattgtccacttgaccgcactgcctattcaaaatggtaagcttttttcaattcttttctacttgctgccgagaatcgaatccacattccactgggttagtaatgcgaattcctggaaaaccgacgatgatttatattcagtacccagaaggcatcacctatctcaactcaattgagttgcagcacacattgtcgatgtttgtttttaacgtattagcacagttgcattattgaaaacttaaacaatgatcttgtagatctttttagaaggttggtgtgtttaggcgattagcttgtacttttaataatatcgtatttgagtttaagccgtcttttttcttttaccagactataaaactactagggtcattatagtttctctggttattaacttaaaaatttaaaaacactcaaaaaaaaagaaatgtagtttcacagacgaatgtcattcacaaaagttgtttgctatgccatttcaaatgttgtttgcaagtttgggtattcaaattagccacgaagagaggaagagctttcgcaagtgtattacgggaaatagatatgcaaataacaaaaaatacaacttaaacgaacaaaaaatatgaaacaaaacaaaaacaaaaaaacgctgatatatactttttccgtttgagtcgcgcttcgacgtctggttgattttggatttactaaatgccgatttgtttttctgcttttctcactatgcttttttttttttttttgaattttgtgtgatctgagaccagacttgtctctaacacttgtccgtgcccgaacgcgctctagtggattactggctggcaactgactgtttgctttgggccagactggttggatcggccttctcggcccacagcttttgagtcaagctcccaagctcccaagttgccaggtagccaggttgccaggttgaagagctgcggttgggtctctgtgcacttatcattcgttgtctccccacctaccaactctccggctctctagttctctggctctctggctcgacggagatgatcatctggctataacgagcgggttttgaaccgaagatgtctaaaagtatgcactaactgggctttctttctcataacttggctagaaatgcagtcgaagcaataactgttgaacagtcatttattattactaataacaatgccattttttttacacattttattaaggcgacataaccaatacaaaccatctcttaaattcctctgctccattgagatcaggtgctactactagttagaccaattaccatgtgagctagagtatttgaagcttcggtttgtagaacccaggacctcatgaagtgcaggattaacaacctcccagatgaaaaacttttctaatttgcgttcaatgaattgtgtttatacagaaaaggacaagcgaaatgttaatatcgggcaaaacgatgcaatcctctcgtccaatggaacccgtaccatctcgatttgatagctatactattttaacccgttggcaaaatgtcaaatgttgaaggagtcttgatgttcgtttctcagctgcgttgcaatattggttagttaatggaaaagaaatagcacagttaaattacttactttttgtgttaaacgatagttttgcaatcaccttctcgttgttacaaaaggcaatggcgagtattcgtcttgtccttttcttcttgtttgtcaaattcgaattgaatgtgtcagttgacccttaccaaggtcaggcaatcaacatatgggatggggaattgggttgattagattagtttggacatgtggccatttcg

SEQ ID NO: 4175 - DNA, 3798 bp, DROSOPHILA
ctagagcgcgttcgggcacggacaagtgttagagacaagtctggtctcagatcacacaaaattcaaaaaaaaaaaaaaaagcatagtgagaaaagcagaaaaacaaatcggcatttagtaaatccaaaatcaaccagacgtcgaagcgcgactcaaacggaaaaacccgaacccgattttgtctgtttttcttggctctaaagagcaccgcgtggaactgccaagcgaaatgagctcggaccaagggccactcttggccaaaagaggacggcatggcctgctggccgctctcctgctgatttgcctcgccggccagacggcggcccagtccaattatgtgcagcatggagacagcggtaactacactaccaacggattgcccgaggaggcgacactggatggcaaggttaccaagctggacgacatcagtccactgattttcctcaaccgaacgaaggccgctctcaattgcgccgccggttccatgcaggttgatctcaagttcaacgatccgttccatggcattatccaggctgactatgatcgcagtagtgcgtgccgcgttagtggaaagggagcactcagctaccgactcgagttgccgctcaagggatgcggtaccatccagaaccccacccgtgtgttcaccaacaacatcattgttcgattccacgccaatctggaaatggacggcgacgagatcatcacgatagtctgccgctatccacctccagtgccctcgcttccacctgcactgccggctccaatcctgaacccgatcgccacgagttctgtgctgcaaccgccgctgaagagcatccaaatcctgatgatcatctgcgccatcatgttcctcacgctcctcctcctgggactcgccgtttcctactactgcctgcgcagtcgctccattccggtggtgcgtcgcctgccgatgagcatgggcagcggatcggagatcaccaagctgagtggcagcagtgtgggcaacatcagtgccttcgagggcgtaaagatccccagagcccatgccgccctgcaggcggtatatagctcatcgggcagcgagggtgcactgataccctctgactatcccagtgaatcgcactcggagatcgaggagatcgatacgagatcgctgccctttagctcagcgggtagcttcgagaatcgcgcctttgtccatgaaacctcgagcatctacagtgatcactatgctccggctcaggagatgccgtctgcgaatgctgtgatgaccaccacctcggtgacccgtcactcgattcccatacaggaggcggtggcagccgttgattcgcccaaattcgatgtacaggtgcgtgtgaagaagtcaccaccgccacctccatccccagtgacctcggataccgagagtgtggccactttgcgtccggatcgcaataatctttcgaccatcatggaggcctacgaggatcgcgagagcgtgctcaccatggactccctgccgccgcaggtggagacgatgcactcgcagttcacctatgttcccgaactccatccggcaccgcaagtgccgcagtctattcccctcccgccgccggctgtcgtcgagcccaagttctcggtgtacacacgaacccatcacgaggtggtggatggtcgcccagagacctggtccgattacaccgacggcccggcgccaagtgagatcacggacttatcatccgaggcacctgacatgacggtggaaacgatgcactactacgaggatgagtttatgccggcggtggagccaccggtgacctcgcacaccgtcgacgatgtctatctgcgcacggtgaccgagaagaagaccatcgaggacatcgagagccacaagcgtagggttacggagtacaagagcaagccgagggcaccactgccgccgccaccaccgccaccgcaagtggatcccaagttcgatgtgcgggtgcgcaactatcctggcgaccgggagcagcagctgtgggagaacttctcggacatttccagtgcctccggactgacccttacgcccaagatggagcgcagcgagctaagtttgccgccggcggagctaccagctcagatccacgacaacaagctaaagctgaccagtccggagctggtgggcaacatgaagccgatcgaggtgccgccacaggacaaggatgtgcccaattgggacgtgctcatccgtatcctagaggagcccgagatgtcggaggtgggccaggacgacgtaagctccgtgcacaatctgacctacgacgatcgggccaagtggaaggagatcatcactacccaatcctcgctgcgcaccatgctcaccgaggcggtggtgagggaggacttcgagcggatccgtcaggacacccggtacgaacgcatgttcgagccacagacctgggacgtgatcattcgcatcctggctccgcccggcgacgatgatcccgacgtggagatgcgcacgccaaggcgcggcaagaaggcatcgccgcagccatgggacacccgttcccgtcgcagctcgctgcccacgctctacgagtacgacagcgatggtggatcgagtgtgcggaccatccgcaacgatccgggcatgtccggcgtgctgatgacaggagcaggacctggcggcgcacctggtggacccttcaatctgcagcgatcgcgtcgcagttcgcgcacctcctaccagaccgaccacaacgacttccgctcgatgtccgaggtgaccgtcgactttgggcgcccgcaccaggtggatcatccggacaacgtgagcgacgccagcagctactatcgtatgcagtactacgacgacgacgaccggcgctccttccatcgctccctcagccatccctcgctggcccgatcagccagcgagttcaccgagcactggaccgcgcccgacgagatggaggtctcctccccggagggcacaccgcacactcgccgcgcccgacagcccctatcgtcgcaacaagtagccttagccaccggcaggagcggcgagcgtgtgctgtcccagacccagacgcagagtgaatacgtggagacccatcgaagggtctaccacgcggagaaggagatgcccttgcctccacgcaagtggtaaacggatcggaagacaacgcccattgaaattaacaatcgatatagcacaaaacatcctgtcccatcaggagcgagtaatcgagggcagttcagccagtttcgagaatgccccttatatgtaattcgaatcaatgggtcatttatgcatgagtactcaataaccttacaataattaacaaacgtgccaattacaattgcctgacaaagtagccactataaagaaaaatctgattgtcagttcgaagcgtatgatgatttagttttcggttttctgaaaatatatatatatatatttttttttttgtgtatcgtaactctaatatgtatcgaaattttgaaattcttttcccagtggtaccatcaactccattcgatacgtgtgttctgcacttccaactgagattttgcatttaatcaaagatgttcaaagatgagggaaaagagcagggtagttaattaaccagatggttttaattctagctaaaagtgttctttaaatgttacgctgccgtttgatgggaaatttgtatgagcaggtcacaaaatcctgtccaactgatcggatcttacttctcaacttatcgtcgaaattagttgattgcaagtccaatactttctagttacaaatgtatatatgtgtatatacaatgttatacaaactgccacatgcacacgatt

SEQ ID NO: 4176 - protein, 963 aa, DROSOPHILA
MSSDQGPLLAKRGRHGLLAALLLICLAGQTAAQSNYVQHGDSGNYTTNGLPEEATLDGKVTKLDDISPLIFLNRTKAALNCAAGSMQVDLKFNDPFHGIIQADYDRSSACRVSGKGALSYRLELPLKGCGTIQNPTRVFTNNIIVRFHANLEMDGDEIITIVCRYPPPVPSLPPALPAPILNPIATSSVLQPPLKSIQILMIICAIMFLTLLLLGLAVSYYCLRSRSIPVVRRLPMSMGSGSEITKLSGSSVGNISAFEGVKIPRAHAALQAVYSSSGSEGALIPSDYPSESHSEIEEIDTRSLPFSSAGSFENRAFVHETSSIYSDHYAPAQEMPSANAVMTTTSVTRHSIPIQEAVAAVDSPKFDVQVRVKKSPPPPPSPVTSDTESVATLRPDRNNLSTIMEAYEDRESVLTMDSLPPQVETMHSQFTYVPELHPAPQVPQSIPLPPPAVVEPKFSVYTRTHHEVVDGRPETWSDYTDGPAPSEITDLSSEAPDMTVETMHYYEDEFMPAVEPPVTSHTVDDVYLRTVTEKKTIEDIESHKRRVTEYKSKPRAPLPPPPPPPQVDPKFDVRVRNYPGDREQQLWENFSDISSASGLTLTPKMERSELSLPPAELPAQIHDNKLKLTSPELVGNMKPIEVPPQDKDVPNWDVLIRILEEPEMSEVGQDDVSSVHNLTYDDRAKWKEIITTQSSLRTMLTEAVVREDFERIRQDTRYERMFEPQTWDVIIRILAPPGDDDPDVEMRTPRRGKKASPQPWDTRSRRSSLPTLYEYDSDGGSSVRTIRNDPGMSGVLMTGAGPGGAPGGPFNLQRSRRSSRTSYQTDHNDFRSMSEVTVDFGRPHQVDHPDNVSDASSYYRMQYYDDDDRRSFHRSLSHPSLARSASEFTEHWTAPDEMEVSSPEGTPHTRRARQPLSSQQVALATGRSGERVLSQTQTQSEYVETHRRVYHAEKEMPLPPRKW

SEQ ID NO: 4177 - DNA, 6238 bp, DROSOPHILA
caaagtaatccaatagcgagcgcatttgcgtcgaggcgtcgccattccaggtggacagggggtccctgtagaaggcagtggtgatttcccaccttcgatctcttccatagatggcttgaatttctgtgtcgcttagtagacgggtgccatgggtggctcgcaggatctgggcctcactgctcagcttcagcacattgccacgcggtccgtccaggaacaggcccttctgcagaaagtccaagttgagcgattgaaggagtagatccctgtcatagcccttctgctctacgaggaactgcttgagcacctgatagatcagagcggacatctcgtggagattgtagcgcagaagggtgccgtccaggtcgaagcccactattccataatcctttaggagcagctccttgtgataggatgtcatgatggtgctggccgaataccttgagtttccccctgcagatttgtggaagcgcctaactgtctgctgctgacccgtcacttctcgtgttgctcttcccactgctgccggcggtgttctgactaacgtcattgaattttgcgccaatttatcgagattgcgtaacaggagacgaacatctgtttgggcctgtttgtgtacgtttgtttttgttttcgttttcgttttcgtggccagtcgaagtgaaagggcaggggcggaaaaggcgcccacggtggctgctctgcccagcgccagcatcttatcttatcaactagcacatctcatttgtccgaagcgtgatctaaatttaaaattaagccgaaattcactatcacttaggtagtcctcacaaaatcatttttcatctataaatgtatgtctacaactgccagagctgccaaccttttgaagttgagcagtactgacttacttccttggcttattcctagctagatttagctaggtataagcaagtgtaagctatcggaactcgatagcagcttaggtatcgttggcgcaatcgactcttgtgccatccctagcaagcgtaccggaatggaaaaaatatagttttttgcacattctccgatttcagcacatttttataagttttcgggccagtaacccgtttttcaccgcttagtttgtgggctcaaggcctccgaaaccatgtccaactgcatagagatccctttgcaggacaccgatgaggtgagaatcgatccgaaagattctagttttaagtgattaatacttctatttccccaacttaggtgatcgaggtggacccggatcaactgcccgactgtccagaggtgttgagcattctcaagcaggagcgggcgcccctgcacgtttgggtcaatgtggcggtaagttgaaagactgggtacaatgaatttagcatgttccacatggctactttttttccagcttgcctactacaaacaaaagaagacggaggactttgtcacgctgctggaggagtcgcgcagcgatgacgccaccaaggagtaccgcgactcggacaaggacctcatgcgtgccctggacatgctcgctgcccactatgtccaggaggcgtatcgggagaagtccaaggacaagaaacgagagctcttcatgaaggccaccaacttgtacaccagtgccgacaagattatcatgtacgaccagagccatctgttgggcagggcctacttctgtctgctggagggcgacaagatggaccaggcggatgcccagttcaactttgtgcttaaccagtccccctcgaatattccctccctactgggaaaggcctgcatcgcgttcaatcgcaaagattaccgtggagcgatggccttctacaagaaggccttgcgtacaaatccaaactgtcctgcgaatgtgagaatcggcatggcccattgcttcctgaagatgggcaatcccgagaaggccaagctagcctttgaacgagcgctccagctggatcagcagtgtgtgggcgctttgattggcctggccgttctcaagctgaatcaacttgagcccgaatccaacaaactgggtgtccagatgctctccaaggcgtacaccatcgacaatgccaatcccatggtgctcaatcacctggccaatcacttcttctttaagaaggactatcagaaagtccaccacctggcgctgcacgccttccacaacaccgagaacgaggcgatgcgagccgagagctgttaccagctggccaggagtttccatgcccagagcgactacgatcaggcctttcagtactattaccaatccactcagattgcgccagctaacttcgtgctgccccattacggactaggccagatgtatatttatcgaggagatacagaaaatgtgagttgggacacctgtaattgaacctccttattaccactttgtgaatactttcaggccgctcagtgtttcgagaaagtgctgaaaatccagccaggcaactacgagaccatgaagattctgggatccctgtacgcacactccaattcgcaaaccaaacgtgacatggccaagactcacctcaagaaggtcaccgaacaatttcctgaagacattgaagcctggatagaactggctcaaatcctggagcagaacgacctgcaggcctcgctcagtgcttacggcacagcctctagtattcttcgggacaaggccaagtacgagatacccgctgagattcaaaacaacgtggcttcactgcactaccgcctgggcaacttgaagatggcaaagctcactttggagtcggccctgaagcatgcaacctctgagatggacaaggatgtaaaatactacgagtccattcaggtcaccatgaagtacaatctggcccgtctgaacgaggcaatgagtagctacgatgtggccgacaagctgtacaaggagatcctcaaggagcatcccaactatattgactgctacttacggctgggttgcatggcaagggacaagggtctcattttcgtggcttccgatttcttcaaggacgcgctgaacatcaacaacgacaatccagatgcgagatcactgctgggaaatctccatttggccaagatgcaattcgctttgggacagaagaatttcgaaacgatcctcaagaatccgtctacttccaccgacgcctactcactgattgctctgggaaacttttcgttgcaaacactgcatcagccgagtagagataaggagaaggagaggaagcaccaggagaaggctttggccatattcaaacaagtgggacagattaaaatagaccaattatagctcaatttgtaacgaaatgcatccgctttccaggttcttcgcaatgatccccgaaatatttgggccaccaatggaatcggtgccgtgctggcacataagggatgcgtgatcgaggcgcgcgatatcttcgcccaggtgcgcgaagccaccgccgacttttgcgacgtgtggctgaacattgcgcacgtttatgtcgaacagaagcagtacatcagcgctattcagatgtatgagaactgcatgaagaagttctacaagcacaacaacgtcgaggtaatgcaatatctggcaagagcgtatctacgagccaacaagctggtcgatgccaaggcagtgctacttaaggcccgtcgagttgctccccaggacacagttctactcttcaacatagcagtggtcctctcacgtttggccatggccatactcaaggatgagaaatctactctggaaattgtgctgcaagctgtccatgaactggagctggctcaaaagtaagtggtatccttgctctcttaaactgcgcctatcaaatattttcaagtggttattagagtaccaaccaagtgataacgtgaatttgattatatttagaagtacagcagaaatgagtaaccattaatggcattttagcttatcagatcagattagatattaatgcaaagcaatcatcatgaactgctaaaccgaagattggattagattagctgatgatttccttgatcatggtcaataactatttctatgaatatgttttgtttcgtgcttaaaatctcactcacaatatcccaccccaatctcttatagatacttccaatatctgtccgtgcacggggataagaatcgcttcaacattgaggtggctggcattgaggcaagcacctgccaagatcttctctctcaggcccagtaccatgtgggccgtgcacgtcgcattgacgaggaggagcgctcgttgcgccggaagcaggaagaggagcgcgaggccttcaaaattaaggtggcggagcagcgcaagcggcgcgaggaggaggcaaagacctccagggaccagttgttagccaagcggcaggagtacgtggagaagaccaagaacatgctcatcattgcggacgctccacctgaaaaggaacgcaagaagggtggtgggcgaggtcgtaaagatgactacatctccggtaccgaaagcgataacgatggagctcgtcgtgagggagaacgtccctcgaagaagaagggcaagggggaacgcaaaaagggtggcggtcgcaagcgcaaaacggagaagtacgagagcgacagcgaggaagagccaggtgccagtggcaagtcgggaaagaagaagggcaagaagccgaagccggttaaagagtccaaggagaagctttctgccaagcagcgcctcaaggtgctttccaaggagacgatctccaccagcgaatccgagtctgacggcaagcgcagcaagagcagaagtagaagcaggagtcgaaatcgcagtggtagccgaagtggcagtgcctctagaagcggcagtgatcgcgaggctagccgcaagcgcagcaggagcagaagtggatctggatctgggagtgacagtgatgaagcaactaagcggaagcgcgccaggaatcgcatcgaatctggcggggaatcggatagatctgggtcccgtgctcgctccaagtcgagttcccgttcaagatctcgatccaagtccggatctcgatcgaggtctcgctccaagtcgggatcccgttcgagatcgcgctcaaagtccggttcccgctcgagatcccgctcgccgtcgggttcaagatcccgctctcgctctggcagccgatccaagtccgaatcccgtagcagatcagggtccccggaaaaataacgcacctctcaaccgtgttaaatcacttttgactatatttagagttgtcttcgagagctgcaaaaagatactaataaaaacgaactaattgccacacaaaggcagtggagtaattgctattggtttgctgttcaaccgtaatccggattcccaagtctattggcatggatggattaggtaatggacagggctgattgtctgggccaggtcaacaatcgacttcaaacacgtctgtgctgctggatcatgtctcttacgattacagccataggctgcgagtggcgcaggacgaaagcgtggtcgatcttcttggtgtccagctgggcgtccaccttggggtagtcttttttgagctggtcatagtaggagattggtacccatccgtcggtagtgccgtagtaaaacttgaggaggtccaggttctgctctacaatctccctttgaatcccgcgaaccctggccatctcatcgtcggccaggaagaccaccttctccgctaccgatggtttggagtactttagggcggtgcccagaaactgtcgtggaatggagaaaatcaagaagtagatctgtatcagcatcaggcgcaaccacacgggcagaaagttgaagaagctgaagaaaatgtagccaaacacggagtacaggggcatggccaccttggtgaacacccatccattgggcgactccatcatccgctcgacggtggggaacagcatatagcacttttggatgcgactccgtatccgctcgttttccagcagctgcaggatcatccacgctccgatggagtgcccaatcaagtggatcttgacatcacttggcacgtatttctcgatgaaggcgattttatgccggatttgtccgtccaaattgaagagctcctcgttgccgctgagttgaggaacctcccgaatactggcctctggcggatcatcatggccagcgtgccctggagggaacatcaagtgtgctattaccgactcaatgtggaaacgccagcacactcacctatcacccaaactggaagatcgcccaactccttttgcaaagtgcctgcgaactctgtgtagaaacctggcaaaccgggattgccagtt

SEQ ID NO: 4178 - DNA, 3682 bp, DROSOPHILA
agcaagcgtaccggaatggaaaaaatatagttttttgcacattctccgatttcagcacatttttataagttttcgggccagtaacccgtttttcaccgcttagtttgtgggctcaaggcctccgaaaccatgtccaactgcatagagatccctttgcaggacaccgatgaggtgatcgaggtggacccggatcaactgcccgactgtccagaggtgttgagcattctcaagcaggagcgggcgcccctgcacgtttgggtcaatgtggcgcttgcctactacaaacaaaagaagacggaggactttgtcacgctgctggaggagtcgcgcagcgatgacgccaccaaggagtaccgcgactcggacaaggacctcatgcgtgccctggacatgctcgctgcccactatgtccaggaggcgtatcgggagaagtccaaggacaagaaacgagagctcttcatgaaggccaccaacttgtacaccagtgccgacaagattatcatgtacgaccagagccatctgttgggcagggcctacttctgtctgctggagggcgacaagatggaccaggcggatgcccagttcaactttgtgcttaaccagtccccctcgaatattccctccctactgggaaaggcctgcatcgcgttcaatcgcaaagattaccgtggagcgatggccttctacaagaaggccttgcgtacaaatccaaactgtcctgcgaatgtgagaatcggcatggcccattgcttcctgaagatgggcaatcccgagaaggccaagctagcctttgaacgagcgctccagctggatcagcagtgtgtgggcgctttgattggcctggccgttctcaagctgaatcaacttgagcccgaatccaacaaactgggtgtccagatgctctccaaggcgtacaccatcgacaatgccaatcccatggtgctcaatcacctggccaatcacttcttctttaagaaggactatcagaaagtccaccacctggcgctgcacgccttccacaacaccgagaacgaggcgatgcgagccgagagctgttaccagctggccaggagtttccatgcccagagcgactacgatcaggcctttcagtactattaccaatccactcagattgcgccagctaacttcgtgctgccccattacggactaggccagatgtatatttatcgaggagatacagaaaatgccgctcagtgtttcgagaaagtgctgaaaatccagccaggcaactacgagaccatgaagattctgggatccctgtacgcacactccaattcgcaaaccaaacgtgacatggccaagactcacctcaagaaggtcaccgaacaatttcctgaagacattgaagcctggatagaactggctcaaatcctggagcagaacgacctgcaggcctcgctcagtgcttacggcacagcctctagtattcttcgggacaaggccaagtacgagatacccgctgagattcaaaacaacgtggcttcactgcactaccgcctgggcaacttgaagatggcaaagctcactttggagtcggccctgaagcatgcaacctctgagatggacaaggatgtaaaatactacgagtccattcaggtcaccatgaagtacaatctggcccgtctgaacgaggcaatgagtagctacgatgtggccgacaagctgtacaaggagatcctcaaggagcatcccaactatattgactgctacttacggctgggttgcatggcaagggacaagggtctcattttcgtggcttccgatttcttcaaggacgcgctgaacatcaacaacgacaatccagatgcgagatcactgctgggaaatctccatttggccaagatgcaattcgctttgggacagaagaatttcgaaacgatcctcaagaatccgtctacttccaccgacgcctactcactgattgctctgggaaacttttcgttgcaaacactgcatcagccgagtagagataaggagaaggagaggaagcaccaggagaaggctttggccatattcaaacaagttcttcgcaatgatccccgaaatatttgggccaccaatggaatcggtgccgtgctggcacataagggatgcgtgatcgaggcgcgcgatatcttcgcccaggtgcgcgaagccaccgccgacttttgcgacgtgtggctgaacattgcgcacgtttatgtcgaacagaagcagtacatcagcgctattcagatgtatgagaactgcatgaagaagttctacaagcacaacaacgtcgaggtaatgcaatatctggcaagagcgtatctacgagccaacaagctggtcgatgccaaggcagtgctacttaaggcccgtcgagttgctccccaggacacagttctactcttcaacatagcagtggtcctctcacgtttggccatggccatactcaaggatgagaaatctactctggaaattgtgctgcaagctgtccatgaactggagctggctcaaaaatacttccaatatctgtccgtgcacggggataagaatcgcttcaacattgaggtggctggcattgaggcaagcacctgccaagatcttctctctcaggcccagtaccatgtgggccgtgcacgtcgcattgacgaggaggagcgctcgttgcgccggaagcaggaagaggagcgcgaggccttcaaaattaaggtggcggagcagcgcaagcggcgcgaggaggaggcaaagacctccagggaccagttgttagccaagcggcaggagtacgtggagaagaccaagaacatgctcatcattgcggacgctccacctgaaaaggaacgcaagaagggtggtgggcgaggtcgtaaagatgactacatctccggtaccgaaagcgataacgatggagctcgtcgtgagggagaacgtccctcgaagaagaagggcaagggggaacgcaaaaagggtggcggtcgcaagcgcaaaacggagaagtacgagagcgacagcgaggaagagccaggtgccagtggcaagtcgggaaagaagaagggcaagaagccgaagccggttaaagagtccaaggagaagctttctgccaagcagcgcctcaaggtgctttccaaggagacgatctccaccagcgaatccgagtctgacggcaagcgcagcaagagcagaagtagaagcaggagtcgaaatcgcagtggtagccgaagtggcagtgcctctagaagcggcagtgatcgcgaggctagccgcaagcgcagcaggagcagaagtggatctggatctgggagtgacagtgatgaagcaactaagcggaagcgcgccaggaatcgcatcgaatctggcggggaatcggatagatctgggtcccgtgctcgctccaagtcgagttcccgttcaagatctcgatccaagtccggatctcgatcgaggtctcgctccaagtcgggatcccgttcgagatcgcgctcaaagtccggttcccgctcgagatcccgctcgccgtcgggttcaagatcccgctctcgctctggcagccgatccaagtccgaatcccgtagcagatcagggtccccggaaaaataacgcacctctcaaccgtgttaaatcacttttgactatatttagagttgtcttcgagagctgcaaaaagatactaataaaaacgaactaattgccacacaaa

SEQ ID NO: 4179 - protein, 1150 aa, DROSOPHILA
MSNCIEIPLQDTDEVIEVDPDQLPDCPEVLSILKQERAPLHVWVNVALAYYKQKKTEDFVTLLEESRSDDATKEYRDSDKDLMRALDMLAAHYVQEAYREKSKDKKRELFMKATNLYTSADKIIMYDQSHLLGRAYFCLLEGDKMDQADAQFNFVLNQSPSNIPSLLGKACIAFNRKDYRGAMAFYKKALRTNPNCPANVRIGMAHCFLKMGNPEKAKLAFERALQLDQQCVGALIGLAVLKLNQLEPESNKLGVQMLSKAYTIDNANPMVLNHLANHFFFKKDYQKVHHLALHAFHNTENEAMRAESCYQLARSFHAQSDYDQAFQYYYQSTQIAPANFVLPHYGLGQMYIYRGDTENAAQCFEKVLKIQPGNYETMKILGSLYAHSNSQTKRDMAKTHLKKVTEQFPEDIEAWIELAQILEQNDLQASLSAYGTASSILRDKAKYEIPAEIQNNVASLHYRLGNLKMAKLTLESALKHATSEMDKDVKYYESIQVTMKYNLARLNEAMSSYDVADKLYKEILKEHPNYIDCYLRLGCMARDKGLIFVASDFFKDALNINNDNPDARSLLGNLHLAKMQFALGQKNFETILKNPSTSTDAYSLIALGNFSLQTLHQPSRDKEKERKHQEKALAIFKQVLRNDPRNIWATNGIGAVLAHKGCVIEARDIFAQVREATADFCDVWLNIAHVYVEQKQYISAIQMYENCMKKFYKHNNVEVMQYLARAYLRANKLVDAKAVLLKARRVAPQDTVLLFNIAVVLSRLAMAILKDEKSTLEIVLQAVHELELAQKYFQYLSVHGDKNRFNIEVAGIEASTCQDLLSQAQYHVGRARRIDEEERSLRRKQEEEREAFKIKVAEQRKRREEEAKTSRDQLLAKRQEYVEKTKNMLIIADAPPEKERKKGGGRGRKDDYISGTESDNDGARREGERPSKKKGKGERKKGGGRKRKTEKYESDSEEEPGASGKSGKKKGKKPKPVKESKEKLSAKQRLKVLSKETISTSESESDGKRSKSRSRSRSRNRSGSRSGSASRSGSDREASRKRSRSRSGSGSGSDSDEATKRKRARNRIESGGESDRSGSRARSKSSSRSRSRSKSGSRSRSRSKSGSRSRSRSKSGSRSRSRSPSGSRSRSRSGSRSKSESRSRSGSPEK

SEQ ID NO: 4180 - DNA, 5082 bp, DROSOPHILA
gaaaaaatgtaaatgttataagggattccaaagaaaacttgcttatattcattgattggaagcatgtttgataattatgaaaatgtttatatatttcttctatgtattttgtatgcgcacgtgaacattttcgcacgatgattgttaaacagataactgctaacacatacatatttaccaagactagattttgtctaaaattacctattcgttaggtaatacttgtttttttttttagaaaatggagatgaatttaaattaatttaatacctactcagtgtgtcaactcgaactttatccaccgatgagccacttgaagacctatcatatcttacatgtaataaggatgtgagcatcgtatatatggtaccagatctacaagcttattgggcagttgggcgaacatctcaggataaaattaaccgtttaggcttccgatataaacatggtcaaagtaccaaaaaggacttacttcatctctaaattctaaccatttttagacttttgaattgggacataatactgaagtaaagggaatctgctgttataaccgagtaattataatgatggccagggcagctgtatgccttattaaagtccggagtaatttgatcgtttctggcgaatccttcagattgacaataaagcataggaattccgcactgcttgataatagagtcagtacctgatttacaggtaatttaaaaattcatcctataaactggtgttacccgtagatggtataactcgtcatccaaaatgctgatacagtgttaaatgtacctaagatgatagcaacatacttaattaagcataacaaattaaattatactgttaaaaggtgtttctttcgttggattttagttttatttccaataatataagaatgagctttttcgtaattataaaaattaaatgccgttttttaagaacttttgcgttactatcttcttttactaactaatctatgaatctagtcagaatgcgcgttaggtttccatcaaaactttactacttgcagttctgcatattcaaaggcctgggctgcgccattggactccgccatcgctccgcacaaggacctcagctcggaaaaatgccacttatgcatagttttcattcccaattgtctgcccattatttgcgaggattgggatgtagttattgcgacaatggcctgcggtctttcaatccgcatctcctcaggcagctggttgagtatctcaagaggaagcttccgctgggccaagagacttgcgaactggatggactgctggcataagatgtggcccaggccacgtcgtctgaactccggcaaagtggccatgtattccacatctcccgtgctgtccacctggcagtgctcgttgacattaaagctcgcatcgacagcatcccaaagttccatgtactttatcatgtttggactcttgatctgggcgcaaatgtcgtagtatgaggttttcctctttgtattctggtttgggtgcactaaaaaaatataaacgattaaagccaaatatacaattggtacctacaaatattatattagcgattgcagccacaattctgccactttccacgtgtcgtatagcgaatgatattcctcgggatatgatgtgccttattagtttacctagctcggcaatggccaacggagagtctttaagtttagcgatcacacatccgaactcataattgatcgaaatgttcacaagcagctgcgatcagtacaatattataagcgtattattattaagcgtaaagatttaaccctgaacagatgcatacctcttcaacttcatcataaagcggtggagttacacgaaggacctcaaactccccttcgaaaatttcgacgcagtccttcatcgcccgaattccaaacgaacgaagaatgacgattaatttctataatcgtattcgcttaattttttagcccgattaaagtttaatttattcggactgctaatataatctagtacaacgtacagcttgctgtttaataaacgtatatctaaataccatatacaatataaatccccctattaatgtggaaaattgcaatttccttagcgtcaaatatattcgtaacgaagttttagtagatacaacgtatcaaaaagctactatttgtagcagttgaagaatagcattgattaccaatttcaactgccgaaacaaacaacattcatttaaaaataatttaaaattttgcaagacttggcaaatagcgaattaagataaaaacctttttacaaaactttctgctacataaagaacaacattttacgcttaagctttaagagagaatcggagcataacgatacaaagcatttcaaaagaaagtttattaataactatctttacttggtttccctctcagcaattcaaatttaactgaaattttgagtgtgaccgcataccgatagtaactactatcgatacgagacatatcaaatcaaacgagaaattacgtatgggatgtgcaccagacaagaaagaaaacatcacattagcttcgcatggcgtcggtggtgtaatggttagcatagttgccttccaagcagttgacccgggttcgattcccggccgacgcacagccgaatttttacaaaaatttacaaataaattttttacaaacatttacttttgtattttaaaatttatagatgacatgttcgcaaaacttgtgaataaggttaattcgctcgtcaaatctcttccctttgtactcaaattccgaataagaaacggtgttgatcactttaaagtctgttgcttttccaaccttttgagagaatctagaggtccagagtgcggtgacggcagctgggcgttttgatcttagtttatcatcgatatcctccaggccctttccttcggccagctccttggtcagttcaattgtgaactgggacaacgatcgacccaatcccaatcgctcgtggctcggtaaagtggccagaaacatcagttcacagaagcacaccatgttgaacatggcacacacatcaattcttccatccacttcgatcataaagtccattagacgccttgcctgaggacttttaacttcctcgttccggaattttaaaaagaagtgatcctcgccaggtggtggtgcatactgtgttttcgacacattaggattaatattgtttaaataaaaatcgaatcttacctgaattttattaaacgacacggacactacgcgacccgtatccgcctctttaaccaacaatgagacaccatccagagcggtttttctgcacaactctcgcaagtccaaacgagcttgccgattttccggcaaattaatttcacaggcaacacacacagattcgttgagaaagaatgagccgtcaagaacctgtaaaatgcacaattataaaaaagttctaaacaaatcatttcttgaagagctgcggaactagatttcaatatataaacaacatgctttttatgttggttttactaatatatatctgtgaatacatatatataatgttcgatttcttagccctccttaaatcttaagttactttctcatttcacaaaataaaaaattaatatgccgtaaagaattgaaaaaaatacaaaaagtgaactgcgtcggccgggaatcgaacccgggtcaactgcttggaaggcaactatgctaaccattacaccaccgacgccacgtcgagtttgacgcacaaaattagttttgtgcttctgatgaattaacgatgatcaaatttgcactacacaagcaatataaattgtttgaactttaagcttagttcttgatcgtctttatcccagaaataacttttttatggctgataggcatgattatgggagtccctcggaatcatactcacatctagcgcctcttccaggtcggagtgagtgacactgcgcacctcaaatttgcctgcaaataaagatatacaaaaacttaagtggtggatatttatttgtatgcaagacactcaccgtcgtgcaacgttccccagagtcttccgttttccatccgcattctcaatgccttatcggtcagccagctagctagcaaagtatagaagcaaccgcgtccagtggtggtcactaactgagcgatacaggtttacgactaggcaacatatatttttaaatggaagctttaaaaacctagcacatagacgccatctaatctaatcgcatgggcacgcgagtttttagatgataccgtcaacgaagcgaacttaatagagcactttaaaataatcagagatatgcaacgcgcatttagtcttagttgtacaatcgtaacattgcaattgcacgctttaagcttgataaacaaataaaagaccttatttacaaatttgtttatttacccacaactcttttaactataaattcgcttgtataaataaaaagttatcggtactcttatatcattctgtatacaaagccttttccaattttacctcgggctccatgaggactgtggcttctttaatttttttccgagtatctgatgcacttttatgcctgagatttttgtaaactcggaacgccagtctgatttcagcgacgtagtcatctctaaaatattctacctgcttttgagcttctgaaatttaatgaattttaatttaaaaaagaagtcatatatgtatatgtatgtgctataaacaaagcgttgttgaaatttccaaactccttgagatgtattttattgtggatgccgtcaaaattgaaatcaaccaaaaagtctagggcgagtataagatgaaattgttttttgaaacctccaggtcggggtgacccaccgaaccaccgggtttcaaaatgtttcgcatggtttgaatctaggtaatagaaaacactttataaagaatgctcaaactgaatgtttaaatttacttaaatcaatgatttgatgggatcattcatttcctcttccatcttctctatttgttccaagttctttagtcgaaatagttgaggtgaccagcctcccggttcagcaggactcatcatgtgtcgcatgctactgatggaaagtatttgaggtcctggagaatcagttggttgagccgtcagttg

SEQ ID NO: 4181 - DNA, 1531 bp, DROSOPHILA
acgcggttgcttctatactttgctagctagctggctgaccgataaggcattgagaatgcggatggaaaacggaagactctggggaacgttgcacgacggcaaatttgaggtgcgcagtgtcactcactccgacctggaagaggcgctagatgttcttgacggctcattctttctcaacgaatctgtgtgtgttgcctgtgaaattaatttgccggaaaatcggcaagctcgtttggacttgcgagagttgtgcagaaaaaccgctctggatggtgtctcattgttggttaaagaggcggatacgggtcgcgtagtgtccgtgtcgtttaataaaattcaggtaagattcgatttttatttaaacaatattaatcctaatgtgtcgaaaacacagtatgcaccaccacctggcgaggatcacttctttttaaaattccggaacgaggaagttaaaagtcctcaggcaaggcgtctaatggactttatgatcgaagtggatggaagaattgatgtgtgtgccatgttcaacatggtgtgcttctgtgaactgatgtttctggccactttaccgagccacgagcgattgggattgggtcgatcgttgtcccagttcacaattgaactgaccaaggagctggccgaaggaaagggcctggaggatatcgatgataaactaagatcaaaacgcccagctgccgtcaccgcactctggacctctagattctctcaaaagaaattaatcgtcattcttcgttcgtttggaattcgggcgatgaaggactgcgtcgaaattttcgaaggggagtttgaggtccttcgtgtaactccaccgctttatgatgaagttgaagagctgcttgtgaacatttcgatcaattatgagttcggatgtgtgatcgctaaacttaaagactctccgttggccattgccgagctaggtaaactaataaggcacatcatatcccgaggaatatcattcgctatacgacacgtggaaagtggcagaattgtggctgcaatcgctaatataatatttgtagtgcacccaaaccagaatacaaagaggaaaacctcatactacgacatttgcgcccagatcaagagtccaaacatgataaagtacatggaactttgggatgctgtcgatgcgagctttaatgtcaacgagcactgccaggtggacagcacgggagatgtggaatacatggccactttgccggagttcagacgacgtggcctgggccacatcttatgccagcagtccatccagttcgcaagtctcttggcccagcggaagcttcctcttgagatactcaaccagctgcctgaggagatgcggattgaaagaccgcaggccattgtcgcaataactacatcccaatcctcgcaaataatgggcagacaattgggaatgaaaactatgcataagtggcatttttccgagctgaggtccttgtgcggagcgatggcggagtccaatggcgcagcccaggcctttgaatatgcagaactgcaagtagtaaagttttga

SEQ ID NO: 4182 - protein, 491 aa, DROSOPHILA
MRMENGRLWGTLHDGKFEVRSVTHSDLEEALDVLDGSFFLNESVCVACEINLPENRQARLDLRELCRKTALDGVSLLVKEADTGRVVSVSFNKIQVRFDFYLNNINPNVSKTQYAPPPGEDHFFLKFRNEEVKSPQARRLMDFMIEVDGRIDVCAMFNMVCFCELMFLATLPSHERLGLGRSLSQFTIELTKELAEGKGLEDIDDKLRSKRPAAVTALWTSRFSQKKLIVILRSFGIRAMKDCVEIFEGEFEVLRVTPPLYDEVEELLVNISINYEFGCVIAKLKDSPLAIAELGKLIRHIISRGISFAIRHVESGRIVAAIANIIFVVHPNQNTKRKTSYYDICAQIKSPNMIKYMELWDAVDASFNVNEHCQVDSTGDVEYMATLPEFRRRGLGHILCQQSIQFASLLAQRKLPLEILNQLPEEMRIERPQAIVAITTSQSSQIMGRQLGMKTMHKWHFSELRSLCGAMAESNGAAQAFEYAELQVVKF

SEQ ID NO: 4183 - DNA, 5016 bp, DROSOPHILA
acttaccatccctactttttgacgggctatgtaaaatgaatttttggccaaattttcgcattcttcgcaaaatttgccaaaaatttaaaaacctagaattcccatttttaagcccaatacgttttgaaatttcagcaagagctgaaagaggcttggcaatccaaaaaaatcggatgttcttttacggaaagtcatgaaccaacttttgttagctgtaatttggcgtctaatgctaacatggctcatcactgggtaactattggccgtccctctctttctcgtgctatcgtaatttgagaaattcccaaaccccaaatgagagtcccatctggtaatttctcggctttttgtcaaaaacctgttgcgtacacagagaaaaatgtcacatctaatcaataaccatttggtaatagttagcaggcataaagataaactaatttgtatctaaaaatcataaccatattttagtttaaaaaccttaagtttgcttaatttttccacacattttcagggtcacaagaaaataaaggagctgtatgtagatttcgtaatgtaacaaacaaattaaaagtataatcggcaagtattcgttaatatatgtgtatatatattgtaattttgtcaagtgcatcttttatggagctaacaatctgcactctctcaagctccaaatgtctctccccatttgaagatcaagctttttgctccaaagcttatgcttctcgtaaaaagctccgcatttaaccaatttctaatgattttgaccaaaaagtatatcttacagaaataagatcaaccctgttgaccaaatttttccattttacaaaactctagtaatttaactgtgacctatcacttctatccaattctatcaaaatatctttacatattgtctatttaatttgaactataaattaaaaaaatacattataacgttactactgcatagcatttcccagtacgatttgccgccgaattgcataacaagtgtgtggtttttgataaatatatatataaatttataaacagaataaataagttgaaggagggccgtttagggcgctctctttcgagataacgagagatttgtttgtggtgtgttggaaaatgaatggacaggacattcatccggtttaccagtcgtcttcgacatccttggagatctcaaggtggaagggggtcttgaagctctgcagctttcgtcggcagtttctgctcagcggattattccgaagatcaacgagggccaaattgtcactggtaattgcctcatcggtatcaatttctagtgggttcaacgtacttcgattaggtattccacaaatggacgggatttcttgtttggacttacccaaaatggcattgttctgggcatccagactggcaagactctgaagcttaaagactacttgtggcaaaacgataaatgaattgttcgagatattcagcttggttagcgcagacaagctggcgaattcttctggcagcctcgacagtttgttgtgtgacagattaagatctggaaagggataagcgatttgtaagaatatattttatatatgtattagtgttgggcaacccacctgtgatggtactaaacttttgcgaaaacttgggcgaaacgcttttgagcacattgccactgagattgcaggtgatcaactctgtgtttcgcataagatgatataccgcatctggtatttgcatcagttcacaacttgaaagatctgaaagaacggaaatgtatacgattagtaaataaccttcagatatggacagctgaaacaataatattgggttcaagaacagaatgcatggaaaaatagctttttgccattgaaaagctaacaaatcatatgttggagcactagttctttaagtccgcaatatgtatatgggttatggttacattgatttggtatatatctcacgaactcctacctaaatgagcactttcgttggcattctcacaacgctcaatcaccctaaccaccaagtgcgccatctccaagtttccatgcgatctcctcgattactagcgatcgtaaccagccttatcactatacctatatgtatatatagatatatatatatatataactttccgattctctttgtgttcgctcacagccgaattggtcaacactgagcacgtgaatggaactgcctaaatataaatatatacatttccccatctgcgtacgcaacttattatgcgaaaagagagcccatatcgggcgactctctatactctatatgctcaatacagttatagtgactcacgatcgcgaaagcttttcgccaattttcgagtataagagcgagagaaagactctgtttgcttcgcggaaattgcgtctgtccacactgggaaactgcgatgtgctttctttttgggggaaaaccaatgaagtaaaattgaaaacaaaaacattgatttacaacatttcacacaaagagtgcctgttgtattatttgtatgttttaaaagcagaagcactcgtaaacatattaatagagtatttctgaaaaatatatttgcaaatgttttcggttcatggaaaacgaaaactaattaaatactgcgttctttttacgttacgttaggatgttcttatatgtacataccattgcaaaaatgcattaacattaaaaataagtacatacatttaatacattttagttatgaaaagtaggttggatggtttttagaaatatttctactgaaattcatgtgacccttacttttatagcaattagtttatagcatcgtaaatgttgccttactacgctattaaattgaaacaaattcaagactctaggcaaggtggcataactttaaacaaattgttgccaaagtttggctatacttcttatatcagttgtgataataatatattcttcctagaaaattgtcgttcttttggaacatattctttagatttgtataaaaaattatttaatagttttaatcgagggattccggacatcaaataactgaaggcaaatctgcgtatcgtagaatcgcagaatggaatcgtgtggggccaatgtctgggcaataattacccccacccccacccccaactgccacttccacttatcgcgcccattgataatttacctttctttgttaaccgatggcaattcgaggcaacaatctgggaaaacaatgcaataccaatatatacatacatacatacatatgtagtagaatcgcaatcggcagagacgcactttcctcgccaatttgtgcggggagtgttcctttcggattggtaaggccctcaattataaacaaattgttggcttttgtatggggaagtcggtgcgcaataactgaaattggcaattggccaattgtccatactacggacctattatatgcgaatgtatgcatatatggatggaataaacagaatcagtcgtctagttgcaactgcgtctcaagcgaaaatgactgggtcacatgtgcatataataaatgataattatattatccatgacttacccagtttgtggttctccttggcgtcttcgcaacgctgaaccacccggataactccttgtccagcgatcggggggcaggtaacgattccgccgattctcgctatatgcggcggaatactcggatcgtccgatagtccggactcctcgctgggatcctcactggatatgttcgtgttccggttgtcgttgccgtcgttgggatcgttgttgccattattaccaccattattaccaccattattaccaccgttcgggatgtttgttatgtcgttgccaaaaggccgcatcttttgtgttttttttttgttttcgattgatttgaactagtctttggtgtgggtatattaatttggctttgtctcactgggtaatcactcgaaaaaaaatatgtgtgtttttgtatttccaatcagtgtggcaagtgtgattggttcaagatatatctttcctattatttggattgtttaaacgcgagctacttcgcaaccaactgaacgtgactatcttccgcattgaaatattgaaaatgctttttactttcggtttttatagcacgaagaagaaagaaaagctgcgcataacaaaacaaatgaaaaataaaatgggaagaaaaacaaaaaataatagcacaatttggcattttcaagcgcacaccgattcgcagatactctttccttggctccgaaatggtcattagccttgcgatacaaggtactattaattggattttgccaaggcttgattgggagtatgtttaaaggaaatgggaagtgtatctcatttattgtcatacaaaagtatctgtcagattatcgtatttgagctaaagaccaatagatcaaaaatagatacatatagaattttgagaaatatagacttgtttcgctgagaactgaaataaaaagcgacttcttaagttataatctaatttcaatatattatgttcaaataaaggggtatggtgcaaccaattaaccccttctaaagggtatagctgcatcgtaacaaaatgtcttgtcatcttaagagcaatagcctctgatataaacagtccttctttctcttgccaataaaataagcttgttctatctgcggaaaagtgtaaaagttcaatgcgaaaatagagagtgaacgtttgagagagagagagagagagatgatcgcaccgtacactagtcagcaaaataatggaaaacataatacaaataatttaaccaaccttaaattacatatgatctaagacaaatgtatgcatatacatatatattcaatatatgcaattcatttagaacggctatcccaatttgttagccagtgtaaattggccaaaatacttatagaatcgacttttacgcatcagccgttcgctgtttttttccagtcaaaaacaagtcgtattgaacacctcatttccatgtatcatatatgtaattataaattattaagcaaacatttgtacaattattcacgataatggccattttcaaagttgtcaaggctattcta

SEQ ID NO: 4184 - DNA, 1102 bp, DROSOPHILA
agatagtcacgttcagttggttgcgaagtagctcgcgtttaaacaatccaaataataggaaagatatatcttgaaccaatcacacttgccacactgattggaaatacaaaaacacacatattttttttcgagtgattacccagtgagacaaagccaaattaatatacccacaccaaagactagttcaaatcaatcgaaaacaaaaaaaaaacacaaaagatgcggccttttggcaacgacataacaaacatcccgaacggtggtaataatggtggtaataatggtggtaataatggcaacaacgatcccaacgacggcaacgacaaccggaacacgaacatatccagtgaggatcccagcgaggagtccggactatcggacgatccgagtattccgccgcatatagcgagaatcggcggaatcgttacctgccccccgatcgctggacaaggagttatccgggtggttcagcgttgcgaagacgccaaggagaaccacaaactggatctttcaagttgtgaactgatgcaaataccagatgcggtatatcatcttatgcgaaacacagagttgatcacctgcaatctcagtggcaatgtgctcaaaagcgtttcgcccaagttttcgcaaaagtttagtaccatcacagatcttaatctgtcacacaacaaactgtcgaggctgccagaagaattcgccagcttgtctgcgctaaccaagctgaatatctcgaacaattcatttatcgttttgccacaagtagtctttaagcttcagagtcttgccagtctggatgcccagaacaatgccattttggaaattgataccgatgaggcaattaccagtgacaatttggccctcgttgatcttcggaataatccgctgagcagaaactgccgacgaaagctgcagagcttcaagacccccttccaccttgagatctccaaggatgtcgaagacgactggtaaaccggatgaatgtcctgtccattcattttccaacacaccacaaacaaatctctcgttatctcgaaagagagcgccctaaacggccctccttcaacttatttattctgtttataaatttatatatatatttatc

SEQ ID NO: 4185 - protein, 249 aa, DROSOPHILA
MRPFGNDITNIPNGGNNGGNNGGNNGNNDPNDGNDNRNTNISSEDPSEESGLSDDPSIPPHIARIGGIVTCPPIAGQGVIRVVQRCEDAKENHKLDLSSCELMQIPDAVYHLMRNTELITCNLSGNVLKSVSPKFSQKFSTITDLNLSHNKLSRLPEEFASLSALTKLNISNNSFIVLPQVVFKLQSLASLDAQNNAILEIDTDEAITSDNLALVDLRNNPLSRNCRRKLQSFKTPFHLEISKDVEDDW

SEQ ID NO: 4186 - DNA, 6954 bp, DROSOPHILA
gtctattccgacatcgacgtcagcaacttggccaataagagtgatctggcggctctggtatcccttgtggagtccgtgcgccatgagcagcaacagcttcggaatctctgcgagatgattttggagcaacagcagcgagcgaaacccgaagccatttcaaaagccagcagtaccactggcacccagtgcgatattctgaccaccaatcaaggtgcgtacgttgaatctgtatgaaaagaatccaataaaacatccttcctagcaggtagacgcttgtctcccattatgcaggattacatagcagaggaggaggaaccattgccgccgccacaagcacgagtgattcctcagtttccgtctcctcgaccacatccgccgatcgcccaatctacgggctaccgggccaatacgcctcaggcgaagcggatccctcaactggccaagcccaacaccgagaagagcatggtgatgaacgagctggcgctgaaatacttgcgccagccagtggatgagttgatgaaggatatgcgcctgggggcgtcgccgaagtcccctaatccagagccactgcgtccgatcgacaacataggccacgcgcagagtccaaacgacatatccaatgcttcgtacaagtatctcaaaaaataccgtctgctgcccgaggagcaactggagccggtgtgtccacaatctcccatggcggcgaccgccccttcgccacatattcaactggacttggagaatatcaggaaccagccgaagctgttgtgaaagcatgtacaatgttcgttttgttatttatgcatatgtctatttgcgatttaagtggaaatatatttcaatacacggaataacgttgacaatcttctggtgatcccagcctaaactaacgtagagaaccactctttgtatacaaaacattttgtgtttgacatcgatatctgaagacacaataagaatatacgtttagtgaacttggctgcgatccggcgacggggctctaacgcagaaccaactgtagctcggatgcggattgcagtaggaccttcagtccctgcataaagcccgcgcactgcgcaaagtccgttccgaaggcgatttgcgtgtggatttccatagcattggcatagtcggatatttgaatgtactgaactatttgattcagatattgcaccgtggtgggagtgagctggaattaaagtaaatgccatttgagaattgcaattgaatcgcgatctaaggcagcagctctcacctttccatctctcaggcagtcgtagagattttcgagcctcttgacaacatcgacaaactttcgttttgtgcgcttaaaatgtaagaaaatttataaacaaaagtaagttattccttttgtctatatggatcatttattaatagacttaccggatcattggttgcgcccaggcagcggttcttcagctcctccagcacagtctgcaagtagatgtactcctcggggagtggtggcttctccttgggcggcgccggttggcgctgttgctggatgggcgctggctgctcggtatagccaatggtttgctgttgtccctgccagtttggctgctgaatcccaggggctggctgctgaggctggagatatgattgctgatgctgctgctgctgctggggattgttgttgaaggcagccgggttgtagtacgtattgggcactcctccaagtggtgctgcgtgctggagaaaataaatacatttttgatctacttcctgaccaataatccgcttttaaatcccacctgatattgagaggggtccacataaccgttctggttctgattcgggtcgactgggaacaggggatggaagatagcagcacttggctcaaccaccggcttcggcttaggctgttagagaaagaagcaaacaattaggataaagcctatgacatttcgtataccaagtacttaccgctcgcgaagatttcagtgcaggaggatcgttccagccaggtggtggtgtgggattgcgttgcacattctggatgactggtggcacagccggcggtggcattgtctcgatgggattcacaccgggcacgaactgattctgctgagctggcatgagtggcgaagggttgtaaggttgggcagccgcaataggattcgtgttgaacgcgttgctgttgtacgttggcacgctagctggctggggtgcgggcccaggcactcctccgccgccaaatggaaccgctgatggaacgggggccggcactggattgtatggcattccgtaggaactggttggagctgctacagatgggtccaaaacgtatttggagcggccagaaagacccgatccgccggaggatgatgcgccgcctgctggcggcggaccacctgaagagctggcattgctgagtgggcgcggtggttgggccaggggctctggtttcacaggctgcggattgaatatctgcggcggagcctgaggctgctgggctcctgggtagcttgtttgtagtggaggcacttgcgctggccagctgggctgtgcatactgattgggcggctggccgtagggcatgggagccgaaggctgtggctgcgagaacgatccacgaccacgagtcggttggtagccgtgtggcgcagcagcgactgctgcctgtggctgggtgtagtccaggttgacagcgttatttatccggtctcgtaggctctgcagaacatcgctttcgctggcggcagctcctccgcccaaggtggtaatgtactgcagggctgcagtcagagcaccctgggacgcaagaagaccgccgtactcagtcagaaagccggcaaagcgaccagccaagtccacggatatgccttgctgctccaacgacttgcacatcagcatcaccatctcagccaagtcctgcagctctgtggtgttgggcttgtagccggggttctgctgctccagccgctttaactggtaccacgcggtgaccagtttgtcgatgctgccggcgcaaatgtagcagagcatggcgttgcgcgtaaactcggcgcttgaggcgcactcacttaagaggcgatcgcctagtcgctcgcagatgtccaccaccttgcgctcgctgtgcttgagcgcggccaccagggcctccttccacgagtccacagtgcatctgttgacgaagtccaaccagtcgcgcgataccaaagcggagataacgtgcgatagctcgttcttctgctgcagcaggtagcgcgtttgcgtgcggttcagagtctcaatgccagccgttgaggcgataatcagggcttcaggaatgcgctgtgcttccagacagagctccacggcagcgtccacattgccagtgagtattgcctcggcaatcaggctatccgagtctgtaaagtgtagaaaaccgatcatttaacaagtgcttactagctggcaaagttagaactattttgcgcaaaagaaaagcttttaggttattaatgtttagataaaaagttaccaaactaagtgagcactatacaacatgtattacttacggtctccgctgggaaccttgaattgcggcctcggaggagtggcaaagtcgttgtgattttgtgagtcgattgcattgccatcaaacttgttatcttgcgtctgctgggtaagaaataacatttgtataagaatacacctcaaatggttcccagaaaaagctgctttgagtttgttggcctcgattaagagcctggcatgtaagctcttaccgaattatcggtgctatagttagtactctgatcacactcgacctcagaagagtcgctctacggcaatggcatagcatgagttatgttatcggatagaaatatacagagcaagatgagcatacgtggaagatcgaaagtgtgcgcaatgctgcttgtttttctttttcgactgataagacaatgtctaatgagcacttacatgggtcagtgtcgagatgcgggtcgtcagagtatccacatccgaatgcgagttgccatccgtttccttgataaacttgttgaacttgctatcgatgtcgtctttgttgtagccttaaaagtaagacaaaatcttagcttaagtagccgcgtacgcaaagagagatcctacccaaaaggttcagcatttcctccttgggattaagctcgaagttcgccttaataaagtaccagatgtagcggccatgctgatccggtgtctcgtctgctcgctgccgacagtaatccgaataattggcatcgaccagagagcgttccagggcattagcccggtccacaagggcggattcggtggttagctgttggaccttgaccgttttcgaggttccattgaaactgaccaacttgccaccgaactaaaaacgaagaaattgatttttaaataggtttataaacttgtttacgccagctaactaactccaaaggcaacgccacagggccgcttcatccatttgggagcgtgcgccaggtcatggtaaaccacttgcgtggcctgctgcggaattggctcctgggcaaactgatccatgcccggaaacgagtcggcaatcttgttggcggtttgcacaaggtggtgagtgcctccatgtagagagtaaatggaaactgctccctccaagctggcgctagctatcagagctggattacgtgggcaaaactgcacatcggagtaccacgaggcagtggtggcaacctcagataggatttctccctctggaatcttggtattggggttccagcaatagatgcggttgtctttgccacacgaaaccattagatcgttgtcctgcaggcaccacgacattcccagcactccgcgctcatgaatctggtatgttttggctggagccgtggcatatcgcagatcccacagctgcaccactggcgcctggtcgtcctcggaagccagccacacctgcgtcgccgcctccggatgccactcaatagcgtgccacctcactcgcgactgcgagtcggagagcttgatgatctgctgactcttacgcagatcccaaatcacgcagcgtgtgctgaacacggaggctagaatgtgctgcacctgcctgttccatgctacgttctttacgtcctccagtggttgtgtcttggtgccgggactcatgcttgtttccgggttgttgaggtcccagattaggatttccgattcggaggcgcatgaggccagcaggttgttctggaagggattgaagtccaacccgctaacggcgcctgtgtgcttgtcctggcgcttcagaagcggctcctccttgcctgcaagcagcttgtcggctgagtatatgttgatctgccccgcctcgcagccgcccacaatcaggccactggggtgtggtcccactggggaccagatgagtttttggaacctgcgggaggaaaagccggttatgtgaacgacttgatgcacaaattgaaagccataactcacttgtactggctggaaacgctggccctcagctccagatcgtatgtggcatcgctgaagttcggtgagtacaactccagagtggaattggcattggaatcgaattgttgggcggcggtgccggcggccaagagaatctgctgctgctgcgccggcgaccaggcgatgttcaccgtcttttgcagttccttgatcttcatcttgcaatgtcccttcgtgctgctcgtgtaaataaagcgaaaaaacacaaatattatgggaggtacaagttcagaacgaaattgtgtcacgtccaattggagtaagccccgtcatcacttttcccattggcttccccattgcagatgtggcccagtagtgcccgccggcctttaagtatctttaattatgctaattgcgcaacttacacacaattgtgaatgcaatttgtactcgcttgcgctgcaacgagactttttgatcttgaatttaactggaatcgttaatatttttaagaaccgtaggaacggccagtgtgaccgtgctctgagccaacgtaatataccacagggcacgcactgaaataccaaatgcgtgcgaccagaatatactgcgagtttaacggtatgcaatttaaatattccgtttcaatgtgcaattttaaaaatagtttttatcagtatacattattaaaaatgatagtcgaaattatttaaagatttattttccatcgcattttatattcgtaaactagcttcagcacttttaatattaatatttattatgaactcattttaaattccagatcactttgcatttattttttgactggaactggactcgaatgtagatctctttattataggtatctttcataaatataagctatgtttatttaatacgcatggtatgcatccactcatttggcagacgatatggccgccacacgctgctccaccttggccaccttgctgttgatagtctccagattctgggcgaaagtctcctgtacggaatgcagcagctccttgttgttcaccaagctagtggtgatggttccctgcttctgctcaatctctgcgatgatcttggcgaaattgtttgctgcagagcaagttgattagttacagaaacaagcacaatgctaaaatgctaaatagaattgcttaccatatttatggagggcctcgagggcttgcatgcgttcgatgacgtgcggcagtatttccaccactggctccgtgcgcttcgcgatgtcgtatagttccgtaatcttctgatctcgtttggcgtcctgggcactgccgctggacttttcggcgatagcatccatcttgccggccagcgaggtcaggcgctgctcgatggtgtccagtttatcaggctgtatcagggccgccttggtgcttagatgacgcactgcctctagtacattggtggtgttggtggcggcggtaaggcggctcaacttgtccggctgagcgcccagcaccttctccagctgcgagattcgctgctctagactggctacgcgggccgtgg

SEQ ID NO: 4187 - DNA, 3837 bp, DROSOPHILA
cggtcacactggccgttcctacggttcttaaaaatattaacgattccagttaaattcaagatcaaaaagtctcgttgcagcgcaagcgagtacaaattgcattcacaattgtgtatgaagatcaaggaactgcaaaagacggtgaacatcgcctggtcgccggcgcagcagcagcagattctcttggccgccggcaccgccgcccaacaattcgattccaatgccaattccactctggagttgtactcaccgaacttcagcgatgccacatacgatctggagctgagggccagcgtttccagccagtacaagttccaaaaactcatctggtccccagtgggaccacaccccagtggcctgattgtgggcggctgcgaggcggggcagatcaacatatactcagccgacaagctgcttgcaggcaaggaggagccgcttctgaagcgccaggacaagcacacaggcgccgttagcgggttggacttcaatcccttccagaacaacctgctggcctcatgcgcctccgaatcggaaatcctaatctgggacctcaacaacccggaaacaagcatgagtcccggcaccaagacacaaccactggaggacgtaaagaacgtagcatggaacaggcaggtgcagcacattctagcctccgtgttcagcacacgctgcgtgatttgggatctgcgtaagagtcagcagatcatcaagctctccgactcgcagtcgcgagtgaggtggcacgctattgagtggcatccggaggcggcgacgcaggtgtggctggcttccgaggacgaccaggcgccagtggtgcagctgtgggatctgcgatatgccacggctccagccaaaacataccagattcatgagcgcggagtgctgggaatgtcgtggtgcctgcaggacaacgatctaatggtttcgtgtggcaaagacaaccgcatctattgctggaaccccaataccaagattccagagggagaaatcctatctgaggttgccaccactgcctcgtggtactccgatgtgcagttttgcccacgtaatccagctctgatagctagcgccagcttggagggagcagtttccatttactctctacatggaggcactcaccaccttgtgcaaaccgccaacaagattgccgactcgtttccgggcatggatcagtttgcccaggagccaattccgcagcaggccacgcaagtggtttaccatgacctggcgcacgctcccaaatggatgaagcggccctgtggcgttgcctttggattcggtggcaagttggtcagtttcaatggaacctcgaaaacggtcaaggtccaacagctaaccaccgaatccgcccttgtggaccgggctaatgccctggaacgctctctggtcgatgccaattattcggattactgtcggcagcgagcagacgagacaccggatcagcatggccgctacatctggtactttattaaggcgaacttcgagcttaatcccaaggaggaaatgctgaaccttttgggctacaacaaagacgacatcgatagcaagttcaacaagtttatcaaggaaacggatggcaactcgcattcggatgtggatactctgacgacccgcatctcgacactgacccatacgcaagataacaagtttgatggcaatgcaatcgactcacaaaatcacaacgactttgccactcctccgaggccgcaattcaaggttcccagcggagaccactcggatagcctgattgccgaggcaatactcactggcaatgtggacgctgccgtggagctctgtctggaagcacagcgcattcctgaagccctgattatcgcctcaacggctggcattgagactctgaaccgcacgcaaacgcgctacctgctgcagcagaagaacgagctatcgcacgttatctccgctttggtatcgcgcgactggttggacttcgtcaacagatgcactgtggactcgtggaaggaggccctggtggccgcgctcaagcacagcgagcgcaaggtggtggacatctgcgagcgactaggcgatcgcctcttaagtgagtgcgcctcaagcgccgagtttacgcgcaacgccatgctctgctacatttgcgccggcagcatcgacaaactggtcaccgcgtggtaccagttaaagcggctggagcagcagaaccccggctacaagcccaacaccacagagctgcaggacttggctgagatggtgatgctgatgtgcaagtcgttggagcagcaaggcatatccgtggacttggctggtcgctttgccggctttctgactgagtacggcggtcttcttgcgtcccagggtgctctgactgcagccctgcagtacattaccaccttgggcggaggagctgccgccagcgaaagcgatgttctgcagagcctacgagaccggataaataacgctgtcaacctggactacacccagccacaggcagcagtcgctgctgcgccacacggctaccaaccgactcgtggtcgtggatcgttctcgcagccacagccttcggctcccatgccctacggccagccgcccaatcagtatgcacagcccagctggccagcgcaagtgcctccactacaaacaagctacccaggagcccagcagcctcaggctccgccgcagatattcaatccgcagcctgtgaaaccagagcccctggcccaaccaccgcgcccactcagcaatgccagctcttcaggtggtccgccgccagcaggcggcgcatcatcctccggcggatcgggtctttctggccgctccaaatacgttttggacccatctgtagcagctccaaccagttcctacggaatgccatacaatccagtgccggcccccgttccatcagcggttccatttggcggcggaggagtgcctgggcccgcaccccagccagctagcgtgccaacgtacaacagcaacgcgttcaacacgaatcctattgcggctgcccaaccttacaacccttcgccactcatgccagctcagcagaatcagttcgtgcccggtgtgaatcccatcgagacaatgccaccgccggctgtgccaccagtcatccagaatgtgcaacgcaatcccacaccaccacctggctggaacgatcctcctgcactgaaatcttcgcgagcgcctaagccgaagccggtggttgagccaagtgctgctatcttccatcccctgttcccagtcgacccgaatcagaaccagaacggttatgtggacccctctcaatatcagcacgcagcaccacttggaggagtgcccaatacgtactacaacccggctgccttcaacaacaatccccagcagcagcagcagcatcagcaatcatatctccagcctcagcagccagcccctgggattcagcagccaaactggcagggacaacagcaaaccattggctataccgagcagccagcgcccatccagcaacagcgccaaccggcgccgcccaaggagaagccaccactccccgaggagtacatctacttgcagactgtgctggaggagctgaagaaccgctgcctgggcgcaaccaatgatccgcgcacaaaacgaaagtttgtcgatgttgtcaagaggctcgaaaatctctacgactgcctgagagatggaaagctcactcccaccacggtgcaatatctgaatcaaatagttcagtacattcaaatatccgactatgccaatgctatggaaatccacacgcaaatcgccttcggaacggactttgcgcagtgcgcgggctttatgcagggactgaaggtcctactgcaatccgcatccgagctacagttggttctgcgttag

SEQ ID NO: 4188 - protein, 1240 aa, DROSOPHILA
MKIKELQKTVNIAWSPAQQQQILLAAGTAAQQFDSNANSTLELYSPNFSDATYDLELRASVSSQYKFQKLIWSPVGPHPSGLIVGGCEAGQINIYSADKLLAGKEEPLLKRQDKHTGAVSGLDFNPFQNNLLASCASESEILIWDLNNPETSMSPGTKTQPLEDVKNVAWNRQVQHILASVFSTRCVIWDLRKSQQIIKLSDSQSRVRWHAIEWHPEAATQVWLASEDDQAPVVQLWDLRYATAPAKTYQIHERGVLGMSWCLQDNDLMVSCGKDNRIYCWNPNTKIPEGEILSEVATTASWYSDVQFCPRNPALIASASLEGAVSIYSLHGGTHHLVQTANKIADSFPGMDQFAQEPIPQQATQVVYHDLAHAPKWMKRPCGVAFGFGGKLVSFNGTSKTVKVQQLTTESALVDRANALERSLVDANYSDYCRQRADETPDQHGRYIWYFIKANFELNPKEEMLNLLGYNKDDIDSKFNKFIKETDGNSHSDVDTLTTRISTLTHTQDNKFDGNAIDSQNHNDFATPPRPQFKVPSGDHSDSLIAEAILTGNVDAAVELCLEAQRIPEALIIASTAGIETLNRTQTRYLLQQKNELSHVISALVSRDWLDFVNRCTVDSWKEALVAALKHSERKVVDICERLGDRLLSECASSAEFTRNAMLCYICAGSIDKLVTAWYQLKRLEQQNPGYKPNTTELQDLAEMVMLMCKSLEQQGISVDLAGRFAGFLTEYGGLLASQGALTAALQYITTLGGGAAASESDVLQSLRDRINNAVNLDYTQPQAAVAAAPHGYQPTRGRGSFSQPQPSAPMPYGQPPNQYAQPSWPAQVPPLQTSYPGAQQPQAPPQIFNPQPVKPEPLAQPPRPLSNASSSGGPPPAGGASSSGGSGLSGRSKYVLDPSVAAPTSSYGMPYNPVPAPVPSAVPFGGGGVPGPAPQPASVPTYNSNAFNTNPIAAAQPYNPSPLMPAQQNQFVPGVNPIETMPPPAVPPVIQNVQRNPTPPPGWNDPPALKSSRAPKPKPVVEPSAAIFHPLFPVDPNQNQNGYVDPSQYQHAAPLGGVPNTYYNPAAFNNNPQQQQQHQQSYLQPQQPAPGIQQPNWQGQQQTIGYTEQPAPIQQQRQPAPPKEKPPLPEEYIYLQTVLEELKNRCLGATNDPRTKRKFVDVVKRLENLYDCLRDGKLTPTTVQYLNQIVQYIQISDYANAMEIHTQIAFGTDFAQCAGFMQGLKVLLQSASELQLVLR

SEQ ID NO: 4189 - DNA, 2844 bp, DROSOPHILA
ggcactaagtacgcggcaggcgagaacataaccattgcagacttcgctctcatttcggccacgatctgcttggaggcaattaactttgacttgcaccagtttacgttggtgaacaagtggtacgaaaccttcaaggtggaatacccgcagctgtgggagatcgccaacagcggcatgcaggagataagtgcgtttgagcagaacccaccggatatgtcacacatggaacacccattccatccgacgcgcaagtctatgggcctgaagttgtagattgtagttttagaacttaagaccctgccagcaagggaagtgaaaaacgttctccttttaattcttgtgaaatattcgatatatatatatatattgatataataataataacataattatataataatatataattataggttgttttgccttccaaattgacatgaacaaagaagttcagaagtctaagaaaaaatagtattaaaatgtgcccacaaaattttatgcgattgaaattgcaagtcgaactggaggtcaagcttaaattttttcaacaaaatacatatttccattatttttgtcttattagaaaatattatcatttcttgctaacaatttgaagttattttatggcaagaatccctttaaatcaaccttggttattataaggactaatcaacctgtgtttatcatttaaaataaaacatttcgataaaaccaaaaatgtgtttcctttgatatgattgtattaaaaaatcttctgataaaaaacctaccgatgttaataaaatcataatgttggtgattaaatcgaactaactaaaacgaaaatattaacaaccatagtcgactttttcgtgtattttctgcggctaatcgcttacaatagtctctcttcaaatgtaattaacttttggattttttggactgtaatttttgtaaaatgctcagtaaaactccactccgctaccaccgatttaagtatcaattaattataattgattagctcacctgaaatcctcaattagcgcgccaatagcctgcgtaagctttgcgtatttctcgccaaaaccagtcccgatggtcagctcgcccatcagactgtgggcatccggttccaggtacatctccagctgtttccgcgcatcgctgctcagcagatccactttggtcagcacattgatgtgcggctgctccatgttggccatcacactgagcgcggccatggtgccggaaatgaacttggccccgtccaccatgaactgcgagtccaagcagaagacgacgcatgtgcggaagttccaggactcgagcagttccaccagctgtctgcccatctttaggtgagtgaagagctcgatctggccgggcatgtcgaacaggatgtagtcatcatccggctcgcccaccatcagctcgttctcgccgccgcagagctgttccttcagccattcctggttctcgatcaagaactccaggcagaagatgaggccgccgttcggtccgtagtgcagctcttcgtcctccatggcatcgtccaggtggattagatcgcgaatgtccgtcagcgggttgtaggtgaagtgctctgccgccggatcgaggttcaccacctgaacatttctcttgcagtccatcgcatattgctgcattaagctgcagtacgtcgactggggagaatattgtgtgttagattaatggcgcgcatcggctgccgtttttgtggacataccttgccactgcctgccgggcccacaattatttgggcaaaccgcatgataatgagtcgtaagttattttcagtacctaaattccgcaacaaaacaaattctaatgtgaggcatagcgtgcgccagctgtagtgctgcacaacgtacaaactctgcacgattaatattcgcctcgaataggttggcagcactacatgtggcccgccaagaatctaaaattcaaacagcattaggtacgcgaaaacgttatacagtaaatggaaggaacaataaggaagcagcttcccttaagtttatttgaaagctcttatttatttcgatttattttcctttaaatatgcctgaaacaagtatttctatattatattaagttaatacttagattaacttctttaaaaacaataatcacacatttttgtaattctaaaatagatgattatgagactatgatttgatgattcaatgcgcaaagtttatggctccgaaaaaattatgagttataaaagataaaggtccgaaaatttagtaagctgagcagcccacgagactataaaaggggcagcctatacacttcaactgtttttattttgaaattattactcaagcatggcacccagttcggaaaaggttcgctaatgaattactaaaaatgaaataaataaaacttttacaaaactgcagcaaagttatgaagaactaatggagaacatgaaactttgcgaggcggaaaggatatacgcgctctcgaacagtgtcggaagaatcctggatgacgcggaggcccgaaagatcctaaggcacttcatgaagagcgaaaataagtccatgcagtgcgtggacatctatgagaagtgcgcagagtttcttgtggagcacccgaagtacgagtcctgccactttgaagtcctggtccgactcggattgccctcccatctgaagcagcgtctattttatcgattaaacaatgctgatcccatttccatctgcctctgccttaaacacatccaggaggaatgtctcagtgaggtggccgagtcattcagcgccttcaaggaatctatcacagagacccgaatgaatcttaaacttaagcaactaggataagtaaaggagaaaaata

SEQ ID NO: 4190 - DNA, 782 bp, DROSOPHILA
cacgctatgcctcacattagaatttgttttgttgcggaatttaggtactgaaaataacttacgactcattatcatgcggtttgcccaaataattgtgggcccggcaggcagtggcaagtcgacgtactgcagcttaatgcagcaatatgcgatggactgcaagagaaatgttcaggtggtgaacctcgatccggcggcagagcacttcacctacaacccgctgacggacattcgcgatctaatccacctggacgatgccatggaggacgaagagctgcactacggaccgaacggcggcctcatcttctgcctggagttcttgatcgagaaccaggaatggctgaaggaacagctctgcggcggcgagaacgagctgatggtgggcgagccggatgatgactacatcctgttcgacatgcccggccagatcgagctcttcactcacctaaagatgggcagacagctggtggaactgctcgagtcctggaacttccgcacatgcgtcgtcttctgcttggactcgcagttcatggtggacggggccaagttcatttccggcaccatggccgcgctcagtgtgatggccaacatggagcagccgcacatcaatgtgctgaccaaagtggatctgctgagcagcgatgcgcggaaacagctggagatgtacctggaaccggatgcccacagtctgatgggcgagctgaccatcgggactggttttggcgagaaatacgcaaagcttacgcaggctattggcgcgctaattgaggatttcaggtgag

SEQ ID NO: 4191 - protein, 235 aa, DROSOPHILA
MRFAQIIVGPAGSGKSTYCSLMQQYAMDCKRNVQVVNLDPAAEHFTYNPLTDIRDLIHLDDAMEDEELHYGPNGGLIFCLEFLIENQEWLKEQLCGGENELMVGEPDDDYILFDMPGQIELFTHLKMGRQLVELLESWNFRTCVVFCLDSQFMVDGAKFISGTMAALSVMANMEQPHINVLTKVDLLSSDARKQLEMYLEPDAHSLMGELTIGTGFGEKYAKLTQAIGALIEDFR

SEQ ID NO: 4192 - DNA, 4182 bp, DROSOPHILA
catggcggctgcttggagagcagcggaagaaggcagtcccgggaacatggtcgggtagttggccatcaggtagtagggaaacatgagcatcgcattctgggccagcgtcgcctgtttggcccactcggcgaggctttcgaagtaggcttccttggtggagcgctccgtaagcttctgacccgtctcctcgccttgttcacccattttctcagtctcacaatgatcgattttgttatttggctggcttttatttatttatacaagttgacgtgtattgcaatcggtagggtgtgtcggcgtatcgctgcgaatgacaaatactgctaaatacgattccctgtgaatttcaagcagggcgggaaaatttaagaagactcactttaacttttgatgcgaaatatttgatagtacgtaaaattcgaaaatatattattctaactttttgtacatacaactataatgttgaataaaaagtagttgggcaaccgaacaagaagctgtttatctaatgaactaaatgtaatgcattttgtagttctttaatatataaattaaaagcacgaggtcatacattacccgtatttacttactttgaaatcagcgacacaacgaagcacatacaattgtctgaatattttattattacacagttcgaagtggtttgatttcttccttagacatagcaacttaagaatcgaatacaataaatccgttgacaacccgccatgatattttagattcacattgacaaacaggcgtgaataagttcttaaggatatcaagcatttaaaaagtactgcgccagaagtctacaccttacattcgtaccctggcgtggacgattttgaatgcatgcgtatcaaatacctagctaatgttgaaaaataacatgtacatttgattggaaagtgcattacgttctgtggttcaattttcaattttaagtagttgggtgttacacgcgtatgtatgtaccttttatgatttaattggaatagatttagacgagcagacgcgattcctggtggacatggagatggacatggacatgaacatcgtttaatacagtggcttgctcgacaatgaattcttctacgaacacgaataggacaactaactaaattggcaagttgttgtataaatcgaatgtatataaacaagcatcgccgtctcacacacacatgttgcaacaccgagacgaaccgaacactcgtgtcttacaattaattaaaggaatacaactacataaatacaccgcgtatttattgccacacattaccgatattaagattcccaaactgctggttcagatttgacggtactgaggaggtggtgggccccgttgcggcaaatccgcccgctccttgtggcggttggccaatgttcagcccactgggcaggggctgcattaagttcatggagaggccgccaagctgtgggtgatgttgctgctgaagctgctgctgatgttgctgctgctgttgcggaacagctccaaagagcggcatcccactgagaatgctctggttcgtttgcataagatttgttgcagctgcctggcctgcggcagcatagggactgcccccggtgctgggaaactgggctccagtaaagccatgggagccgcccatgctcatcgcagtggcactgctgatggcagcattgctgaacgcattcggtgcagccataactggcgaattatacatgctcaccgagttcggcggtgtcataaactggtgggggatctgctgttgctgctgctggtgcatatagccgcctggggccatgcccgtgaagccgccaaagttcatctgggggttgtgggtggctggcgcgctgccgtacagcgccagaatgctgtccttggacatcttgccagactgatccttctcgttgccgccggcgcccagtgagccctggttgaagaagtcctgctcctcttgtgccagcgagttcggcttcgagcccatcaaattggcggcgtcgccgttgctgccaatcggcttatccggctggccggcaatcgattcggcgctgagaaagctggtgaaactttcgttttgcaggtcttggctggcattggtcgcgacaatgggcttggtgggcgaggacagtcccaagaggtcgctttcgccggcactgctaacgccgctgctgttcagctggacgcgttgcgtcgtctttgggctgcagccgccgacctggttgggtttcggctttggaagcggcgcgggcaggggggtgttcttgagcgccgacgcagatgacccggacaggcgcttgtcgccgctgccaccggccactccagccaggcccaaagtggcctgggcctgcgtgctcttcttcttgcgcttctggcgctcaagctcctcgtcgatctccttggcccagtccactttcggcggcgagggaggcacccactcgcgggccaggtacttcttgtgctcgtacttggcccggatgaaattctccagcgctgtgtccgtctgcgggcgacggaagccgtccggcagctgcgcctcgtagacggcgcgagcccgcgagtttcccatctgctgcagcgagatcacctgctctggcgtccaagtgtccaggttgacggacttgacgcgcgatatgtgcacgcccagattgcgatggatgccggcgcagcggatgcagagaaacatgcccaggttccaggaggcccagcgcggacctaaggataaaaggtagcattcagtgacagcacataggctcatatcgcagtgcagctgcatgtgtggtgtgtatatccacgcacgcacgcacacagatgtgcgtcaccaagaggcgtatctcttggcggagaagtggaccccattaacatacccttggcatcgcagtccacgcagtacttgttgtcctcgtcgcggagcatctgcgtcaggagggtctggcacttctcctgaattagcttcgtgcgctgtcccgcattcgaggagctcattttggggtatgcttgcggtctgtgaggcctggtttcgatatttgtggcggggcgcaactgtgcgacgtggcgtgggcgacgggtagagttggcggagcttatctctgcttcacatggatatacaactaccagcgaattgaattgacaattttctacaagtttttgctaccgaaaaagtgatgcgtccagtgggaccgtgtggcggtgaaggcagctagcctccctggttgtcactaacgccaagccgtgccatcttgccattcacagggaaccgaagccactttttaaaaaagttgtttacttttacttctgcccacagaacatttgaactcacatttgccggcaaaaatggaaattttgcgaacgaaactagaggcctgcctgctgatactgaacaggaacaatgcagcagctgcaaactggctgaatgtaagtgggggaaacggaccactagccccaggacatcaatcacttgttgctttgaatttcaggacctgtgcgccgtgctattggaattcgctactttggcccacagctccttctgctcccaggggcagtcggagtgctcggagctggtgtgcctctgcctcagccagattatgatctgcattcgccaagtggagaacaccatgaaactagaatgcggcaccacagtctcggtgagtaatttggatctcatccatgcattgcacaatgatgtctaatcctctgaaagcaggtaagtcatcagtacttcctggaccgcattcgctggtgcctgaagcgcctcatgcatctttacagcgaagaatcgagttccgaagcagtagctccggagcgctcgttccttaagctggtggatggcgcattggattgtttggcgcagttcacctcgcacagtgaggaaaacaccgatacctccaactgtccaaagactcccaaggaagtccttccactcagccagaagttgcgcgccaacattgatttgatcttgggtcaatctctgggattcgccaatgtggctttgtctcaggacaagagggctctcagtgccttgtgccaaaaggtgggtgtacatcttctgcagtatccccttatttattcccctcatttgtgctctaggtcatccgggagtgcaatgcctttcaggaggagtgcaaggagtcattcagtgccaactacctgtccacccttaagctgcgggccatgaccatggaacaggcaatttaccaatt

SEQ ID NO: 4193 - DNA, 1830 bp, DROSOPHILA
ctgccttcaccgccacacggtcccactggacgcatcactttttcggtagcaaaaacttgtagaaaattgtcaattcaattcgctggtagttgtatatccatgtgaagcagagataagctccgccaactctacccgtcgcccacgccacgtcgcacagttgcgccccgccacaaatatcgaaaccaggcctcacagaccgcaagcataccccaaaatgagctcctcgaatgcgggacagcgcacgaagctaattcaggagaagtgccagaccctcctgacgcagatgctccgcgacgaggacaacaagtactgcgtggactgcgatgccaagggtccgcgctgggcctcctggaacctgggcatgtttctctgcatccgctgcgccggcatccatcgcaatctgggcgtgcacatatcgcgcgtcaagtccgtcaacctggacacttggacgccagagcaggtgatctcgctgcagcagatgggaaactcgcgggctcgcgccgtctacgaggcgcagctgccggacggcttccgtcgcccgcagacggacacagcgctggagaatttcatccgggccaagtacgagcacaagaagtacctggcccgcgagtgggtgcctccctcgccgccgaaagtggactgggccaaggagatcgacgaggagcttgagcgccagaagcgcaagaagaagagcacgcaggcccaggccactttgggcctggctggagtggccggtggcagcggcgacaagcgcctgtccgggtcatctgcgtcggcgctcaagaacacccccctgcccgcgccgcttccaaagccgaaacccaaccaggtcggcggctgcagcccaaagacgacgcaacgcgtccagctgaacagcagcggcgttagcagtgccggcgaaagcgacctcttgggactgtcctcgcccaccaagcccattgtcgcgaccaatgccagccaagacctgcaaaacgaaagtttcaccagctttctcagcgccgaatcgattgccggccagccggataagccgattggcagcaacggcgacgccgccaatttgatgggctcgaagccgaactcgctggcacaagaggagcaggacttcttcaaccagggctcactgggcgccggcggcaacgagaaggatcagtctggcaagatgtccaaggacagcattctggcgctgtacggcagcgcgccagccacccacaacccccagatgaactttggcggcttcacgggcatggccccaggcggctatatgcaccagcagcagcaacagcagatcccccaccagtttatgacaccgccgaactcggtgagcatgtataattcgccagttatggctgcaccgaatgcgttcagcaatgctgccatcagcagtgccactgcgatgagcatgggcggctcccatggctttactggagcccagtttcccagcaccgggggcagtccctatgctgccgcaggccaggcagctgcaacaaatcttatgcaaacgaaccagagcattctcagtgggatgccgctctttggagctgttccgcaacagcagcagcaacatcagcagcagcttcagcagcaacatcacccacagcttggcggcctctccatgaacttaatgcagcccctgcccagtgggctgaacattggccaaccgccacaaggagcgggcggatttgccgcaacggggcccaccacctcctcagtaccgtcaaatctgaaccagcagtttgggaagaattcattgtcgagcaagccactgtattaaacgatgttcatgtccatgtccatctccatgtccaccaggaatcgcgtctgctcgtctaa

SEQ ID NO: 4194 - protein, 518 aa, DROSOPHILA
MSSSNAGQRTKLIQEKCQTLLTQMLRDEDNKYCVDCDAKGPRWASWNLGMFLCIRCAGIHRNLGVHISRVKSVNLDTWTPEQVISLQQMGNSRARAVYEAQLPDGFRRPQTDTALENFIRAKYEHKKYLAREWVPPSPPKVDWAKEIDEELERQKRKKKSTQAQATLGLAGVAGGSGDKRLSGSSASALKNTPLPAPLPKPKPNQVGGCSPKTTQRVQLNSSGVSSAGESDLLGLSSPTKPIVATNASQDLQNESFTSFLSAESIAGQPDKPIGSNGDAANLMGSKPNSLAQEEQDFFNQGSLGAGGNEKDQSGKMSKDSILALYGSAPATHNPQMNFGGFTGMAPGGYMHQQQQQQIPHQFMTPPNSVSMYNSPVMAAPNAFSNAAISSATAMSMGGSHGFTGAQFPSTGGSPYAAAGQAAATNLMQTNQSILSGMPLFGAVPQQQQQHQQQLQQQHHPQLGGLSMNLMQPLPSGLNIGQPPQGAGGFAATGPTTSSVPSNLNQQFGKNSLSSKPLY

SEQ ID NO: 4195 - DNA, 3051 bp, DROSOPHILA
ctggagcccggggtttctgcaccagtgcggccccagtagttatgccggcagaggctggacctgctaccgctgcacccgctgccccggctcctaagccggccaaggagcccaaggaaaagaagtccaaggagaagaaaccggccgccgagaagcccgccgccgctccggaggctcccgtcgacgtcggtcgcctggatttacgcgtgggcaagattgtggaggtgggtcgccatcccgacgccgacagcttgtatctggagaagatcgactgcggcgaggcggctccacgcaccgtggtgtccggtctggtgaagttcgtgcccctggaagagatgcagaaccgtctggtagtggtcatgtgtaacctgaagccggccaaaatgcgcggcgtcacctcggaggctatggtcatgtgcgcatctacaccggaaaaagtggaagtgctcagtccgcccgccggagctgttcccggcgacctggttcactgcgagggctatccgcgccagccagacgcccagctcaaccccaagaagaagatctttgagtcgtgcgccccggatctgaagaccaacggcgaactggttgcctgctacaagggcgccgctctccatgttcctggcaagggcaacgtggtggcccaaaccctgaagaacgtcaatgtgaagtgagccaataaacgaaactaaagctttgagccaataaacgaaacatcaccgcctgcacaccatttcagtatcagaacttcattatcattcagtttctagtaccagtgaagagtagctctacaggaatatcggaagctctactgatcattgggattactggttatgtttgattatcgtgcagattctgaggtattcatgtgatattttattttatttcacacgacagcagtacataacgacattaaatttatcattaacaagtctatttatatgtgcataggaagtgcataggagtgcgccattcctacacactttggctggtttaagtgccgtcctcagcgattattgcgctgcgcttgcccttgggtgcggaacacggcaatggaattgctctccaccacaatcgttttggttaggacgtcgtaggcggtgcgattgttcttgaagaagaccatcaacacgcaaatggggaagagcagggtcatccccaggttcttgatcagcgcgcgggcgaaggagcgcatcagcgagggagtctgtggcggataaagcagagccctcatcggctccctctgcggctggaggacgaactgtggaaggggcggcccctgaagcggcatcactgcttccacatagtatatgcgtatcttcatcagcgacttgcccggcgtagccccttggtataggtatgtccacagcgcttcgtagcagcaaacgatgaacttggtcagcatttcgattagcaggaggtcggtggacatcgaaataaaatctagtgatgtgtcaaagaagttcgaaaagaggtcttcttggtccagggtgcgccgaatcacgtcctcatcgaactctatgttgaacaggttgaccaccccgaaggtaatgatgattttcacaatgaaaaggatgaacatatcgatggtctccgccacggcgcgcttccaaaaaggtgacagaacgtactcgtagccgccaagacgctgtatgatatccagctgggccgcctcgcccaatatccgcaggccgctgaagtttggcgcaggcaaacgaggctctgcagctggttctcccggcgcagcagccgagccctgaaccagtgcttggggttgtcccatggcggctgcttggagagcagcggaagaaggcagtcccgggaacatggtcgggtagttggccatcaggtagtagggaaacatgagcatcgcattctgggccagcgtcgcctgtttggcccactcggcgaggctttcgaagtaggcttccttggtggagcgctccgtaagcttctgacccgtctcctcgccttgttcacccattttctcagtctcacaatgatcgattttgttatttggctggcttttatttatttatacaagttgacgtgtattgcaatcggtagggtgtgtcggcgtatcgctgcgaatgacaaatactgctaaatacgattccctgtgaatttcaagcagggcgggaaaatttaagaagactcactttaacttttgatgcgaaatatttgatagtacgtaaaattcgaaaatatattattctaactttttgtacatacaactataatgttgaataaaaagtagttgggcaaccgaacaagaagctgtttatctaatgaactaaatgtaatgcattttgtagttctttaatatataaattaaaagcacgaggtcatacattacccgtatttacttactttgaaatcagcgacacaacgaagcacatacaattgtctgaatattttattattacacagttcgaagtggtttgatttcttccttagacatagcaacttaagaatcgaatacaataaatccgttgacaacccgccatgatattttagattcacattgacaaacaggcgtgaataagttcttaaggatatcaagcatttaaaaagtactgcgccagaagtctacaccttacattcgtaccctggcgtggacgattttgaatgcatgcgtatcaaatacctagctaatgttgaaaaataacatgtacatttgattggaaagtgcattacgttctgtggttcaattttcaattttaagtagttgggtgttacacgcgtatgtatgtaccttttatgatttaattggaatagatttagacgagcagacgcgattcctggtggacatggagatggacatggacatgaacatcgtttaatacagtggcttgctcgacaatgaattcttctacgaacacgaataggacaactaactaaattggcaagttgttgtataaatcgaatgtatataaacaagcatcgccgtctcacacacacatgttgcaacaccgagacgaaccgaacactcgtgtcttacaattaattaaaggaatacaactacataaatacaccgcgtatttattgccacacatt

SEQ ID NO: 4196 - DNA, 1051 bp, DROSOPHILA
caatacacgtcaacttgtataaataaataaaagccagccaaataacaaaatcgatcattgtgagactgagaaaatgggtgaacaaggcgaggagacgggtcagaagcttacggagcgctccaccaaggaagcctacttcgaaagcctcgccgagtgggccaaacaggcgacgctggcccagaatgcgatgctcatgtttccctactacctgatggccaactacccgaccatgttcccgggactgccttcttccgctgctctccaagcagccgccatgggacaaccccaagcactggttcagggctcggctgctgcgccgggagaaccagctgcagagcctcgtttgcctgcgccaaacttcagcggcctgcggatattgggcgaggcggcccagctggatatcatacagcgtcttggcggctacgagtacgttctgtcacctttttggaagcgcgccgtggcggagaccatcgatatgttcatccttttcattgtgaaaatcatcattaccttcggggtggtcaacctgttcaacatagagttcgatgaggacgtgattcggcgcaccctggaccaagaagacctcttttcgaacttctttgacacatcactagattttatttcgatgtccaccgacctcctgctaatcgaaatgctgaccaagttcatcgtttgctgctacgaagcgctgtggacatacctataccaaggggctacgccgggcaagtcgctgatgaagatacgcatatactatgtggaagcagtgatgccgcttcaggggccgccccttccacagttcgtcctccagccgcagagggagccgatgagggctctgctttatccgccacagactccctcgctgatgcgctccttcgcccgcgcgctgatcaagaacctggggatgaccctgctcttccccatttgcgtgttgatggtcttcttcaagaacaatcgcaccgcctacgacgtcctaaccaaaacgattgtggtggagagcaattccattgccgtgttccgcacccaagggcaagcgcagcgcaataatcgctga

SEQ ID NO: 4197 - protein, 325 aa, DROSOPHILA
MGEQGEETGQKLTERSTKEAYFESLAEWAKQATLAQNAMLMFPYYLMANYPTMFPGLPSSAALQAAAMGQPQALVQGSAAAPGEPAAEPRLPAPNFSGLRILGEAAQLDIIQRLGGYEYVLSPFWKRAVAETIDMFILFIVKIIITFGVVNLFNIEFDEDVIRRTLDQEDLFSNFFDTSLDFISMSTDLLLIEMLTKFIVCCYEALWTYLYQGATPGKSLMKIRIYYVEAVMPLQGPPLPQFVLQPQREPMRALLYPPQTPSLMRSFARALIKNLGMTLLFPICVLMVFFKNNRTAYDVLTKTIVVESNSIAVFRTQGQAQRNNR

SEQ ID NO: 4198 - DNA, 2429 bp, DROSOPHILA
gcttaaatgggtcttcagttgtagttgtggttgttgttgtagttatagttgtagtgactgcctttaatggaagcgacggagaaagtgttggtggtggtggaggtggtggaggtggtgccgccggcggcggtggtctccgattcggtcgggatggtttatagaatggcggaggcctcgggcagagaagctccaccttcttggccagtaccttaaataagaaacatcgtctggacgatgttatatgcacctcttccagggcttgtcccagcgacggaacccattcggctccgtatttccttcctgagttagcctccgcaatggcatttaccagatccgcggttagttttttcaacttgaggtgatcctgcgtccaacttggctgcgcccgcaacagacctgccaagtggatactattattatctcatgctatatatcagagcttttgtggaaatatcacaatatatcactgttttttgaacggcccaatactgttcctattcaaattcgtatcacaaacttacatatcatgaacagtaaaagcggaaacttttcgttcatctcgagcaacttgccaaactcccaacttgtttcatttacatggatacttaagtaaattagttatttgcatatttcttaagcagatccaaattgaaatgctgcgatttaatcaaataggcaacagtcaataaacgtgagtgaaacatatacaatagcattgcgaaaaacagtatgtgtcatctctttaagctcaaaaagtgtaaagttagtggcttaaatgctattcacagaaagcaattcaaagaatatacaaattcttctgcttattagcactaaacggttttatttttgtaagcccaatgaacatccgtaaaaatttccgatctgaaacattaactttcataacaacttcatattacagccaatctacaatatttggcatggtacaaaaccgaaaaatgttttcactacagataaggttcatctagcagcagtagctcttttattcctctaagaaatccagtaggtttattttcttggttatgcagtctttaagaaatccaattagtgtatctagtttctcttctatattttgttttctcgatcgcgctgatacaggtaacttttcatctgcaaagatgatggtaatgtttggaattttaatggtcggcaggattatgtagttttgcacagtgttcttgttggttatccgaaagttggcaattttagctggaagcttctttccttctttcatttctatgacgcacagcattataagtgtgtcaatcgtgtccgagtcctgacgcccttttacgttctggtcgagccaggacttcagttcgttgattttattcagcaccgctcctatttcccattgaaacaggtagagaatggctaaagaatcgagtcttactttcgttttggatcgcatagcaactcggacttaccaatgtgtacagcaagccgtcgcattttcgattctagcgataacactcggattttaccatttatattccatgggacaaatccattagtcaaactttacattacctggtcgccaaagcagcgaaaagatcaatattggatttctgacaaggtagctctgattttcatcagtggtcaggtgttaaagcgctaccaatgctatgtagtagaattgttgatgatccccattcgtatgaacatcatgatcctatgctactactataagagctagtaacttgtgattaggcatgtacatacattttaatgttgcgaaagcactggcaatccggaaaacacagtcccaaatgttctttaaagaatgattttcctgaactatgaaatgttcctgttttaattgaatgaaaaacattttaaattgaatgtttaatttaatttagaaagttagttcggttacgcttttataacattaagttctttgattttcataaggacgcacttcttaatgcccgcactcaatcctttcttagtcctttcttgcaaccccgttctgggtgcaggtttggtatcctccttggcgttgctacgacgtttgattattatggccccgtttttagatttctcttggtatttggccagctccttttcatccttcacgatgacaaccgtaatcggtggcaattgaatttccggcatgctgatgttgttcgtgatcgtgttaatattactgatggtttgtttgggatttacaaatcccttttctgtttctgatttacaaagcttgaccagcgtgttcaggaattgcctcttttcgtcctctttagtgtttgccttcttatttgaatatgtattgggtttcgcgtgtgatggttccggttccggttccggtgcagagctatcatcgttgttaccattgaacatttcgtttatcattatgaccttatcctcgaagtgtttgtggatgttgtttaaaacaggtaaaaatggct

SEQ ID NO: 4199 - DNA, 429 bp, DROSOPHILA
atgcgatccaaaacgaaagtaagactcgattctttagccattctctacctgtttcaatgggaaataggagcggtgctgaataaaatcaacgaactgaagtcctggctcgaccagaacgtaaaagggcgtcaggactcggacacgattgacacacttataatgctgtgcgtcatagaaatgaaagaaggaaagaagcttccagctaaaattgccaactttcggataaccaacaagaacactgtgcaaaactacataatcctgccgaccattaaaattccaaacattaccatcatctttgcagatgaaaagttacctgtatcagcgcgatcgagaaaacaaaatatagaagagaaactagatacactaattggatttcttaaagactgcataaccaagaaaataaacctactggatttcttagaggaataa

SEQ ID NO: 4200 - protein, 142 aa, DROSOPHILA
MRSKTKVRLDSLAILYLFQWEIGAVLNKINELKSWLDQNVKGRQDSDTIDTLIMLCVIEMKEGKKLPAKIANFRITNKNTVQNYIILPTIKIPNITIIFADEKLPVSARSRKQNIEEKLDTLIGFLKDCITKKINLLDFLEE

SEQ ID NO: 4201 - DNA, 2480 bp, DROSOPHILA
actttcataacaacttcatattacagccaatctacaatatttggcatggtacaaaaccgaaaaatgttttcactacagataaggttcatctagcagcagtagctcttttattcctctaagaaatccagtaggtttattttcttggttatgcagtctttaagaaatccaattagtgtatctagtttctcttctatattttgttttctcgatcgcgctgatacaggtaacttttcatctgcaaagatgatggtaatgtttggaattttaatggtcggcaggattatgtagttttgcacagtgttcttgttggttatccgaaagttggcaattttagctggaagcttctttccttctttcatttctatgacgcacagcattataagtgtgtcaatcgtgtccgagtcctgacgcccttttacgttctggtcgagccaggacttcagttcgttgattttattcagcaccgctcctatttcccattgaaacaggtagagaatggctaaagaatcgagtcttactttcgttttggatcgcatagcaactcggacttaccaatgtgtacagcaagccgtcgcattttcgattctagcgataacactcggattttaccatttatattccatgggacaaatccattagtcaaactttacattacctggtcgccaaagcagcgaaaagatcaatattggatttctgacaaggtagctctgattttcatcagtggtcaggtgttaaagcgctaccaatgctatgtagtagaattgttgatgatccccattcgtatgaacatcatgatcctatgctactactataagagctagtaacttgtgattaggcatgtacatacattttaatgttgcgaaagcactggcaatccggaaaacacagtcccaaatgttctttaaagaatgattttcctgaactatgaaatgttcctgttttaattgaatgaaaaacattttaaattgaatgtttaatttaatttagaaagttagttcggttacgcttttataacattaagttctttgattttcataaggacgcacttcttaatgcccgcactcaatcctttcttagtcctttcttgcaaccccgttctgggtgcaggtttggtatcctccttggcgttgctacgacgtttgattattatggccccgtttttagatttctcttggtatttggccagctccttttcatccttcacgatgacaaccgtaatcggtggcaattgaatttccggcatgctgatgttgttcgtgatcgtgttaatattactgatggtttgtttgggatttacaaatcccttttctgtttctgatttacaaagcttgaccagcgtgttcaggaattgcctcttttcgtcctctttagtgtttgccttcttatttgaatatgtattgggtttcgcgtgtgatggttccggttccggttccggtgcagagctatcatcgttgttaccattgaacatttcgtttatcattatgaccttatcctcgaagtgtttgtggatgttgtttaaaacaggtaaaaatggcttctgatttgagacgtggagcacacagagcagcactataaatgtcacaaataggaattgttgttcggatagtaccagctttaggaactgcaaactcacccaaagcgatcgtacaaaaccgcatcgtgggttgtaaaaagagaactaaattaattccgccaagatgggtgcatcttggattcacgaaaaaggcgcgaataatccattggtaccagatcacattttaatttaggccattaatatttttacaaatatgtatcttctgaaagtcgtctagtcgttacttaaatttagcactaggtttagttagtattataacattttctttttaaaaactcactatctccaaaaatcaatattgtaaaattcggagaatttgcattaaaaatattttatcaaaactttaccagaacttttgtttgacttatggggaaggaagcataagcaggaataattaatagtcattagttttatttttcaaatatcaatctcacctaattccatggttattatacaaaatattaatttttccaagaacttaagtgatagtatggccacgattttcaaggataatatttagatttgagtataaaaaaaagaaatttaaaaatattgctccatgcatagataaccgaaataagtaaaattgaaatttaaaatgcttaacaaacccatttgtcatcagcttgaggaaatgcgagagactatattgacaattaatttgctagatgttattttcgaaaatatttttatatttctatcgtcgtaaatgtcttttgcactgcatttcaaacttctgaataaaatttatataagctcacaccattaatgtttacgatctctgctttatattatgatggtgccaatgccttatattactattttatttaacttgcagaaagttccggagtgcctcatacagtttataagggaaatcagagagagt

SEQ ID NO: 4202 - DNA, 480 bp, DROSOPHILA
atgataaacgaaatgttcaatggtaacaacgatgatagctctgcaccggaaccggaaccggaaccatcacacgcgaaacccaatacatattcaaataagaaggcaaacactaaagaggacgaaaagaggcaattcctgaacacgctggtcaagctttgtaaatcagaaacagaaaagggatttgtaaatcccaaacaaaccatcagtaatattaacacgatcacgaacaacatcagcatgccggaaattcaattgccaccgattacggttgtcatcgtgaaggatgaaaaggagctggccaaataccaagagaaatctaaaaacggggccataataatcaaacgtcgtagcaacgccaaggaggataccaaacctgcacccagaacggggttgcaagaaaggactaagaaaggattgagtgcgggcattaagaagtgcgtccttatgaaaatcaaagaacttaatgttataaaagcgtaa

SEQ ID NO: 4203 - protein, 159 aa, DROSOPHILA
MINEMFNGNNDDSSAPEPEPEPSHAKPNTYSNKKANTKEDEKRQFLNTLVKLCKSETEKGFVNPKQTISNINTITNNISMPEIQLPPITVVIVKDEKELAKYQEKSKNGAIIIKRRSNAKEDTKPAPRTGLQERTKKGLSAGIKKCVLMKIKELNVIKA

SEQ ID NO: 4204 - DNA, 6711 bp, DROSOPHILA
tgaaactggggattgcgaagtcccgcaggctgcacagtggagtaggcgggctgtacagcagctagacctggtcctctaagcgtatgtgttccttaaaatagtatccataataagatttatgcactgcctcgaaccatgattcttagccacctggtcctccagcgtcttttttgtgcacatacgtgatcccctgctcatccgtatagacgtgatctgctggcgacgatgcgtgatggaactgaccacctactcctggcaccttgtatacgccatcgttctgcccccgaatgtagacttgattgccgggtgttccgaaaacgtgaggcccatcatgtccgtcgtatgtccgctggagatcggcagctgagggagcaatggaatcgtcgattagtctccgtttgggcgagaccatggtaaagggatttttcaccaacgcacaaaacagcgcaagcgatcggcacgagaagtccaagcaaatgcattgtcatctatgttccctgagtgaatggtgagctctaacaactaactggcttgacttgctcgtcgtggtatttataagtaggtgcgcagtagtccaacatcaggttattcatcaaattggcgacagcatctcaaaaattcacaaacgccgctggtgataggggagggcgaatgagaatttcaaaggaattgaatcgattgacgtgcacgatccctgaacacatctgttgcccgcttttgcctattagcccgattgtggatttgataagcaacttagattcgcatcaacgatcaataaagcatcactgataagaaatacaacttttatgctttgttttgattttgttataaagatagacaaatacaacatgaaataccaggagcttcgtagcaaatagcaacgcattaaaacataataaaattgggagaagccgggattttttcagatcggtgtagcgtttgtactgacgataacgttgattatgagtttcgtcgaattggcatcgggtttggcgacgaatcagtcctctggaaccttccactgcagctgctttccgcgttcgtaaagattcttgagagcgttggcaaacttcttctcctcctgcagcttcaaatagtgcttgtagagctgcagagtggtccgtgcatcttcgatggagtcgtgcgtctcggactgaatcttagtacctttggcattaggaaaacccaattagatacaattccaaatcgaagaaaacccctatacaaacccaagaaatgccaggctagaaatcttagggaaaccatgcgatgatgtggcatgtgaaacaggtgcaccgtatctattatctgctccgacggtacatagatgtttatgaccctgcaatcacatggaagtttagtggtctattggttccttacaaagcagggcatcccacctaaagtcgttcttcagaccatgtccgacaaatattactcctacgtcaacgaggtattttaatttctggtatgagtacttcaaggcagtcagtcgctttttgctgaagttagcgtccaagtcgccaggcttgattcccgagaactgagttaggtagtccacgaccttctcctgggtggatatgtaatcgtccatgaatggaactccttcagccgggccttgtctgtaaagaattcatacccgtgcttatcgagatgaatatttttaagtttcagttaatgaattaccctcgtatacatgaaatccgggccacactcatgtggcatggcttaatggtcgccgttttgccatccgggcgaatctcattttcctctggatttagggtaacgaactcggcatccattgcgaccagatcacccgactgcggcatttcatctgactgcaggggctgcagcgtggcgtctgcacttaagttgcctagcataggactcacaatttcctggtaggattaagattcagattagcattcagcagactcaatgctatattaaactattaacctctagaaaagggttggatagatttgttggcgagccgctgctgctctctgatggaatggtttcttcactttccgtgacggtcgagctagtagtactagcagactcagagtcatcctctacgtgtctgtagaagagtatgcaaggaactttccaatccaatgtgaaccataccgattcttgtggcgaaacgggcgatatgctgttgagcgatatatgagcaatattaatcgaaggccattcacaatagagatctaacttacctaaaatcattaaaaatataccattgactctgagggtcatctgcagattcagccagtttcatggtgtggtatggccgctgcacatttatcaacgataccaagttcttttgggtaccatcatcgacttggcacaccacggcatgcagcgcgtacatccgattgttgtccaagccctttgttggtggcttttccgtttcctcctcctgttccgatttgccactgcttgcatctgattgagtttgcacctgcacctcaccttggtcattgatgcccatagtaaatgtaaggggaaaccaggacttttggcgtccattgggagaattgttgacagcattcggttggcttgtgtgcgatggagattttctgcacagtaggtacaacaatatgcataagacgactgattcagtttcgattcgtcgtaactcaccgatccggatgcatgaaatggcagtcacttcgcgaacagttggctccatatcgacacggcttgcttgtgctcaaggaagcggccgcatcaacagtcgtcttttcgctgcagcgattgagctggcgcttcaggaaggtaatgtctttttcgttgttgaggccacagttaatggacagaatttgcggaagcgaagtcacctgaaattcagatgcattacatatgtaacttcttgcttggttcactataaagttagctcccgaccttcacgctctgattggttggcgaaaacttcttacatctctcgcagaaggcctgaatactcttctcggagctgagagatcgcttcaaaatggtgccaaagttgaaatactgatcactatctttgatgtggttgggatacgacaaattgcaggcaagtagaatgctttcctttatcttctcttcttggcatttgatgcagcggtttatacagatttgcttggtcccaaagatcttactgatgtcagtttctgcgttgatcttactgcgttcccgatcgtcctccttggagttctcatctgttcatatacgtacatatgattagagtgttagttaaaccattaattcacctgcccaccacttatggaatcgtaaaggtccgaggagccacttgtttctgaagagcccgcgttttccgctgcaaaataaatcgaagtttcacttatttgtaaaggataaactcggctgtggttaccgttcgttgatgtttgcacagatccgctgtaggtggatgcgttcttgctagaatcgaatatttcgtaatgcatttgatgcaaaatgaatcggttccagttctgagagtgtgcataaattaaatatctgcttaggaaaccatggtattacttgcctgtatcagcgatattagattgacgttcgatgagcggtcggtgagaatcaatcccagtgccgaggcctctggcacagtgcggaaagatcgcaggaaattgctggcctggcaaggtgaagaagctgaaaggagcacacataaatacttaaactaaggatagttaagttacacaagcaaactaaccggtacttttatccagcatgttgaagaggaaccctagttcgcaggacaggcaaaactccttgatgcacgaatgctccagcagcttcacgcgaagcgcgtcggtgaaatacaaaatctgtagcatagcattgcagtaggagttcggtagcgttgcctccagccccgcgaaacatgtttgattatgctggtcaaagtcaaagtcctgggtgcccagcttcgtgtacttcagctcgactttgcgataccgccgtggaatgattttcacaccgttctccgccttggtcgccgccgcagttccatttccgttcggactgcacacgccgccctgctcaatcacgtacggaatttgattacgacgggcggtgcgtgggtttggcgagtatccaatcggtccctgcattttcatgttgctcagcacttcgggatcaatggtcttgggcctgtggtagcggtagcgcagcagttcctccggccaatctgagaaccattgtgtgcccgtcgtcaagtgcggtagcatgaccgacgatagcggaaagttggtgtccgtaatggagaccatcggcagctgtggcaccacgtccgcaaactctgtgcttcgcgagtagagattgaactgcggctgaggcgtttgtacagcggcaatcatgttgatgtggcccgactggtccccaaatgccatggcctgtgaagaggagctaatgtcgaagctgaggcactggctgccgttggtgttgatctggtacatggatactcgcggctcgctgagctccacagtgtccaccagctgaacctggccgtagctggacacgacggccagttgggatgtcagcgatggcaggaacttcaacatctgcggatcaatcatcacttgaatgggcgcgatcaggcgcagcatgcgcagatcgtagaccattaggaagcggtcgatggccaggttattttgccttccgctgtagccgcaagagattagcagatttccctggacactgaagtccgaaaggatgttggtgtgcgtcttgattgtgtgctgaacactcaggctgttcaggtcgcgcaacgttaccgttcccagctggtcgccggcaaacagataacgtgaattcttgcgtagcaccgtgcatccgccggcacccacatgctctatgcgggtttccttgagcgtgcgcaggtcgaagtcgataagctcgtcctgcagtccggccatgaccagacgatgcggtgatagctgcagcatgctcaccatctccttcatgttgttcgatctgcaagaaattgaaacctcactttcggggaatctttgtgccagcgcggtggcttacttgaaggtaaacttgggcagacccctgcggatctgatgacgcagcgaggtctgcgtgagcgccagcactccggagtccagggtggagatgtcgcgcacaatgtcggtggcgtggacctgaaaggatgtgtacttctgcatggagtttgtgtagtacgatgtgacgtggccctgcgggaaggagcgaagattcaggattagtaagcctggcaggctggacgaggaactcacgccctggttgcccatccacagcagctcttcgtagtcgtcgaacgccacgctggaaacgccgaagtgctccccgccgtcggcaagcacgggcacaagctccacatattccggatcggtggtgccgatgttgaatccattgaagctgggcgaaaagtgcccgtttcccggcgcagatcccgcgtcataaacaccttttcaaaaagtaaacagaaaacaaaggagaaagctttagctggcttgcgtgtgtgtgtgcgtgtgggtgagcgttggccccaaagcgaccccttgacccacttagtatgtcttcggaggccccgatggggtcggtgccgcaatacacgtaatccatctgccgcacgccgatgcccacgcgactttttattgtttattttttaacaaatttcgctcaaaactgccagccgtttttgcgttgcaccgattagagtgaccctggcagggctgatgtaaaaatactctcgcttctccgccaacgaactacctgtccaacgctgcgcgacgccactgtgcgtggcaagaagaagcactgcaatgctgcgtagagctgccacgactgtgggatccgcatgtaaaaattacggccagaattgctcaaaattcgcgagaaacaaaagaacaatggccgatctgcagcagattgcaagcaacaacgagcgcgccgaggcgctgatcaactccattgaagccgaggcaagtatttccgcctgccagcgcctgcgaacactcgataacctactgccccccagatttccggcatccagcagcaacttgtggagcgccagaagcaggagctgatcaaggagaacgctgcactggccaaggaagttgaggcggctttggcccagctggtgcagctggagctgcgaaatggcaagaaacagattccggtgcctggagcccggggtttctgcaccagtgcggccccagtagttatgccggcagaggctggacctgctaccgctgcacccgctgccccggctcctaagccggccaaggagcccaaggaaaagaagtccaaggagaagaaaccggccgccgagaagcccgccgccgctccggaggctcccgtcgacgtcggtcgcctggatttacgcgtgggcaagattgtggaggtgggtcgccatcccgacgccgacagcttgtatctggagaagatcgactgcggcgaggcggctccacgcaccgtggtgtccggtctggtgaagttcgtgcccctggaagagatgcagaaccgtctggtagtggtcatgtgtaacctgaagccggccaaaatgcgcggcgtcacctcggaggctatggtcatgtgcgcatctacaccggaaaaagtggaagtgctcagtccgcccgccggagctgttcccggcgacctggttcactgcgagggctatccgcgccagccagacgcccagctcaaccccaagaagaagatctt

SEQ ID NO: 4205 - DNA, 3731 bp, DROSOPHILA
ggtcactctaatcggtgcaacgcaaaaacggctggcagttttgagcgaaatttgttaaaaaataaacaataaaaagtcgcgtgggcatcggcgtgcggcagatggattacgtgtattgcggcaccgaccccatcggggcctccgaagacatactaagtgtttatgacgcgggatctgcgccgggaaacgggcacttttcgcccagcttcaatggattcaacatcggcaccaccgatccggaatatgtggagcttgtgcccgtgcttgccgacggcggggagcacttcggcgtttccagcgtggcgttcgacgactacgaagagctgctgtggatgggcaaccagggcggccacgtcacatcgtactacacaaactccatgcagaagtacacatcctttcaggtccacgccaccgacattgtgcgcgacatctccaccctggactccggagtgctggcgctcacgcagacctcgctgcgtcatcagatccgcaggggtctgcccaagtttaccttcaaatcgaacaacatgaaggagatggtgagcatgctgcagctatcaccgcatcgtctggtcatggccggactgcaggacgagcttatcgacttcgacctgcgcacgctcaaggaaacccgcatagagcatgtgggtgccggcggatgcacggtgctacgcaagaattcacgttatctgtttgccggcgaccagctgggaacggtaacgttgcgcgacctgaacagcctgagtgttcagcacacaatcaagacgcacaccaacatcctttcggacttcagtgtccagggaaatctgctaatctcttgcggctacagcggaaggcaaaataacctggccatcgaccgcttcctaatggtctacgatctgcgcatgctgcgcctgatcgcgcccattcaagtgatgattgatccgcagatgttgaagttcctgccatcgctgacatcccaactggccgtcgtgtccagctacggccaggttcagctggtggacactgtggagctcagcgagccgcgagtatccatgtaccagatcaacaccaacggcagccagtgcctcagcttcgacattagctcctcttcacaggccatggcatttggggaccagtcgggccacatcaacatgattgccgctgtacaaacgcctcagccgcagttcaatctctactcgcgaagcacagagtttgcggacgtggtgccacagctgccgatggtctccattacggacaccaactttccgctatcgtcggtcatgctaccgcacttgacgacgggcacacaatggttctcagattggccggaggaactgctgcgctaccgctaccacaggcccaagaccattgatcccgaagtgctgagcaacatgaaaatgcagggaccgattggatactcgccaaacccacgcaccgcccgtcgtaatcaaattccgtacgtgattgagcagggcggcgtgtgcagtccgaacggaaatggaactgcggcggcgaccaaggcggagaacggtgtgaaaatcattccacggcggtatcgcaaagtcgagctgaagtacacgaagctgggcacccaggactttgactttgaccagcataatcaaacatgtttcgcggggctggaggcaacgctaccgaactcctactgcaatgctatgctacagattttgtatttcaccgacgcgcttcgcgtgaagctgctggagcattcgtgcatcaaggagttttgcctgtcctgcgaactagggttcctcttcaacatgctggataaaagtaccgcttcttcaccttgccaggccagcaatttcctgcgatctttccgcactgtgccagaggcctcggcactgggattgattctcaccgaccgctcatcgaacgtcaatctaatatcgctgatacaggcaacggaaaacgcgggctcttcagaaacaagtggctcctcggacctttacgattccataagtgatgagaactccaaggaggacgatcgggaacgcagtaagatcaacgcagaaactgacatcagtaagatctttgggaccaagcaaatctgtataaaccgctgcatcaaatgccaagaagagaagataaaggaaagcattctacttgcctgcaatttgtcgtatcccaaccacatcaaagatagtgatcagtatttcaactttggcaccattttgaagcgatctctcagctccgagaagagtattcaggccttctgcgagagatgtaagaagttttcgccaaccaatcagagcgtgaaggtgacttcgcttccgcaaattctgtccattaactgtggcctcaacaacgaaaaagacattaccttcctgaagcgccagctcaatcgctgcagcgaaaagacgactgttgatgcggccgcttccttgagcacaagcaagccgtgtcgatatggagccaactgttcgcgaagtgactgccatttcatgcatccggatcgaaaatctccatcgcacacaagccaaccgaatgctgtcaacaattctcccaatggacgccaaaagtcctggtttccccttacatttactatgggcatcaatgaccaaggtgaggtgcaggtgcaaactcaatcagatgcaagcagtggcaaatcggaacaggaggaggaaacggaaaagccaccaacaaagggcttggacaacaatcggatgtacgcgctgcatgccgtggtgtgccaagtcgatgatggtacccaaaagaacttggtatcgttgataaatgtgcagcggccataccacaccatgaaactggctgaatctgcagatgaccctcagagtcaatggtatatttttaatgattttagcatatcgcccgtttcgccacaagaatcggtatggttcacattggattggaaagttccttgcatactcttctacagacacgtagaggatgactctgagtctgctagtactactagctcgaccgtcacggaaagtgaagaaaccattccatcagagagcagcagcggctcgccaacaaatctatccaacccttttctagaggaaattgtgagtcctatgctaggcaacttaagtgcagacgccacgctgcagcccctgcagtcagatgaaatgccgcagtcgggtgatctggtcgcaatggatgccgagttcgttaccctaaatccagaggaaaatgagattcgcccggatggcaaaacggcgaccattaagccatgccacatgagtgtggcccggatttcatgtatacgaggacaaggcccggctgaaggagttccattcatggacgattacatatccacccaggagaaggtcgtggactacctaactcagttctcgggaatcaagcctggcgacttggacgctaacttcagcaaaaagcgactgactgccttgaagtactcataccagaaattaaaatacctcgttgacgtaggagtaatatttgtcggacatggtctgaagaacgactttagggtcataaacatctatgtaccgtcggagcagataatagatacggtgcacctgtttcacatgccacatcatcgcatggtttccctaagatttctagcctggcatttcttgggtactaagattcagtccgagacgcacgactccatcgaagatgcacggaccactctgcagctctacaagcactatttgaagctgcaggaggagaagaagtttgccaacgctctcaagaatctttacgaacgcggaaagcagctgcagtggaaggttccagaggactga

SEQ ID NO: 4206 - protein, 1209 aa, DROSOPHILA
MDYVYCGTDPIGASEDILSVYDAGSAPGNGHFSPSFNGFNIGTTDPEYVELVPVLADGGEHFGVSSVAFDDYEELLWMGNQGGHVTSYYTNSMQKYTSFQVHATDIVRDISTLDSGVLALTQTSLRHQIRRGLPKFTFKSNNMKEMVSMLQLSPHRLVMAGLQDELIDFDLRTLKETRIEHVGAGGCTVLRKNSRYLFAGDQLGTVTLRDLNSLSVQHTIKTHTNILSDFSVQGNLLISCGYSGRQNNLAIDRFLMVYDLRMLRLIAPIQVMIDPQMLKFLPSLTSQLAVVSSYGQVQLVDTVELSEPRVSMYQINTNGSQCLSFDISSSSQAMAFGDQSGHINMIAAVQTPQPQFNLYSRSTEFADVVPQLPMVSITDTNFPLSSVMLPHLTTGTQWFSDWPEELLRYRYHRPKTIDPEVLSNMKMQGPIGYSPNPRTARRNQIPYVIEQGGVCSPNGNGTAAATKAENGVKIIPRRYRKVELKYTKLGTQDFDFDQHNQTCFAGLEATLPNSYCNAMLQILYFTDALRVKLLEHSCIKEFCLSCELGFLFNMLDKSTASSPCQASNFLRSFRTVPEASALGLILTDRSSNVNLISLIQATENAGSSETSGSSDLYDSISDENSKEDDRERSKINAETDISKIFGTKQICINRCIKCQEEKIKESILLACNLSYPNHIKDSDQYFNFGTILKRSLSSEKSIQAFCERCKKFSPTNQSVKVTSLPQILSINCGLNNEKDITFLKRQLNRCSEKTTVDAAASLSTSKPCRYGANCSRSDCHFMHPDRKSPSHTSQPNAVNNSPNGRQKSWFPLTFTMGINDQGEVQVQTQSDASSGKSEQEEETEKPPTKGLDNNRMYALHAVVCQVDDGTQKNLVSLINVQRPYHTMKLAESADDPQSQWYIFNDFSISPVSPQESVWFTLDWKVPCILFYRHVEDDSESASTTSSTVTESEETIPSESSSGSPTNLSNPFLEEIVSPMLGNLSADATLQPLQSDEMPQSGDLVAMDAEFVTLNPEENEIRPDGKTATIKPCHMSVARISCIRGQGPAEGVPFMDDYISTQEKVVDYLTQFSGIKPGDLDANFSKKRLTALKYSYQKLKYLVDVGVIFVGHGLKNDFRVINIYVPSEQIIDTVHLFHMPHHRMVSLRFLAWHFLGTKIQSETHDSIEDARTTLQLYKHYLKLQEEKKFANALKNLYERGKQLQWKVPED

SEQ ID NO: 4207 - DNA, 6495 bp, DROSOPHILA
ggagggggcaggagttccgcgccagcaggctccggagagtacatcaaggtggtggagtcccaatgcgagaccgatggattcgttaatgaacagtggacggaaccggcgatgccaggtccagtgccttggaagaccattattatcattcttttgctgtttatcggtggcattgtgagtagtgattactggtgcccacacatacatgcacagttccttcgaacttctgatctgatgtctttgtcttcaggtttgcatcgcctttgccaccttaaactgggtgacggacacgagccgggagcgatcggatcgggtgtgggcgttgggtatcatcggggcactgaccttcatcccgggaagctactatgtgtacgtgctcttctgcataatgctcaaccgcaacggattcaccatggacgagatacgaagactcggctgaaaaggagaaaccaaagacaccaaatgtttcgtcaaatagagtttattgcttttacactacagttattcacacatttcattggcataatttctttagcaacaatcttaatatgtagttcattatgatacatgtgtattgccccggtaattgtataaaaatattttttaaacacgagcttcgttatcaaaatgtataatgcttggcgtggcttctagtgcgcggaacattggctatctatttaaatagcgcatcgcttgcttaaatatgtatatgttttacaggcatgaactataggttatatgatttatgttatggccattttctctatcaagcttggggcacagtataactttgtgtttcagcttaattatatacagtgttatgcgttacatgttgtatctatgtaggtaagaattctttacaaacaattgcttttcgtgtttacggatataacagggcgcgtgggaatcaaatactttaacaagagtaggggattagtatggggtgtatacacaatacatacacaaacattgtaacgaaattaaactagcgacaggtaacatttcactgctccacgacggtcacctcgatgggcggaatgaacttccacacatgcgcctgctgctcatcgtagctggaggagaacatgaccgattggccgacactctccgcttctgccggacaggagcgggttagcaatgacgacggctgctccgactgcttctgcggattgctggtgcattcgatgctggccttgaaacgtccgggggtaaagaatatcacagagcaagtatgctctttctgctcctgcttctccagtagtggtattgcaattctaagagggttgatattgtctaaatatttaactgcttcgtttcaatatttttcttcagctctcacctatttggtcctgaaatggccacgcgtgtctccaaattgtaattttccattccgttcaggtaatcctgatagaacttaatgctcagcaccagatttctaagtggttgcagggattgattggccagctggatgcttagcagcgaccgctgtcccaccgtgcatacaatctcattgtgtggctgcacgagcgtgtcttgaaagctgatagctaaaggtgtaatacaattgtcattacaaagtcggtaaggaagattctaaacaaacacaccccactccaaaggcgacacagctgtcaaatccaccatagactgggagagaactattcctcgcagtgaggcgattccctgaatgtccgtccccgttaacagccacttgattttcaccctttcagctatatgaattgagcagagcttactcagagcatcgttaaacgacagcagctgcgtccggaagcagagttctagtaaaaagataagcacaaatagtgaatgagctcatattaagcgggattcatcatacccctctccagattctcagctacctcggccgcccgagcagccaccactttctccaaggagcaccgatccacgggtatgggcactcggcagctctctttggcctcgatgagtatattcttggtgtccgtatagttgagcgacatctcttgagcggttaggttggagatgtcaagtaccaggtaaaattgggaggctctgtaaatttgatatacaatgttagaaggagttactttgaaaaacgagaagattgcacttacacctctgcgggaagcacatcccagcttgtaatctgtacgctaggcaaaagttctagattaaaggacaccgcacattggcgacagtagcccgccgtcaaagcatctccgcccgagtacttaaatctaacttgcgcctctatgtgctggttatattgtgacccaaggctggaaggtcctactcctccaccgccgccagggtgcagggttaaggcagccagcgatggtggaccgccagaaatggtcgaccggaaactggaattctgtggctcatttcgacgatgatgcggtgaaccgactctcgagggtaagctggcgtgcccagaggtggacacgctcgagtagtgcgttagtgacgacgcaccgtagtccccaggagcagcggcagaatgcaatgaagcaggtggttgaggacaaacgaagtccgcttcggcaaaaacatccactatgatttcaatggtgccctggggaggcactggcaaatgggcctgcaaaggaaaatcattgattattcatttactcaatataagatcataaatcttaccttgatggcttcttcatctattcggaagatcttctgctgcagctcctgctccacatttgagttgatgctaaactctaggtgctccagtggcagcgtggcgctctcattggtaatagttattgtgcagctggaggattctccgttgtacagcgttaagctggcagaggtcacaacgatatccgcactgttcatgttgctaaacgtcgccgtctgtggtagcgaagttttcacagatatcctaggaagggcggggataacatcaaccacgtagttgggcggaaagctacgaccacgcatgtgcttcagccgacagttggacttcacaccgagcgtgtgcgtgctgtagccctgcagatcgagttgccccgtctcaattggcgttccatgtagcgccacatacgtgggcacatgtggctgtagtacaagagtctggggcaaagactcaaacaccacgccgtttgttagcaatctcatgtccgttacgggcagctcaaagggcaggggattccgcaggcgcacagtcacttcactaagatcattttgcacccactggaaagctaatataaaaattagttatgtacgtatgcagagattttaaccccaaatcttacctattttatttttgtcctttttcttatccctcctgtcgacagaattaaagtgtatgggggtgaataggaaaggcccactgtccgctttggccacctttattctttgcggtcgcaaatgagcgggcaaatctttaacctgaagatcgatacagtagggcagatccgtgagattggcgggtggtatcacagtgccattttccagcaccaagggcacaggagagccctcgcactgagcgcttaaattctttagaaaatgtaccgattttagtgtgaatgaattagcatcttattttgataacttacctgcagttgcacagccatctcgctttgctccgttggcgacatgttgtcccactgagtctgcagcaaaaaggtcatgtgccgcgtggccaaagcggagtgtcccaaacgcctggcggcagttataagggtctggaccagatcgatttgcaacgccggccagccggcggcattttctattacttccaaggggtcgagacaaagccggtaccccgtaaaactgcccaacatgaggcggtaactttggttccagtccggcgcttggctgccctgctgaacgtgcttgagtgcagcgagtctttggaaaaatgccgccttcctttggtatccgatctgctggtaaagatccgtaatgacctcgaatctctttacccgctcggcttcgctcatgctcaggtttatgtagagtatattctgcaaaaacatggccacgtccaggggacgattctgctcgatgcaaatccgcgaggccttcagtgccgcctccgtctctatagtggctgcatgcctgtacttgctgtagttaatgatggccttgcgatagtagttgctgatctcctccgccttgaggatgttgcccggcagatcgccgttcctctggtgtcctggtatcggtgctgccgatatcgtcgaagtggaggaagatgatgtagttggcgtgtccgaggcggaggaattggtggccgttgtcaccagggaagacacggatgagcaggaagatgagttcgaggttacgcgctgctgaggctggttggaatccacattgttcgcggtcgcgtcactggcgctaatcttcttggtggcgtcgctagcacgccacttttcaggggtgttttttaggggagaggtgcctggcaaggatgaggaataagtaaggcatattcaattaggtttttggtactcacccgcctcctgaagcgacgagtttctatgcagcgtttcggtttctcgcatttggggatacaacagcattgcggaagcggcacacaagccctcttcggttgccccaacccaaagggaatcacctaccgacctcaaagtctcattggcattgtggtacagactcaaggcgtcgtcaaccaggccagcttgcagcgatagatctgccaggttcttcatcacacgacccacgcatcttttcctattgttcctcgactccatgtccaggcccacaaagtctcgcttttcaaagggtgccagcaacaggctcaccttgtccgccttctcgcgagatcgctctaaccgtcgtgattccaggacccaaaacaacgcgctagcaaagtccccaattcgagattcgagatcggcacacgaatcctgttcgcgatagaaaaaggcctgcgctttgaagttcgatggcgttgtgaattcatcttgaaggcgtcgtccaccagctgccggtggtcccagcacctccccaatggtttccagtggctgctcatcgggcccaaagaaaattgcacgggactcgtacagagtagacccgtagcgaacttttaaggactcgtgctgacggcacagctcattgagctcgatttggctatcgaatttgccaatggtgacaagtcccagcagtcggcgatgggtctgaaagtcgccccaatcgttgtgctccacaggatgatcgtgaacgaagcggatccaaatagagcggggatgtccagaggagtctgtaaggcagattgaattatttgtaatcaaaaagatagcaagagagctggagcaacacacaccattgacccggatgtgattgacacgtcgcactttctcaaacgcccgctgaaggacgcgagcgcgcgatggacccacgccgcggagcagcaccagcaggcagctgtggtgcagggcgctctgctcgtagtctgggcgtgacaacgctggctccatgccaccagcaccgtgcgacagcatcaggccaacggccgcacgcatttacaccgcgccgcggctctcaaatccaatccctgtcccagtccggaggatgcgagcgccagtttcctttgcatctgccaagttcttcacaggcgttccataccgctgtcaagtggataagctctcgattggattcgatttcttcagaggagccacctcctcccccttttcgaggtcagtcagcgcctgctttcaccacgctttttgcctggtttctcggctgtttccgaatccgctgcactccttcacatgggtaccgatgccgggtactcggaggaagtcgaaaaccccaggaaataaatgactaaatggctttttaagcgcagataatcgtttagccgtttgctttggcaaagaaattgtccaatcagtgcctgtcgactagtcgctgtgaatggcacatcgcacagattgacggcagaaaggtcacactaatctaatcgatggtgttgacaatcagataaaatatttgtacaaatataaaatggaaaaccaagtttcttatagtgctacttaaaaaaactttaattgtattacttttagtattacatttagcgaaataagctattgaatattttgcaaatgatccgcctctaacttatcgatactttttggctccggccacactgctgagggaccatccactagaatggcaatgccccgtacaatcacattttgccgctttattgtttatattttgcatcctttttgtagttgttgaaaccatgaatttactgcccaaaacccgcgaggagttcgcacagaccgattactggaacgaattcttcaagaagcgcggtgagaaggccttcgaatggtacgtaaatggtacccactaagctcgagcagacttcttggggaagggaagaactccgagcaacatgtgttttcttggccaactaaaagttgctttaactgcgaaggtacggcgaatacctggagttgtgcgaccagatccacaaatacatcaagccggcggataggattttgatgctgggat

SEQ ID NO: 4208 - DNA, 4026 bp, DROSOPHILA
atgcgtgcggccgttggcctgatgctgtcgcacggtgctggtggcatggagccagcgttgtcacgcccagactacgagcagagcgccctgcaccacagctgcctgctggtgctgctccgcggcgtgggtccatcgcgcgctcgcgtccttcagcgggcgtttgagaaagtgcgacgtgtcaatcacatccgggtcaatggtgtgtgttgctccagctctcttgctatctttttgattacaaataattcaatctgccttacagactcctctggacatccccgctctatttggatccgcttcgttcacgatcatcctgtggagcacaacgattggggcgactttcagacccatcgccgactgctgggacttgtcaccattggcaaattcgatagccaaatcgagctcaatgagctgtgccgtcagcacgagtccttaaaagttcgctacgggtctactctgtacgagtcccgtgcaattttctttgggcccgatgagcagccactggaaaccattggggaggtgctgggaccaccggcagctggtggacgacgccttcaagatgaattcacaacgccatcgaacttcaaagcgcaggcctttttctatcgcgaacaggattcgtgtgccgatctcgaatctcgaattggggactttgctagcgcgttgttttgggtcctggaatcacgacggttagagcgatctcgcgagaaggcggacaaggtgagcctgttgctggcaccctttgaaaagcgagactttgtgggcctggacatggagtcgaggaacaataggaaaagatgcgtgggtcgtgtgatgaagaacctggcagatctatcgctgcaagctggcctggttgacgacgccttgagtctgtaccacaatgccaatgagactttgaggtcggtaggtgattccctttgggttggggcaaccgaagagggcttgtgtgccgcttccgcaatgctgttgtatccccaaatgcgagaaaccgaaacgctgcatagaaactcgtcgcttcaggaggcgggcacctctcccctaaaaaacacccctgaaaagtggcgtgctagcgacgccaccaagaagattagcgccagtgacgcgaccgcgaacaatgtggattccaaccagcctcagcagcgcgtaacctcgaactcatcttcctgctcatccgtgtcttccctggtgacaacggccaccaattcctccgcctcggacacgccaactacatcatcttcctccacttcgacgatatcggcagcaccgataccaggacaccagaggaacggcgatctgccgggcaacatcctcaaggcggaggagatcagcaactactatcgcaaggccatcattaactacagcaagtacaggcatgcagccactatagagacggaggcggcactgaaggcctcgcggatttgcatcgagcagaatcgtcccctggacgtggccatgtttttgcagaatatactctacataaacctgagcatgagcgaagccgagcgggtaaagagattcgaggtcattacggatctttaccagcagatcggataccaaaggaaggcggcatttttccaaagactcgctgcactcaagcacgttcagcagggcagccaagcgccggactggaaccaaagttaccgcctcatgttgggcagttttacggggtaccggctttgtctcgaccccttggaagtaatagaaaatgccgccggctggccggcgttgcaaatcgatctggtccagacccttataactgccgccaggcgtttgggacactccgctttggccacgcggcacatgacctttttgctgcagactcagtgggacaacatgtcgccaacggagcaaagcgagatggctgtgcaactgcagaatttaagcgctcagtgcgagggctctcctgtgcccttggtgctggaaaatggcactgtgataccacccgccaatctcacggatctgccctactgtatcgatcttcaggttaaagatttgcccgctcatttgcgaccgcaaagaataaaggtggccaaagcggacagtgggcctttcctattcacccccatacactttaattctgtcgacaggagggataagaaaaaggacaaaaataaaatagctttccagtgggtgcaaaatgatcttagtgaagtgactgtgcgcctgcggaatcccctgccctttgagctgcccgtaacggacatgagattgctaacaaacggcgtggtgtttgagtctttgccccagactcttgtactacagccacatgtgcccacgtatgtggcgctacatggaacgccaattgagacggggcaactcgatctgcagggctacagcacgcacacgctcggtgtgaagtccaactgtcggctgaagcacatgcgtggtcgtagctttccgcccaactacgtggttgatgttatccccgcccttcctaggatatctgtgaaaacttcgctaccacagacggcgacgtttagcaacatgaacagtgcggatatcgttgtgacctctgccagcttaacgctgtacaacggagaatcctccagctgcacaataactattaccaatgagagcgccacgctgccactggagcacctagagtttagcatcaactcaaatgtggagcaggagctgcagcagaagatcttccgaatagatgaagaagccatcaaggcccatttgccagtgcctccccagggcaccattgaaatcatagtggatgtttttgccgaagcggacttcgtttgtcctcaaccacctgcttcattgcattctgccgctgctcctggggactacggtgcgtcgtcactaacgcactactcgagcgtgtccacctctgggcacgccagcttaccctcgagagtcggttcaccgcatcatcgtcgaaatgagccacagaattccagtttccggtcgaccatttctggcggtccaccatcgctggctgccttaaccctgcaccctggcggcggtggaggagtaggaccttccagccttgggtcacaatataaccagcacatagaggcgcaagttagatttaagtactcgggcggagatgctttgacggcgggctactgtcgccaatgtgcggtgtcctttaatctagaacttttgcctagcgtacagattacaagctgggatgtgcttcccgcagaggtagcctcccaattttacctggtacttgacatctccaacctaaccgctcaagagatgtcgctcaactatacggacaccaagaatatactcatcgaggccaaagagagctgccgagtgcccatacccgtggatcggtgctccttggagaaagtggtggctgctcgggcggccgaggtagctgagaatctggagagggaactctgcttccggacgcagctgctgtcgtttaacgatgctctgagtaagctctgctcaattcatatagctgaaagggtgaaaatcaagtggctgttaacggggacggacattcagggaatcgcctcactgcgaggaatagttctctcccagtctatggtggatttgacagctgtgtcgcctttggagtgggctatcagctttcaagacacgctcgtgcagccacacaatgagattgtatgcacggtgggacagcggtcgctgctaagcatccagctggccaatcaatccctgcaaccacttagaaatctggtgctgagcattaagttctatcaggattacctgaacggaatggaaaattacaatttggagacacgcgtggccatttcaggaccaaatagaattgcaataccactactggagaagcaggagcagaaagagcatacttgctctgtgatattctttacccccggacgtttcaaggccagcatcgaatgcaccagcaatccgcagaagcagtcggagcagccgtcgtcattgctaacccgctcctgtccggcagaagcggagagtgtcggccaatcggtcatgttctcctccagctacgatgagcagcaggcgcatgtgtggaagttcattccgcccatcgaggtgaccgtcgtggagcagtga

SEQ ID NO: 4209 - protein, 1341 aa, DROSOPHILA
MRAAVGLMLSHGAGGMEPALSRPDYEQSALHHSCLLVLLRGVGPSRARVLQRAFEKVRRVNHIRVNGVCCSSSLAIFLITNNSICLTDSSGHPRSIWIRFVHDHPVEHNDWGDFQTHRRLLGLVTIGKFDSQIELNELCRQHESLKVRYGSTLYESRAIFFGPDEQPLETIGEVLGPPAAGGRRLQDEFTTPSNFKAQAFFYREQDSCADLESRIGDFASALFWVLESRRLERSREKADKVSLLLAPFEKRDFVGLDMESRNNRKRCVGRVMKNLADLSLQAGLVDDALSLYHNANETLRSVGDSLWVGATEEGLCAASAMLLYPQMRETETLHRNSSLQEAGTSPLKNTPEKWRASDATKKISASDATANNVDSNQPQQRVTSNSSSCSSVSSLVTTATNSSASDTPTTSSSSTSTISAAPIPGHQRNGDLPGNILKAEEISNYYRKAIINYSKYRHAATIETEAALKASRICIEQNRPLDVAMFLQNILYINLSMSEAERVKRFEVITDLYQQIGYQRKAAFFQRLAALKHVQQGSQAPDWNQSYRLMLGSFTGYRLCLDPLEVIENAAGWPALQIDLVQTLITAARRLGHSALATRHMTFLLQTQWDNMSPTEQSEMAVQLQNLSAQCEGSPVPLVLENGTVIPPANLTDLPYCIDLQVKDLPAHLRPQRIKVAKADSGPFLFTPIHFNSVDRRDKKKDKNKIAFQWVQNDLSEVTVRLRNPLPFELPVTDMRLLTNGVVFESLPQTLVLQPHVPTYVALHGTPIETGQLDLQGYSTHTLGVKSNCRLKHMRGRSFPPNYVVDVIPALPRISVKTSLPQTATFSNMNSADIVVTSASLTLYNGESSSCTITITNESATLPLEHLEFSINSNVEQELQQKIFRIDEEAIKAHLPVPPQGTIEIIVDVFAEADFVCPQPPASLHSAAAPGDYGASSLTHYSSVSTSGHASLPSRVGSPHHRRNEPQNSSFRSTISGGPPSLAALTLHPGGGGGVGPSSLGSQYNQHIEAQVRFKYSGGDALTAGYCRQCAVSFNLELLPSVQITSWDVLPAEVASQFYLVLDISNLTAQEMSLNYTDTKNILIEAKESCRVPIPVDRCSLEKVVAARAAEVAENLERELCFRTQLLSFNDALSKLCSIHIAERVKIKWLLTGTDIQGIASLRGIVLSQSMVDLTAVSPLEWAISFQDTLVQPHNEIVCTVGQRSLLSIQLANQSLQPLRNLVLSIKFYQDYLNGMENYNLETRVAISGPNRIAIPLLEKQEQKEHTCSVIFFTPGRFKASIECTSNPQKQSEQPSSLLTRSCPAEAESVGQSVMFSSSYDEQQAHVWKFIPPIEVTVVEQ

SEQ ID NO: 4210 - DNA, 3569 bp, DROSOPHILA
gaccacacggctgtgggcaccaaaaaaccggctgcgaccatcgaaaacaagccggtggtggtgctaaagctctggagccagggcttctccatcgatggcggtgagcttcgtcactatgacgatccgcagaataaggaattcctagagactgtcatgcgcgggtaagtggcactcattcccatcgatattatgctagcataagcgtatgtgcattccctaaataagttctgtgaagctacaataatcgaacgtacactcttccagggaaattccgcaagagctgctggaaatggggcgcatggtcaatgtggatgtggaggaccaccgccacgaggacttcaaacgtcagccagttccgcagacttttaagggatcgggccagaagctgggcagtcccgtggccaatttggtcacggaagcgccaacagttccagtggcattgtcgcccggtgaggctgcaaaccaggaggctagtgcccgtgatgccattaacttaaattccgaagcaccgtccactacgctgcagattcgcctagcggacggttcgcgtctagctgcgcagtttaatctttcgcacaccgtctccgacattcgtcgtttcatacaaacgtaagtcactgatttcggagatccagcaaattgattaacttaagcgcaattcgctttgcagtgcacgccctcagtactcaactagtaatttcatcctggtgtcctcgttccccactcgcgagctgagcgacgacaattccaccatcgagaaggctggcctcaagaacgcggcactcatgcagcgcctcaagtaactaactataagtcaagtacgcgtatatgtgctctcagcgatggggggcaaaaacctatgaaataaaactggatttggtgaagtcgggaaacctattcgggccgatccgatgcctataattatctacgatatatacaatataccaaagttgtgtgcttacttgtattctctttatggcagtcaagcaatctctcaaaactacatgtatttaaatctcaaccttaacgtacgctcctggatgagtagctccacctcgttgcggagcacattgatgtgttccataaagtcctcgcgaactgcgttgcgccagtcgtgcaggccatcgctgcccacatggtcgcagtccacgtagcggtgcacgaatccggttgataacgatagttccacatcggatgtactggccaagagctgcgccggcggcagctccaggcgattcagcaatgttttgaactcagatcttcgctccgggtcgtactgaacgttgtcgggcaacagtttcttccggtcatcgaagcacacggacatggttgccagttcgaagcgcgtgatctcggaggagaagtgtcgcagctgctgctggagcgatcccttcacctggtccccagagaactttgagttggggaagaacagctcgttggggcggagtagaagggtgaagccggcgtggttcacattccgcagcaagcagtccgtgagtaatagttgatggattcgcgaacgtgtgccattggactgctggaagggaaagttaaaaggcaggccatacagatgaatgttggtgcgctccaacaggtgatgcacttcctctggcagttcgtcgtggttgtagaccaggaaattctctattcccaatgcctggtggaacaggaagaactgcagcaaagcattttcattacgtgcgaacttggaggtcatgttgaagccaacgagatcaacgcaaacggtggctggtagtcggtgcgctacagctaccaccttgtcgtcgtccttcttgctcgctggtctcaggtttcgcagacgcagcctcactggactcctggtggttgttatgtccgtgaaggagacactgccgggctgaccgaaatctcggctcacctggcagaagaagtgatagctggtgaagttggaagacttgtcatccaccaggctctcaatggagtccctctgaaaacgaaactttccctgcacactgcgtccgcccagaaggtccaagctgcaccggaagtcgactactgctcccttttttccgaccaccagaacgtgggcttcgccgccggccaccagttcgttgcgcatccagaaggcggagtaggcatgaaaggagtctccgatcacctgccacacgggcagagggcgccacagcacctgcgccccgtcctccttggttccgttctccaggcggcggaggacagcggcatcgttgcgtccgaagaagttgacgtacttgagcacgtactttaggcgattgttctcggtcttgtacatcagcaggatgctgacgctgaggcaggagatgagcagcagcaccagttgctggtatttccgcatcctcgccaggtaatcttaatgcaagtaaaaccaaaacaattaacaatacactccctaaattgatcccgccagcaacagctgatttccagggctggcaggtgctcaaattatattcagaacgcttggcggtggattcaaaagtccacgttgagccaagctgcttccaaattcgttattcaaattttgtcgacctggataaagtaatcaccaaaccaaaaacatgttagcttggattttatagttccagtcgtaggccatttattgtttttaaatcaactatctgtatactttacgttagacatcttaaatcaaatagaaattcgttatatgttatttttcagtgtgcaattttttcagttaatttacaaataagcgtcaaagttattgtggaagctcgcatttttaaatgacccccccaacagagctgcccacttttatgcatatagcgggcgttgccagatgccagcagctcggttttgttgattgttgtgttgagtcaggagcaaaaagaaaacaccgataaaaggagagaactgcgaaatccggaaatccccgtcctgaggcgcaatttgccccagcaagaacatggccagcagcaaggagttatgctccatccgggaatgggcaccgctcacggaggtcatcgagcggattccggcgcgcctgcagcgcggtttctttccggcgaatctcaacctgacctgtgtggacgccaccgaggagttcctagccatgggcagcgacgcgggcatcgtcttctggtataatcgccacacgggcgagatgcagaagctgaaggctgaggtatgcttcatgatgactcattctcgttccccgaacgtgcgtgtgattcccccattaactcaacgtcgctctgccccttccccttccaggtggccactcggattacgtgcgtgcgggttgtcaactccgtcgagtacatggttgcggctgggtgcgccaacgggcaggtgagcatcttccagatacagaaggagctgccacgggaccttgatttggtggctccttgcaccaagagtcggcccattgagcggtatactatccgggatctgcacaagtgcgtggtcagctgctgtgagtggtccaagaacgggatgaagctctattccggcgatcgccagggagtggtggtgctcacggagctcgattaccaggcggtaaggggtaatcttgtatatttaaatatttaaattaagca

SEQ ID NO: 4211 - DNA, 1569 bp, DROSOPHILA
tttttggtttggtgattactttatccaggtcgacaaaatttgaataacgaatttggaagcagcttggctcaacgtggacttttgaatccaccgccaagcgttctgaatataatttgagcacctgccagccctggaaatcagctgttgctggcgggatcaatttagggagtgtattgttaattgttttggttttacttgcattaagattacctggcgaggatgcggaaataccagcaactggtgctgctgctcatctcctgcctcagcgtcagcatcctgctgatgtacaagaccgagaacaatcgcctaaagtacgtgctcaagtacgtcaacttcttcggacgcaacgatgccgctgtcctccgccgcctggagaacggaaccaaggaggacggggcgcaggtgctgtggcgccctctgcccgtgtggcaggtgatcggagactcctttcatgcctactccgccttctggatgcgcaacgaactggtggccggcggcgaagcccacgttctggtggtcggaaaaaagggagcagtagtcgacttccggtgcagcttggaccttctgggcggacgcagtgtgcagggaaagtttcgttttcagagggactccattgagagcctggtggatgacaagtcttccaacttcaccagctatcacttcttctgccaggtgagccgagatttcggtcagcccggcagtgtctccttcacggacataacaaccaccaggagtccagtgaggctgcgtctgcgaaacctgagaccagcgagcaagaaggacgacgacaaggtggtagctgtagcgcaccgactaccagccaccgtttgcgttgatctcgttggcttcaacatgacctccaagttcgcacgtaatgaaaatgctttgctgcagttcttcctgttccaccaggcattgggaatagagaatttcctggtctacaaccacgacgaactgccagaggaagtgcatcacctgttggagcgcaccaacattcatctgtatggcctgccttttaactttcccttccagcagtccaatggcacacgttcgcgaatccatcaactattactcacggactgcttgctgcggaatgtgaaccacgccggcttcacccttctactccgccccaacgagctgttcttccccaactcaaagttctctggggaccaggtgaagggatcgctccagcagcagctgcgacacttctcctccgagatcacgcgcttcgaactggcaaccatgtccgtgtgcttcgatgaccggaagaaactgttgcccgacaacgttcagtacgacccggagcgaagatctgagttcaaaacattgctgaatcgcctggagctgccgccggcgcagctcttggccagtacatccgatgtggaactatcgttatcaaccggattcgtgcaccgctacgtggactgcgaccatgtgggcagcgatggcctgcacgactggcgcaacgcagttcgcgaggactttatggaacacatcaatgtgctccgcaacgaggtggagctactcatccaggagcgtacgttaaggttgagatttaaatacatgtag

SEQ ID NO: 4212 - protein, 449 aa, DROSOPHILA
MRKYQQLVLLLISCLSVSILLMYKTENNRLKYVLKYVNFFGRNDAAVLRRLENGTKEDGAQVLWRPLPVWQVIGDSFHAYSAFWMRNELVAGGEAHVLVVGKKGAVVDFRCSLDLLGGRSVQGKFRFQRDSIESLVDDKSSNFTSYHFFCQVSRDFGQPGSVSFTDITTTRSPVRLRLRNLRPASKKDDDKVVAVAHRLPATVCVDLVGFNMTSKFARNENALLQFFLFHQALGIENFLVYNHDELPEEVHHLLERTNIHLYGLPFNFPFQQSNGTRSRIHQLLLTDCLLRNVNHAGFTLLLRPNELFFPNSKFSGDQVKGSLQQQLRHFSSEITRFELATMSVCFDDRKKLLPDNVQYDPERRSEFKTLLNRLELPPAQLLASTSDVELSLSTGFVHRYVDCDHVGSDGLHDWRNAVREDFMEHINVLRNEVELLIQERTLRLRFKYM

SEQ ID NO: 4213 - DNA, 4576 bp, DROSOPHILA
acttggaggtcatgttgaagccaacgagatcaacgcaaacggtggctggtagtcggtgcgctacagctaccaccttgtcgtcgtccttcttgctcgctggtctcaggtttcgcagacgcagcctcactggactcctggtggttgttatgtccgtgaaggagacactgccgggctgaccgaaatctcggctcacctggcagaagaagtgatagctggtgaagttggaagacttgtcatccaccaggctctcaatggagtccctctgaaaacgaaactttccctgcacactgcgtccgcccagaaggtccaagctgcaccggaagtcgactactgctcccttttttccgaccaccagaacgtgggcttcgccgccggccaccagttcgttgcgcatccagaaggcggagtaggcatgaaaggagtctccgatcacctgccacacgggcagagggcgccacagcacctgcgccccgtcctccttggttccgttctccaggcggcggaggacagcggcatcgttgcgtccgaagaagttgacgtacttgagcacgtactttaggcgattgttctcggtcttgtacatcagcaggatgctgacgctgaggcaggagatgagcagcagcaccagttgctggtatttccgcatcctcgccaggtaatcttaatgcaagtaaaaccaaaacaattaacaatacactccctaaattgatcccgccagcaacagctgatttccagggctggcaggtgctcaaattatattcagaacgcttggcggtggattcaaaagtccacgttgagccaagctgcttccaaattcgttattcaaattttgtcgacctggataaagtaatcaccaaaccaaaaacatgttagcttggattttatagttccagtcgtaggccatttattgtttttaaatcaactatctgtatactttacgttagacatcttaaatcaaatagaaattcgttatatgttatttttcagtgtgcaattttttcagttaatttacaaataagcgtcaaagttattgtggaagctcgcatttttaaatgacccccccaacagagctgcccacttttatgcatatagcgggcgttgccagatgccagcagctcggttttgttgattgttgtgttgagtcaggagcaaaaagaaaacaccgataaaaggagagaactgcgaaatccggaaatccccgtcctgaggcgcaatttgccccagcaagaacatggccagcagcaaggagttatgctccatccgggaatgggcaccgctcacggaggtcatcgagcggattccggcgcgcctgcagcgcggtttctttccggcgaatctcaacctgacctgtgtggacgccaccgaggagttcctagccatgggcagcgacgcgggcatcgtcttctggtataatcgccacacgggcgagatgcagaagctgaaggctgaggtatgcttcatgatgactcattctcgttccccgaacgtgcgtgtgattcccccattaactcaacgtcgctctgccccttccccttccaggtggccactcggattacgtgcgtgcgggttgtcaactccgtcgagtacatggttgcggctgggtgcgccaacgggcaggtgagcatcttccagatacagaaggagctgccacgggaccttgatttggtggctccttgcaccaagagtcggcccattgagcggtatactatccgggatctgcacaagtgcgtggtcagctgctgtgagtggtccaagaacgggatgaagctctattccggcgatcgccagggagtggtggtgctcacggagctcgattaccaggcggtaaggggtaatcttgtatatttaaatatttaaattaagcaatcgcctattgtgaccgttgaatgcagcacctcagcaaatcggtggagatcctgagcgaagcatacgagatcgtacagcttagcgttcggcagagctacctactggtggccaccctctaccgttgcatcgtatgccagatggacgctcaaacctcgcagtggaacatcacccaggtgggaaagaaggatcgcaaacagctcatcgactgcggggccatatttctgaagaaacaggaagcaaacaagccgcaacttgtctgcggacgtcctggcctgcgcttctgggtggcagacgctgcgggaaatgtgtccaaaacagtgatattccgagatgccgttctgcgcagtcccacctgggaaatacctattctgaaccccaagcagcgcagtgagccgtccggtacccaccacacgtctgcgtctacatcttcgactagacattctggactggcagatggcgatgtgggctacgtggccagcagcaactttcggcaactatatctctacgatggccacgactcactactggtaacacacgacgatgcaactctgtacgtacttaacttggatcgactcaaagtagaagccgttgcgcgaggattgcggaagatccttgatttctgcgtctgtggcaaagagatcttcgtgttggagggcaatcgcacattgcttcgtctagctcctttaccggaaccaccaaacaagacggccaaggtcatcttcaatcccctgatgccgcctccagttccggttctaggctcgcacctatcgcaactggagtcgccgatagagcttcaggcggagccggttcttcaaaacgcagaggagtgtttcgagttgtcaccggtggaacaactgaaccttaatgtgcccatcgaaatagctgtggagtcgccactgactcaacaaaatcgtcgcttggaaatcttccgccgcatcggagaaatggacttcgagcagtccatcgtccacaccacccgcaagacatccgtaggcaaaccgcccgaggccagtggtgtgggaatcgttgagattggccatgagacccatgagctgcggttgccgcttaccaatgccgccacactaatggaggcgagctactgccaaatggagaagtaagtaacttatatatttacacttcatatttgatattaacatggcttccctcagcaatggtctggcctctccactggacatgaaggcagccttccttcagcatctgcccgatgcgctaagtcccaccaccttgcagaagaccgttgcggagaaggccaagaccctggccgccgagctggatctgcccgaggtgcatctggcgccgttgtcgcaggaggagctgcatgctgtccaggctcagacccctcaaataagcgaccctctaatcaggtgctatcccacgcacctggaagaggccagtatccaaacgagttcgcgggaaaatgcaaccaacccagctgatgattatcatgtaggcgagcccgtggacgggatacggtcatttggcgtctccaagcgtaaaatggctccgcttaagttcgtcttaagccagccaaagccgactctgaagttggaagagaacagggatgatgaggagtacaccagcttcctacccgattttaggcgggctggcgatccactggcgatccacaaggaaacgccagccaccagtgactcaaacacctccagcgagtgggagtttttggacaactagttcagtattagaattaagtgcatactcattcgattccatttgcatttttgcactttattctctttctatgtttctatgtttgcaaaagtgttgtgtttatcagattgtgatcaccgtgatttagttactctttttagtggaatttacatacataagtgtacataatattagacgtatactgaccccaccagtatctacacaaatacatatatttcaaatattagcctttatttaatgttatcgtacgcttgtttaagatatttaaatactttatgtatttgctactcaagttcaaggtcgctttgcaatctcgaaatacatttatttgatataagtgcaaacatttcgtccaaagggtgccccccagcaggaaatggatacggactgataccgagtatttggttgttgcttttttctggaactatatgccagacttgagccgccgatagagttgcatgtgagggaaacgagacgcccacgcccacacccactgcagcatgtgcccggtctgctgattgctccagcggggcaattcggtatggaaccttcttgatctgcagtgcaaacggaacggcccactgcattgattgatcaacaaatagtaattcgagctcccttcgcactcaattggctgcaataatggaaagttttgagaagtttcgcttacatctggcttccagaagattcgacgaagccttcggcctgctctcacgggaagacttagctaaatggtaccggagaattgaattctactcatgcatgtgtgcagttccaatccaacagatggtactgagatttttgaaattgattataattatgatgatgtaatgatgtaggaatactaattaaagattattcaagcgaggctaagggatctttaaggcctgtcagtataggattgtatctatgtatggaaataaaatataaaaacaaaagagaacgctttagtcgatctcctcgactatcagatacgagttattgagctagtgggaatgcaagg

SEQ ID NO: 4214 - DNA, 2364 bp, DROSOPHILA
cagttaatttacaaataagcgtcaaagttattgtggaagctcgcatttttaaatgacccccccaacagagctgcccacttttatgcatatagcgggcgttgccagatgccagcagctcggttttgttgattgttgtgttgagtcaggagcaaaaagaaaacaccgataaaaggagagaactgcgaaatccggaaatccccgtcctgaggcgcaatttgccccagcaagaacatggccagcagcaaggagttatgctccatccgggaatgggcaccgctcacggaggtcatcgagcggattccggcgcgcctgcagcgcggtttctttccggcgaatctcaacctgacctgtgtggacgccaccgaggagttcctagccatgggcagcgacgcgggcatcgtcttctggtataatcgccacacgggcgagatgcagaagctgaaggctgaggtggccactcggattacgtgcgtgcgggttgtcaactccgtcgagtacatggttgcggctgggtgcgccaacgggcaggtgagcatcttccagatacagaaggagctgccacgggaccttgatttggtggctccttgcaccaagagtcggcccattgagcggtatactatccgggatctgcacaagtgcgtggtcagctgctgtgagtggtccaagaacgggatgaagctctattccggcgatcgccagggagtggtggtgctcacggagctcgattaccaggcgcacctcagcaaatcggtggagatcctgagcgaagcatacgagatcgtacagcttagcgttcggcagagctacctactggtggccaccctctaccgttgcatcgtatgccagatggacgctcaaacctcgcagtggaacatcacccaggtgggaaagaaggatcgcaaacagctcatcgactgcggggccatatttctgaagaaacaggaagcaaacaagccgcaacttgtctgcggacgtcctggcctgcgcttctgggtggcagacgctgcgggaaatgtgtccaaaacagtgatattccgagatgccgttctgcgcagtcccacctgggaaatacctattctgaaccccaagcagcgcagtgagccgtccggtacccaccacacgtctgcgtctacatcttcgactagacattctggactggcagatggcgatgtgggctacgtggccagcagcaactttcggcaactatatctctacgatggccacgactcactactggtaacacacgacgatgcaactctgtacgtacttaacttggatcgactcaaagtagaagccgttgcgcgaggattgcggaagatccttgatttctgcgtctgtggcaaagagatcttcgtgttggagggcaatcgcacattgcttcgtctagctcctttaccggaaccaccaaacaagacggccaaggtcatcttcaatcccctgatgccgcctccagttccggttctaggctcgcacctatcgcaactggagtcgccgatagagcttcaggcggagccggttcttcaaaacgcagaggagtgtttcgagttgtcaccggtggaacaactgaaccttaatgtgcccatcgaaatagctgtggagtcgccactgactcaacaaaatcgtcgcttggaaatcttccgccgcatcggagaaatggacttcgagcagtccatcgtccacaccacccgcaagacatccgtaggcaaaccgcccgaggccagtggtgtgggaatcgttgagattggccatgagacccatgagctgcggttgccgcttaccaatgccgccacactaatggaggcgagctactgccaaatggagaacaatggtctggcctctccactggacatgaaggcagccttccttcagcatctgcccgatgcgctaagtcccaccaccttgcagaagaccgttgcggagaaggccaagaccctggccgccgagctggatctgcccgaggtgcatctggcgccgttgtcgcaggaggagctgcatgctgtccaggctcagacccctcaaataagcgaccctctaatcaggtgctatcccacgcacctggaagaggccagtatccaaacgagttcgcgggaaaatgcaaccaacccagctgatgattatcatgtaggcgagcccgtggacgggatacggtcatttggcgtctccaagcgtaaaatggctccgcttaagttcgtcttaagccagccaaagccgactctgaagttggaagagaacagggatgatgaggagtacaccagcttcctacccgattttaggcgggctggcgatccactggcgatccacaaggaaacgccagccaccagtgactcaaacacctccagcgagtgggagtttttggacaactag

SEQ ID NO: 4215 - protein, 710 aa, DROSOPHILA
MASSKELCSIREWAPLTEVIERIPARLQRGFFPANLNLTCVDATEEFLAMGSDAGIVFWYNRHTGEMQKLKAEVATRITCVRVVNSVEYMVAAGCANGQVSIFQIQKELPRDLDLVAPCTKSRPIERYTIRDLHKCVVSCCEWSKNGMKLYSGDRQGVVVLTELDYQAHLSKSVEILSEAYEIVQLSVRQSYLLVATLYRCIVCQMDAQTSQWNITQVGKKDRKQLIDCGAIFLKKQEANKPQLVCGRPGLRFWVADAAGNVSKTVIFRDAVLRSPTWEIPILNPKQRSEPSGTHHTSASTSSTRHSGLADGDVGYVASSNFRQLYLYDGHDSLLVTHDDATLYVLNLDRLKVEAVARGLRKILDFCVCGKEIFVLEGNRTLLRLAPLPEPPNKTAKVIFNPLMPPPVPVLGSHLSQLESPIELQAEPVLQNAEECFELSPVEQLNLNVPIEIAVESPLTQQNRRLEIFRRIGEMDFEQSIVHTTRKTSVGKPPEASGVGIVEIGHETHELRLPLTNAATLMEASYCQMENNGLASPLDMKAAFLQHLPDALSPTTLQKTVAEKAKTLAAELDLPEVHLAPLSQEELHAVQAQTPQISDPLIRCYPTHLEEASIQTSSRENATNPADDYHVGEPVDGIRSFGVSKRKMAPLKFVLSQPKPTLKLEENRDDEEYTSFLPDFRRAGDPLAIHKETPATSDSNTSSEWEFLDN

SEQ ID NO: 4216 - DNA, 4084 bp, DROSOPHILA
atgctagtgcttccttttaccgaaaacctattgaatacgctaaaaaattggaatagtcgcaagcggaagtcgtccaaaaaaatccttaagaattttggaaccagtttttctacttgtcgtatcgaaccaggcgcgtgtcgtcgccgacctcctccagatcctttggatcgcggcggaagcgataagtgccgacatcctggttggccgattccggcaacgtcaccttgatgcccttgtactcggttcgaccttccctgacctccggcacccgcagctccatctcggccttgtactcgtcatcgttaccaatgtccacgtcctggacgttcttttgcacggtgggatcctcctcgtcctggttccagccatcaatctcgatggggacaatggggttgccgtcgacgcctacgacggaactaggtgcgccagtaggcaggatctccacggtatctccagaaatcggattctctgctggtggcgactcaactgcatccgcgtccactatgttggtcacctctttgaatggagtatggtccatcaatgtcagcgaattgacgaaattgcgattaaactctacgtcagtcttggccatctcatttatattgatatctatcacggtcacgccatcgatgttccgcggacggtcaatggtgaggcaagtaagaccagtagacattttggagtgcaaggtcgagcgggccacacggacacggtgcagcgccagctgattcctcagcatcgaaagattgcgaaacatggtttttgtcggtgtttcgagtgcggaaactaactacccaacagaacaaaaaccgaagttaaatttaaaaaacgttcttatttacaaacaaaaattggaaggtcttatgttgccgaaattttagatatgactaaaattcccagctaaacccgacaactgacaaatctcgattgtgaaggaagttaaaggccaggctacactggttactgataattactgaaattgaaatataaatgaaatcactatcgccgtatcaatatctttattggtgcattttatgtgaagtacacaagcgtttaaacatattcttttgtcaccctcttatacctattgacaactcgaacattccaattccaattccaattccaacaaatactatatactcgttttatacctaaatttcggtagggtaacaatcaagaagtttatagatttatacctaaaatagtacataaaacaattcttccatccttaattcatattagctcactccgtagatctaactaccttttacataaggtagcgaacaaattttaggttttaacgttttcgcttaggggcacttccggttgcccttcgcaccttccgcttgccagacgtggaggtttctgatttctcctcgaaagacgactcctcctccttgccagtgcgcacctcccgatttactttgtaggcggcgcccattctcttaatgttctccttgtgcaccacttcgtgtttaacaatccggtggggataatccgtgccgaggacgcagccgtatgcccgctgatccaccagcgacgccttccagggctcataaatacagccagcaggatattttgagagttccggcacatacttcctgatatagtgcccttggggatccgttttcttgccaaacgccaccggactgtagacgcgaaaatactggtgaaagaaagcggacgcagatagccacatccagttgccagcgtttagtgcccagtcctgatccagcagcagctgctcgaacacccgctgtccctcctcccaactgatccagaggtctccgcgcgttaagaaacatgccactgcatgccgggccagatgatggatccaaccctcctggcgcagctgacgcatgatggcgtcgatgaaaggatatcctgtgcgtccgtgtgtccaggcctccaagtgatctggatgctcctgccacggaatttgcatgcagtatacattgcccaacattcgatcgaaattgggttccgcagccgccactgtgtagtaaaattccctccacatgagttgtccaatgagcgaaacgggcggctgcgagtgcttcggctggcgtttgataatttccttgagcttttgattgaacagtcgggcactaaggcatccaaatttgaggtaagggcttagtacggtagtgctaggctccagcgagttgggtgccgtgttgggcttctcaaagcgggcaacccaaatttcatcctttagggattcctccatgcggcgcagtgcctctgtttcgcctgtttgataaaaagaaatccacattgttgtagttgtgatcaagagtttaactatgtttttacctcccggaaacttattagggcccagttcctccgggcgttttactaattgcttcatcgtaggacaatcataggccgccgaatccttttgctccacctcatctttgggtggtgtaggcatgtttttaagcttttcaggaacccctagaactttaggtacctttagttgctccacaatgcccaggaacttttgataggtaattggagccttgccaagattcttcgctattactaattccggattataaatcgtgtgggagcaatgagtttccactctcacaccctctgccttggccaacttctgcacggcagcatcccgggtcacggagtacggctcgatatctgtctcaaaagttagcatttccacgcgccaactcttaaaaatacggggaaaaacctctgcgggcttcccgcgcaccacaaacagacgggaattaagtttccgaagctggttatccaagtcctccagcgtttgctgcaggaatcgccatcgattggcacccacttgcatccaatcgaggattcctggatccaaaatgaaaatcgggcgaacaaagtattttcctggagcagcgttagcggcggtaaaaatgtgcgataatgccggattgtcgtgcaaccggagtcctttacggaaccagtggaccaacgtggacctttgtgaatccattttggcacgtgtccccgatttcaaacggtacctatgcggatttatcgtagaaaatatatttcaaaagcaagagcgttctaacgaacctgccaacacgttttctgaacttatttacactgcgctgcaaggaaagtgtataatgttctggtgagcgtgtttattttgttcacatacgtagatagggcaagtgcaaataatatgaagacaaatttcattgcataatatgaaatttaaatatgttcacaataatattttatgatgtaaaaacgtagaacttgttaaacgttcatgctctacatgctttaatcaatttaaaattacaaaatgaaatgtctaacctctttttacatgttttgagcaagatattgtatatacatttttttaaatctttcaagaatttatgtttcaagtcgtccgtcgagtgtaaacagctgttttgcgattcgaaaataccgaagtatggcaatagcgaccaagttggccatcctcactttcagtattttttgcagagtttatttggtgcacaagcaccggtagtcaatataattataattacattaaaccacctaaaacaagctgatcaaccgcaatcaaacatctcaacgggataataataaacgccagagagtggtaagttcctaacaatacggccacgaagagcgaacagctcgattaactgaaattccctcgcatatctttcgatggcattgcaggcgcacatccgccaattgctcaacattaagcgaggaaaacacggcggaaaaatggatctgctcgactcaatactcaacgccatggatgcgccgcctgccaacaacgagcaacagaagacgctgatcaagaaacagcgcgaaatgttagagcggatgcagaacaaacagaaagaggagctcctccgattccgaaaatatgtagacgaacggatggggcgattcgccaaggacgacaggcgatgcatcgagtttcagccgctggataaagtgcatcgctcggtgatccacgaagtagccgaaaatggcggcttcattgccatgagctttggccgcgaggatgtggaccgacattcggttgtgtacaaaaaggaacacgctcctggcgagg

SEQ ID NO: 4217 - DNA, 2021 bp, DROSOPHILA
aaaacgtgttggcaggttcgttagaacgctcttgcttttgaaatatattttctacgataaatccgcataggtaccgtttgaaatcggggacacgtgccaaaatggattcacaaaggtccacgttggtccactggttccgtaaaggactccggttgcacgacaatccggcattatcgcacatttttaccgccgctaacgctgctccaggaaaatactttgttcgcccgattttcattttggatccaggaatcctcgattggatgcaagtgggtgccaatcgatggcgattcctgcagcaaacgctggaggacttggataaccagcttcggaaacttaattcccgtctgtttgtggtgcgcgggaagcccgcagaggtttttccccgtatttttaagagttggcgcgtggaaatgctaacttttgagacagatatcgagccgtactccgtgacccgggatgctgccgtgcagaagttggccaaggcagagggtgtgagagtggaaactcattgctcccacacgatttataatccggaattagtaatagcgaagaatcttggcaaggctccaattacctatcaaaagttcctgggcattgtggagcaactaaaggtacctaaagttctaggggttcctgaaaagcttaaaaacatgcctacaccacccaaagatgaggtggagcaaaaggattcggcggcctatgattgtcctacgatgaagcaattagtaaaacgcccggaggaactgggccctaataagtttccgggaggcgaaacagaggcactgcgccgcatggaggaatccctaaaggatgaaatttgggttgcccgctttgagaagcccaacacggcacccaactcgctggagcctagcactaccgtactaagcccttacctcaaatttggatgccttagtgcccgactgttcaatcaaaagctcaaggaaattatcaaacgccagccgaagcactcgcagccgcccgtttcgctcattggacaactcatgtggagggaattttactacacagtggcggctgcggaacccaatttcgatcgaatgttgggcaatgtatactgcatgcaaattccgtggcaggagcatccagatcacttggaggcctggacacacggacgcacaggatatcctttcatcgacgccatcatgcgtcagctgcgccaggagggttggatccatcatctggcccggcatgcagtggcatgtttcttaacgcgcggagacctctggatcagttgggaggagggacagcgggtgttcgagcagctgctgctggatcaggactgggcactaaacgctggcaactggatgtggctatctgcgtccgctttctttcaccagtattttcgcgtctacagtccggtggcgtttggcaagaaaacggatccccaagggcactatatcaggaagtatgtgccggaactctcaaaatatcctgctggctgtatttatgagccctggaaggcgtcgctggtggatcagcgggcatacggctgcgtcctcggcacggattatccccaccggattgttaaacacgaagtggtgcacaaggagaacattaagagaatgggcgccgcctacaaagtaaatcgggaggtgcgcactggcaaggaggaggagtcgtctttcgaggagaaatcagaaacctccacgtctggcaagcggaaggtgcgaagggcaaccggaagtgcccctaagcgaaaacgttaaaacctaaaatttgttcgctaccttatgtaaaaggtagttagatctacggagtgagctaatatgaattaaggatggaagaattgttttatgtactattttaggtataaatctataaacttcttgattgttaccctaccgaaatttaggtataaaacgagtatatagtatttgttggaattggaattggaattggaatgttcgagttgtcaataggtataagagggtgacaaaagaatatgtttaaacgcttgtgtacttcacataaaatgcaccaataaagatattgatacggcgata

SEQ ID NO: 4218 - protein, 540 aa, DROSOPHILA
MDSQRSTLVHWFRKGLRLHDNPALSHIFTAANAAPGKYFVRPIFILDPGILDWMQVGANRWRFLQQTLEDLDNQLRKLNSRLFVVRGKPAEVFPRIFKSWRVEMLTFETDIEPYSVTRDAAVQKLAKAEGVRVETHCSHTIYNPELVIAKNLGKAPITYQKFLGIVEQLKVPKVLGVPEKLKNMPTPPKDEVEQKDSAAYDCPTMKQLVKRPEELGPNKFPGGETEALRRMEESLKDEIWVARFEKPNTAPNSLEPSTTVLSPYLKFGCLSARLFNQKLKEIIKRQPKHSQPPVSLIGQLMWREFYYTVAAAEPNFDRMLGNVYCMQIPWQEHPDHLEAWTHGRTGYPFIDAIMRQLRQEGWIHHLARHAVACFLTRGDLWISWEEGQRVFEQLLLDQDWALNAGNWMWLSASAFFHQYFRVYSPVAFGKKTDPQGHYIRKYVPELSKYPAGCIYEPWKASLVDQRAYGCVLGTDYPHRIVKHEVVHKENIKRMGAAYKVNREVRTGKEEESSFEEKSETSTSGKRKVRRATGSAPKRKR

SEQ ID NO: 4219 - DNA, 11294 bp, DROSOPHILA
tctctcatgatccaatccattcacgaataatacacattgcaaatgctttcgtccctaactttatggctgagacacttacttcgcttacttgagcctaacataaaccgcacaaggtgcatcgttttagttcttgaattcttgtaaatttcgaaccaaaagtgtggtttgccagcaaaataggatttatttttaaaattaatttttatatgttttttgcgcatgttcaagtcttttgttgattttatgttcttcggtttaaattgaatcttaaactcagttttttttttaagttgtttttggtttggatcagggactaaggtcgtgggctttaggaagtgccccacttcggaggttgtattgggggttagtcttaagaacaactttcggcttaaacttagcttggaacagtcaaacaaatatcaagtccgctatccttcgaaacttgtctctcattttttgtttgactcgcatgcactgaatgcacagattatttacagattttacaattacaggaatagtttcaaaacctaaatatacgtacgcgaatagagctataaatttagtttagatttgttttccaaagaaatcgattgtgttcgtacaggatgtgattaacttcagtaaagcttaaattaaattaaaataggaaagtaaatttcgcagaccgaaaaaataacaatatgaaggtactatttaatcataaccctaattacaatctttctcttactcttagcttacatcgaaatgaataaaatgttaattaatgtttactttaatctctcagctggcgtgtattgatggtcaaaggaaacatgggttgtattgaaactactattgcattctggtaatggactgtgttttcacatgtatacattgataatggactcatttagctttatggcatttgatgtgagatttagttgatttatgatgttaaacatatggtgtgacccggaattagcgcacccaaactctgtgcacaggattaaattaatggtttaggtttgttcacgaaacatttagttccatacaatttataatagaagcaaatatagtatacaattcatatatatatgtatataaatttatatataccatgtaaagttatagttttgtttacttatttatggctacaataaaataggaagaacaagctttggttataaaacaacaagaaacaggatttataaagggatatgttcacaggcaatatgaaggtaaatgaaataacaaaaataaaaaatatgcgtgacgatgcaggttgccagggtcgagagttttggtgtagacattttaaaatagtttaagcataggattacaaagagaagcgcttccagcaatatggatacctacttatgggagaggggtggtgttcattaagttttagaggcacagcagcagcaatagcgacgtgggcatggcaagctgttcgtgagcaggcggcgcgccaaatcgtttgattcctttcattttattttttacgttacgatttcctgagtttatcgactttatctgttggttagtgcctaaaagagttatctttttcttgctaatgatctgttgtggctggttttgtatatttcattgcaggctaaaaattgtctgcggttcaaatctgttgttttctcactgctttccactgctgctcagtcttgacatagtcttactgttttgttttcgttatgtatttatcgtttcgtttgctggcgttcgttctcgctcgcgaacaggatttataaaaaatatatatattgtatataatgtgttattttgttggtatataactaggccctaattggtagctctaatggcagtgcggcagtttttttgtggcgcgccgccttgatcactccgcccggaaacaagcaaatctcagcgaaaatgtcaacgaaggttatgtacaatagttgaggatggtgtaacacaaaacttataacgagctcgttctgaacggaaacaaagcaaagcattggaaactttaaggatgagttagcacataatatttacaacttctttgtatttaatttcttaacgggtttctggattctggaactgcttcgcaagcgctgccaggacatttaaggtaacgcggggccaggttacaggttactactatttgtctgcccccgatcccacggggcgtgacacgagggctactcgtcaaactgaagccacaatcagttcttgaccttgtcctccacactgatgctagcaagtgtctttttgatgcgaagcgctgtcaatcgggccacaggattgggataccagcactccttcatcaccttggccatgttgtggagcacatcggaggcgtgccagcggtttggaatgtttggccggcacttctcgatgcaaaccacctttagagaaattatgaaattatgacacgagtccacattcgttttgttccttgaaagactcaccttcttcatctcctcaatgctgggatcaggttgcacgacatcgtaatacggcaattgatactcatcgtatatcatgcccatgttgcagcgacgcgcaatctcccagagaatcagtccaaaggcgtacacatccgcccgcttgtacgagtcaaaatgctgatcattcatactctcgtccagcacctcgggcgccatatagcgcttggtacccacgcgatgagtggaaggtatgtccacagagtcattcttctccacatggcgcacggccagacccaaatctccaatagcacagcttagatttgatttgaccagtatgtttttggatttgagatcacgatgggcgatggcgggcttgccgcgagtgcccacaatgtccatatgcagatgcgccagtccagtggcaatactcagcgacatgttcagcatggtgttggtgtccactgggtgcgtggttaggtagtcaaagagcgatccgttttcatggtagtctgttacgagccacaactgtgtccaagttccattgtctgtaagaagcatacattaaaatgattgcgtttagataaaaggcctgtaagcttacccttgttgtctgcagctatgaatcccaaaatgttctcgtggcggagcataacagtctgatagatttccgcctcacggaaccaggaacactcctcgcgactagagaagatcttgaccgccacgttttcgcctcgccagcgtccacgccagacctcgccgaaacgtccctttccgataacgtggcacagctgcacctgtcgggcaatggaacgctgcaccagcagcggaagaccagctgaaagagaagtgcataatgaggccaagatgcagacgggaattagacccccccatggaactcacccgaacccgaaccagaggtggtcatctcaatgatgtcgtgtatggttgtattaccattcaaaataggatcgtacgccgaatcctccttggcaaacgtccttccgctagccattcgcttgcgacgctggcaataataccacgtactggtgcccgtgaagcaaatgaagagggtggcccctaggatgatagccacaaactcccagctggtcagtcggtgtggcacataatctggacaaaacccacaaaggcattcattattaagggcagacgggacatgcggtccatgtaaatgtgatcgaattaatggaaaataaatacaaagagaatgcagaatgttagtcaatcaatcgagagtggcatgcaagaggccgttaacaagtaaatgtgcgtgataacattaagaaatcagggtgcaaaacaagttaaacaaatcgaaacccaaaaagctcattccaaacacaattagcggttaataatacttaaatgtagtaattaatttacaaaaacgtcactgacctgcgtgtgaatatttcgagttatttacaaacctttgcattcaattcggcaacgagcttacaaactacataataatgacgaaaacgtataaaacaaaaaactaacttggcggctgcttacaaaaaaggaaacaagccaaatccaaacccgaattccaaccgaaatgttccgcagacgaactaatccatacacacataccaacctcccactgaacaaacacaaaagtgcaatggaaatgggcgaacaactgcgagaaactatatgataaattggcctcttggacgactgaatgccctattggaagttagtttcagttccatcgggttccattgactatcagaaatcgtacttgaataagtgtgacaatttttgaataaatttattcttatgttgaatttaaggcttatcatcatagttaagttttatagtttaatttccaatcactatgtggaccaatggaacttttgctagggtaacaagtatgaaaagcggcagactgctggcaaaaaatgcagccgttaatgaatgaaatgaaagaacgttgactgcgacttgcagttgcaactgcagttctgaaagcggcattgcacatgaatgaaacgtggcagacacacagatacacacactctcacacaccggcacagacacttggggttgggaggtggaggaagaggtggactcatggagagggtgagcaaggccaccgtctgcaagggcttcttgaaactcattctcctcctcctccgcctgctcctgcccctcctctttatcccggtgggcggatgggcggttgtgcggttgctgctgtcgctactggcggcccttgagacgggcttgttgttgctggtaaatgccttgcttacttcctccttaaatgcgttttaacaagtcaatacgataaagacgcaaaggtcaggccagcagacagagcccgcaggacggtgcggcacaaactcggttgacaggtgaaaggtggcggcctcaacaaagggtttgggctgtgggctgtggggtggtcaagcggtgggccagcggactaggcaacaatgtggccggtgcttataattcacaagaaatgtggcaaaggaagtcaatgtataaacaaggacgacaaaccacaaacaacgaaattaaacgagcaaaataaaaacgtgttcccaattggttttgcagtttaagaccacagtactattgaaagatatatttttaggcaagtctctaaaaacactggatattatttcattttacttattgacccatttttattagtttaaatataattaaaaagatatattttgctttctcggtgctttgtgctcctcgaaaagctctcaattacaggttaccaaactcaaaactcattgtgacatcgaaacgaaaacttatcatatttactctcccctcgaaggacgaacaaggacgaagacggagtgggatagggtgattcgctggaagcgtgggtgtgcaaggtgtgtgttagccaggtatgcttatgcgtgtatgtgtttctcgtgtgaaatcaatgtgttacaaatttgagtataccaaaaaaaactacgcaaatgaggtggtgcaatggcatgggcgtggctgcttcgatggctggtggtggttgaattgttgaattgttgggcggtgttggcggtgcattgctggtctcacctggtaggacaccactgtaattctcacgcgtattgcaaaaatcttcggcgcagcactgagaagagcccgcttccgaatttaacttgcacgaggtaggatcttcaggtggcaactggtctgttatgcatctacatacataatatttagttggggtttgttttatctactagtttgctttagctttttagtactacattactaaattacgtaggagattagcacttgttcttcttgttcttgttgcagttgtagttgttgcagtgtgcagttgcgaagcagctttggttaccacttacgagctaaattttagcagcagccctttatttatttatttgttggtggttgctcagccaggaaagggttggggtgggtttgtcagctgcagcaggtggatacaattgtgttttgggtgcaaaggcagtaagcggagtcggtcgcggtcatcaaaaaataccagggaatatggaagggagccactgccaaatgtgggagagttcgggtttactcttacaccaatttatcagaacagttccgtttttcactttcccacacaattttgttattattcttccagcaggagaaaatccaagtgaaaatcggaacccaaccatacattgctagacaataaaccaggaaaaacagcgtaggtacatcataaacttttttaaagattttcgtaagctgaaaacattcgtggaacctcgaaaattgggattttaaaaacaataaatccaaggaaaaccacatacatcccgcgaaggagggcaagaaacctcatcgcgagcgaaaggcgagtgggagtgcttccaggacgaatcgaattcaccccttgagtggaagctctgatctctacaaactacaaagatactttggcatgcataaggatacgtgtaatttactaggataaggtgttgtaggctggattccgtataagatttatggtgtgtatttgtgccacgcggaaaagcagggagaatagaaaaaagtgaaaggtaaagaaaaagaaaaataaaaagaaaagaagaggtgggagtccgagaagcgaaaaagtgcaagtagtcaaagtaaatatgtaataagctaaggggaaaactgaggcggtgtgcacacctgaggggaaacagactgaactaaaccaaaaattattgttacagattattgaattgttataattaatctattaatcatattgatgcagtgctaattaggcgcagtgaattagagaaggagtgcaaactaaagatagaaattgtattgttgttggttgtgtggtttttgttacttgaatgcggctgtacctgtttcaaatatcctcttcataatctcattcttattgcagaaatcactcttacagcaatcaatcctatacgtatcgaacctttcgttactggtgaggcattcgaagggcttactccgttgcatattgtacttgacaaccatgcaactgggtcaccgtacagcacagtccacaaatatgtgaacgagcggggataatgcgataagttcgatatattcattcgagtggaggagccgaagggagcgaaggaaatatcgggagatagagaaaataaaataacaattatacgaaattagtattgcttggcattggttgttggttgctgctgatgctgctactgctgcatctgattctgattttgattctgattcagctgtagttgttgccgccttcggcttgttgctaattgaagtggcagtctggttagtagcaagaagagtattataattatattgattacagtgtgtgtaacgccgctctggttttcagcaggtcatcattagtagtgctctgcatttggggttatgatcatttcaaaacttcaactcaacgagcataagtgggggaaacagtccaaagaacgatcaaaactgggcaactggttgttgaacggcgtgcgagtgaacagagaaatgggagcagtcagagaggaggggtttttgggagcgaaacacgtgcataagcgcacgcaccttggacggagatttgccgcccttcttcgacacgatcactcctctggtccttcgtctttggccacagaaatcggttgcagaagtccctgtccttgcagcaggcgtgggcgccattgcgacccactgggcgggcggttggtccgccgtgcagcccgtcgttacaccagatggagcggcccggcggaaagatttgagacttgtgcagacatctgcatcgctcgatagatcgatcgtatcagacatattcacactggctgctctgaggggcaagtgctaacctaatcaaaggcctgctcctcaggctctcggcactcacctgtagctgaagatgatgctcccatcagagttcttctccacggacgtgaaacaaaagccgtccgtttcacatatattgttcgattccttgcacgtgtcacagtggcattttatcttgtctgcagaacataaaaggtaaaattaatataaagatctatttgcaaaaaaccaaactttagagtactatcaaatccatacattcctaccaaaaatttgttaactttaaaccgactcaccaacaaaaacttattcttcgcttaacgatatatcttcactatttgtaggtgatcctaaccaagcacgtgtttcttgtaatatttaatgaatattaattacttgtggaaaggtaagcaaaggaagaggtccgcgcctcatttgccacggttaatgattttcttattatttaaacaaataaaacgcaaaagcataggttagcagtagcaaacttctcgaattaagaaaatgccccgactccgattgaagcaaatcaatcaattaggcgctggcagaaattaactaattagagaaataagagacccataaatcaaccactcgctgattggcatctcctgaccacaaattgggatttgccataaccatgcccccggggcacctggccgggcacacgctcgcccagacagtcacatagacatccatagccactaccatatccacatctaccgccaccgacaccgccgagagcgtgatgaaacaaaaacaaaaccatttagcattaacaaagcagacgcggagaagacaagtgcaaagtggagggccagacaatgcgaccagtttccccttcccccggacagcgagaagccagtgccagtgcttaggcctgcttttttttgcaccgactgcagttgcaagtgcccaagtgcagcaagcaaatgcatccagacgtgggggtgtctgcagccaggcagcgttggagtgggccatgagagctgtctggctcagctcattgacaccacggagaggtgacgtcactatatgggaacggaatcggagcctcaggcgcagacgaagacggccttttagaagcgttcagagtctttgaggtgttacagtcacgcgatatacacacggagaaaagatccctatggcatcgaaaagatcgccaagtattaagtaacccttggtaagatattttaattattaaacaacaacaacaaaaatgtcaatatatcggacaagtaaggtataaccactaagcggtttctatcttctcccaataatggatttcaccttaaaaaagggaagtaaaatgacctttactctgtgctgactttcctggttaactgaagtcaagtaaaatgtttgcaaggcaataccggaacaagtctgtaaatctatcacattcttgttgtttagataattcggggtgcattgtccgcagtgtgctctacactctcgttaggcaatcggaacttactttctggctttttcgcgctaggctgagcaatgtagatgggcagctggggagtaacagcaggggccacagctccagatgcgtcgccgtcttgcggcagcagcatggacacggcgctagcgttgttgttgtcgtggcttctgttatcagcggccagcgacgacgatggcgactgataagcatgtccagctgttccagctggagccctgagcgccggcgctttggtcgtcggtggccatttgccagggtgggttgcagtcgcaggatcagatcgagagccatttaggctggtgtccattacgaactcaatgggggaggctgcaccgggggagattttaggttagtttcgcacctgatccagattaatggaaccgctggggggtacactcaccgcaaacagaggcgccgagcagagcgcccaggaagattagccggagcgcagataacatgttggctattcgcaccgacgatagtgtgtgcgacccgacccgagctattgttattgtttgtgcagcccgagagcttttcttttgttttccacgatcgcacgcacgcacacgcgcgtcgcaagttcaaagtctgtggcctgcaaatgagattgttgtttcgcggcaggacgaggcggggccgcaggagcaggaggagcggcaggaggacacctcagacagccactaattggccccgaactgcgcatttatcgcgtaggacaggcgcccgcgaattcccacatttggcgggggcatggccgggaatatagactggcgattctcacaattagcgaatctcgatgggggcccgcaatgcgaaactcgaactccacactccgcacaagttggttggaaaaactgctctgctctgctttacatttcacggacgagggcgacttttcaggcggattttcatcacgtgattggggcagtggcgcgggggaagtggcactatttcatattccgcgggacagccggcactttcgggtgtctggggcaaccgtttgtttatattaattgctgctattttttcttaaatgtacaattttgtgcagcgaaaaaccgcgctggtgtgtgtggatttgcaaacagtgtgaccgcacctgcagtagtgtgcccaggctggactgcccatgaaaaacacccacccgctagagaagtgcgtaaaaatgcccaatcggttatgtttttatggacaatgatttttgttaaaatattggttgtttccaggatacataaaaaaatttcgatttgttttgtaacagatatttatttgcaatagctgcaggtactgcacccgttcccagaaacccaaccagaaccaaaatgcggggcatacgacagcaaaatgatcatgtccactatttttactgccataacagactgaaaaggttcagaggcggcatgccaggctcagctcccttcataaatcctgcgaaaatgagaattggtcaaaatcaatgtcggtccatttgatattaccccgctgcttcttcttcccagccgcgtgtagattacaaaaaacatgaaccacaacttacccaaatacagcacaagaggcacgaatccccagtggaatccagtctggacgactccaaccacaaatcccaaacgatccttaactccctcggatagcttcatttcgtacggatattgaatttagctccttttgcgaattatgaaatgataacttgtctgactgcaaacgaagtgttggaaaacagcacttttttcgatataaaacagctgacagaaactttttgttaggttactcgttcaatttatattttcttgggatggctttgtcgcaggttgctgggcctgaaataatttaccaatttaaagaatcagtaaaattatttcgaatacagatttctgttggtgtggcaacattgacatttgagcgcaaaatttaaattcgcttctaaaacggtcacaccgttttgccctttgggttttaatctgatattctttaatttatattttccactataaaggtttttaactaccatttcaccgacaagttgtctattggacacatatcatgaaaagaaaaaagtgtgcttggtctgaaaaataccttttcgtatt

SEQ ID NO: 4220 - DNA, 3612 bp, DROSOPHILA
tgtttgcaaatccacacacaccagcgcggtttttcgctgcacaaaattgtacatttaagaaaaaatagcagcaattaatataaacaaacggttgccccagacacccgaaagtgccggctgtcccgcggaatatgaaatagtgccacttcccccgcgccactgccccaatcacgtgatgaaaatccgcctgaaaagtcgccctcgtccgtgaaatgtaaagcagagcagagcagtttttccaaccaacttgtgcggagtgtggagttcgagtttcgcattgcgggcccccatcgagattcgctaattgtgagaatcgccagtctatattcccggccatgcccccgccaaatgtgggaattcgcgggcgcctgtcctacgcgataaatgcgcagttcggggccaattagtggctgtctgaggtgtcctcctgccgctcctcctgctcctgcggccccgcctcgtcctgccgcgaaacaacaatctcatttgcaggccacagactttgaacttgcgacgcgcgtgtgcgtgcgtgcgatcgtggaaaacaaaagaaaagctctcgggctgcacaaacaataacaatagctcgggtcgggtcgcacacactatcgtcggtgcgaatagccaacatgttatctgcgctccggctaatcttcctgggcgctctgctcggcgcctctgtttgcgcctcccccattgagttcgtaatggacaccagcctaaatggctctcgatctgatcctgcgactgcaacccaccctggcaaatggccaccgacgaccaaagcgccggcgctcagggctccagctggaacagctggacatgcttatcagtcgccatcgtcgtcgctggccgctgataacagaagccacgacaacaacaacgctagcgccgtgtccatgctgctgccgcaagacggcgacgcatctggagctgtggcccctgctgttactccccagctgcccatctacattgctcagcctagcgcgaaaaagccagaaaacaagataaaatgccactgtgacacgtgcaaggaatcgaacaatatatgtgaaacggacggcttttgtttcacgtccgtggagaagaactctgatgggagcatcatcttcagctacagttgcatggttgtcaagtacaatatgcaacggagtaagcccttcgaatgcctcaccagtaacgaaaggttcgatacgtataggattgattgctgtaagagtgatttctgcaataagaatgagattatgaagaggatatttgaaacagattatgtgccacaccgactgaccagctgggagtttgtggctatcatcctaggggccaccctcttcatttgcttcacgggcaccagtacgtggtattattgccagcgtcgcaagcgaatggctagcggaaggacgtttgccaaggaggattcggcgtacgatcctattttgaatggtaatacaaccatacacgacatcattgagatgaccacctctggttcgggttcggctggtcttccgctgctggtgcagcgttccattgcccgacaggtgcagctgtgccacgttatcggaaagggacgtttcggcgaggtctggcgtggacgctggcgaggcgaaaacgtggcggtcaagatcttctctagtcgcgaggagtgttcctggttccgtgaggcggaaatctatcagactgttatgctccgccacgagaacattttgggattcatagctgcagacaacaaggacaatggaacttggacacagttgtggctcgtaacagactaccatgaaaacggatcgctctttgactacctaaccacgcacccagtggacaccaacaccatgctgaacatgtcgctgagtattgccactggactggcgcatctgcatatggacattgtgggcactcgcggcaagcccgccatcgcccatcgtgatctcaaatccaaaaacatactggtcaaatcaaatctaagctgtgctattggagatttgggtctggccgtgcgccatgtggagaagaatgactctgtggacataccttccactcatcgcgtgggtaccaagcgctatatggcgcccgaggtgctggacgagagtatgaatgatcagcattttgactcgtacaagcgggcggatgtgtacgcctttggactgattctctgggagattgcgcgtcgctgcaacatgggcatgatatacgatgagtatcaattgccgtattacgatgtcgtgcaacctgatcccagcattgaggagatgaagaaggtggtttgcatcgagaagtgccggccaaacattccaaaccgctggcacgcctccgatgtgctccacaacatggccaaggtgatgaaggagtgctggtatcccaatcctgtggcccgattgacagcgcttcgcatcaaaaagacacttgctagcatcagtgtggaggacaaggtcaagaactgattgtggcttcagtttgacgagtagccctcgtgtcacgccccgtgggatcgggggcagacaaatagtagtaacctgtaacctggccccgcgttaccttaaatgtcctggcagcgcttgcgaagcagttccagaatccagaaacccgttaagaaattaaatacaaagaagttgtaaatattatgtgctaactcatccttaaagtttccaatgctttgctttgtttccgttcagaacgagctcgttataagttttgtgttacaccatcctcaactattgtacataaccttcgttgacattttcgctgagatttgcttgtttccgggcggagtgatcaaggcggcgcgccacaaaaaaactgccgcactgccattagagctaccaattagggcctagttatataccaacaaaataacacattatatacaatatatatattttttataaatcctgttcgcgagcgagaacgaacgccagcaaacgaaacgataaatacataacgaaaacaaaacagtaagactatgtcaagactgagcagcagtggaaagcagtgagaaaacaacagatttgaaccgcagacaatttttagcctgcaatgaaatatacaaaaccagccacaacagatcattagcaagaaaaagataactcttttaggcactaaccaacagataaagtcgataaactcaggaaatcgtaacgtaaaaaataaaatgaaaggaatcaaacgatttggcgcgccgcctgctcacgaacagcttgccatgcccacgtcgctattgctgctgctgtgcctctaaaacttaatgaacaccacccctctcccataagtaggtatccatattgctggaagcgcttctctttgtaatcctatgcttaaactattttaaaatgtctacaccaaaactctcgaccctggcaacctgcatcgtcacgcatattttttatttttgttatttcatttaccttcatattgcctgtgaacatatccctttataaatcctgtttcttgttgttttataaccaaagcttgttcttcctattttattgtagccataaataagtaaacaaaactataactttacatggtatatataaatttatatacatatatatatgaattgtatactatatttgcttctattataaattgtatggaactaaatgtttcgtgaacaaacct

SEQ ID NO: 4221 - protein, 601 aa, DROSOPHILA
MLSALRLIFLGALLGASVCASPIEFVMDTSLNGSRSDPATATHPGKWPPTTKAPALRAPAGTAGHAYQSPSSSLAADNRSHDNNNASAVSMLLPQDGDASGAVAPAVTPQLPIYIAQPSAKKPENKIKCHCDTCKESNNICETDGFCFTSVEKNSDGSIIFSYSCMVVKYNMQRSKPFECLTSNERFDTYRIDCCKSDFCNKNEIMKRIFETDYVPHRLTSWEFVAIILGATLFICFTGTSTWYYCQRRKRMASGRTFAKEDSAYDPILNGNTTIHDIIEMTTSGSGSAGLPLLVQRSIARQVQLCHVIGKGRFGEVWRGRWRGENVAVKIFSSREECSWFREAEIYQTVMLRHENILGFIAADNKDNGTWTQLWLVTDYHENGSLFDYLTTHPVDTNTMLNMSLSIATGLAHLHMDIVGTRGKPAIAHRDLKSKNILVKSNLSCAIGDLGLAVRHVEKNDSVDIPSTHRVGTKRYMAPEVLDESMNDQHFDSYKRADVYAFGLILWEIARRCNMGMIYDEYQLPYYDVVQPDPSIEEMKKVVCIEKCRPNIPNRWHASDVLHNMAKVMKECWYPNPVARLTALRIKKTLASISVEDKVKN

SEQ ID NO: 4222 - DNA, 22874 bp, DROSOPHILA
tgaagacgaagacgacagcagttcttccacaaccaccagtagcgaggcggagggaaacagcgtcatcgagcagtgcagcaacagtgagacagcagccagcaccacataaattgccacttatgtcgagttcggcaagtcctgctcctgccttgcccaaaacaaacaagcaacacaaccaacttaatgtcaaagaacggaggctaaacagtgattacttttaaaattaaaacaaagtaaaatacgaaactaaaaaccaagccaagtaaatgatgtaagtttacacaagaatacccaaaaaagaagaacttcttatatcttaattgtacaataatttaacgaaaagcaaactcaaagatttgttcacgccaaatgcgaaaagatatttgaatattttttcccctttgctctacaattacttcgattataattacacatacaagtaaatcagaactttagcatttagtatggcattagagtatgaaacatttgaattttgaattctgaaaagcgaaatctagttgtgcatttgtatatacatctatcgatattgttggtgctgcaagcaaagaaaacaaaatatgaataaaataaaatggaaatggaaaacaacctccaaacttatctacacagtgggcaaaagtcattaatgatttacatgttaatgttgtatgagtgtcttataaaaagaaagacatgaagtatgaacgaaaattctaataaaatggataatacatatttttttaaaaacatcgcgacatgagttctttattattttattcttcgtatcaaccaagctgtcgtttaaaaaagtgacaaataggtaggtaagctttttgaaggagaagttatttttcattttacttacaaacatttaagtatcagtatttaaaatgcatataaaacatactgttacttttagtacgcttaaatcagaagatcagatactttgtatcttcaacacaattttgatggttcaatccgataagaaaaacatttgcttgggttttattatcttttctttatttatccatactcacatacatacatatatgcatatctatgtacgttttaaaagctaatttaaatatttatggactgttaattgaagaacgcatcgtattgctggtgctgcggattctgttgatgctgatgcgccctttaattacgattagtgtaaagctacaatttacaagttaaactaactaaactcgtatgcattttgaaatcgccaatagaatcgatacgcccagcgaggccaatttgagttgtggagctgttgtcaattggttcttctatagggtgtctgcttctgtctcaatctctctctatttacacaagtcacaaattgtttaacaaaaggtatgtgcttttagattacttaaccactacattcaacatggcggccatttcgatttgaacaaattttttgatattgcgccggtttcagaaaattgcttgctccatctgatttaatgtgattgattcaggattttcctttactgacactgagttattcttccacatccatttccttcaatatttacaagaatctgctttaactctagttgctttttagggcattgtgcgccatttacagatctggaattcaagatcatagcatcagaaactctatcagaaagtctattgggattttgagatttacttactcatagtctcctgttggatctccaccttgtatgagggattatcgtaggcagcgtcgctttttcgtggtggcgtaatggatgccgtttgatgaactcgtctcctggtgataataagtagcagggccaaagtagacatgatcgccagagcggcgatcacagaaaccaccacaagggggccgtagtaatcgcctacgggttggtccgttcccgccgttaggagttttcctgttaaaagcacagtcgaattagaataattgtcaaatcaatgtagtaaaatataaaattccaatgttaataaactgaatatggcgtattggaatttaaactcaagactgaatttcacctcaccaaatagtttaaatcctctacatactccttcgaaaaattgcaagacttgaaagggaattatgttctattgacaatacttataccctcaatattccgacaacttaccagtctttccgggagtggctggaccacctggcttcgtgatgaagttgacaacgttgctcttcttggtgttgccgttggtcaggtacatttccagccagaggcggtacttggtgcctggtttgagatccatgatcagggtaccagtggtgctgtcccgcttggccaccttgaagacgctggagtcctccttgccagcgtcgctctggtagatggcacgataaatgtgcacgaacttgtcctccggatagggcactccgttccatgagatctcgacactctgggtcttcaccttggttacgttaacggtcacatcgaagccatacacgtccaccttctgggcagttcgcaccttaatcatgtgtccggcacgcaattcagctccatgtccagccaatgggatgtagtacagcccaatctcgtagcccgtatccggctgaaggttctggatggtgtagctggtcaacgtgcgatggatcagaggcgttgaggagtagatcatgcccgtcagttccttgtagcgcagctgaactccgtccacatattccatttggtcgtctccaagtttcttccatgtcaactgcaaccagctggcattcgtttcgctgaccgtcagttctggatcctcaacgttcttaaagatgtcctggaagtctggcctgtaatcggggaacggaggtggcggagtgatggtcctttcaggtggcgtcttcacggtgtagatactgctcgtgggctgcgagtttagatcacgaaggattaaggtgatcttcaccttgtacagtgagtttggttccagactgggcagatcgaactccatctgggatgtggcaatgaggtcctcgggcggagcaaaaatctgttgttcccaggtggatgtatcgttactgggtccattcgagtagcgcagctccacgcgtccatggaggttcacatagacctggggaacggtgaagacgatgcgaatggaacgaggatcgatggcctccagtgtgtgaacttcgatatcaggttgcaggttgttggctcctagttatgataataagaaaggttcgatgtcaaagtgaatcattttaagagttaaggaaagagataagcagtcttatagatcatacaattggagtttatacttttacttttaaactaaatctctaaaatggttgtttcataaaaatttaaaaaaattatatattgatcaatttaatttacttcggagctaaagaagaaaatatgatagtttcccacggtgatcttaacttgctcatctctgacttagatttaagtttaagttagtatttgaaaagtgcttgagttgcggattagctgcaagcatgttaatgatggatgatcttttgtgctgatgggtgtgttggtgcttgtgatggatgactgtatgtctgtttttggtttttgtggatagtgttgtctcagttagtacagtagaaccctgtcgcagtgtttctgttttttgctgtatagctgagcggagtaaaggagatctaaggagtgtggtggtgtctagaatagattgctcaacctgactgctgctgtttggccagcttgccctggttctggtgcagactgtgctcactagcctgcgtcgagagtccggaggtggtgctcgagctaggcaggattgtctgctgcaagtgttgctgcggggtcgtctggtgctgctggggatggtgctgtggtactcccagtcccgggatcacaggataactctcataggccactgtttgcccatcgacaatggcaatgccatgtcctggtggcggtggcggcactccactgtgcacgatgggcacataatgaccaggatgttgctgcgaaatttgttgctgctgcggatgcagctgcggtgtcagggattggtgttgctggtggggcggaggtggtggtggtccacctggaacagtttgctgcaggtgctgcagtatctgttcgattctaacttgtggtcccaggttgtgattgtctttttgcgtttgcccaggatgaatgcgggggggtccaccatggccaggatgaaccgggtgtcctggttgttccgcacctaatatattgaacaaatcggactgactagtgggcactggaggcggtttgccctgtggtgtgccattgggattgatgtcgtacggctcatagggattatagtcctcgtaaacgggcttcacgggattgtagaagccatacggaccaagatgtggctgatgcggatgctgctggccgaattggaagggcacaaaaccgccgttcggtggcaaaggctcctcctgctcctctgtgcgatcaccgtcgaatataacatcattctggtgctgctgctgctcctgctgctcctgctgctgatgctgctgctgttgatgttgcactttcttgtgggccttctctggtttttccggcttctcgaagataccaagaccaccaatcgacttgggtggcttgccatccaaggttggatagaaggcgccacttgctggtggtctcttctcctcgtccttcttgatttggggtactttgctaggtatactggtcgatttatttgctgtcgctgtcgttgttgttgtttctgttatcggttgcatgttggatggttgattgattggttgttgtagtttgattatttacaaaatgcatagcgtgaataacaatattgaaattggttgtgatgagcgtagaaaataaaaataaagtaaaacgaaattaaatagcatgtcagcgcgataaaaatggaagtagagagagatcagataagacagcgagcaaaagcgcaacatattaagaaaataaacaaatcaaactaaatatatgcaaaactgaaaaatgatttttcaatgacaaagcctaagaaaatgaagcgatttggtggaaacactgtcttcattgcaacatgcaaactccagaaaagaaagggattattatggcatgcacatatatttaccatttgctggaatcgaggaatgggttgaagtagcttccgtctcttcgtcctgacccgcacctccgattttcgggatttggggggcacacatccagtgcttgcagcactcgtcatcgggaatgggcagcaggcgggccaaggctggatggcagggcaagtccgccggaggaagagctggaaccggaggacaagctgccctgcactctacccgtccattctcgcaataacaatgctgatcgcaacctgtgtgaaagaagccatgttcgagagatatggaaatggaggtgaataagccacgatcttacctgtcaggttggctgggacaggggaccagttctcgatctggacgccttggtaactgcatgtgccattgtcgacgcaacgcatgctctccggacagcaattcggcggcgagggcttgaagtccgccggaaccggttcccagcgtatgcagtgcggatcctggacatccaggccaaagttcgaggggcactccagcttggcacagtgaatgccctgctcattgcaaatgcacaactggtcgcagccatcgcggaactgctgacccacatcatattctgcgcccttgaatgtgcaagtgggcttggcgcctccggcgtcgcgagcctgctcctggaagcggaaggggtcgatctcctctggatcttcgttgttgttgctctgcagcggcgttggctgctgttcgtgatcgtccagcgtgacatcgcagagctccagttggcagcacacgtccttcgggtcctttacatacacacacttgtccagacgcgtgtgattccgttccgggcagcgtggcctgcaatccatgacgcctccttcggcacaatgacagatctgctcgcacccgatctccagacgctcccggaatttgtagacaccgctgttgtagtggcaatcagttcggggcttgggcgtggctgcaatgtggtgggtggtggcaatgagcaatgggcgtgagcggcgtggatgcgacatgtttatggagagcacagagaacacgccaaatgttaaaaagcttggccaaacagtaatgacttgggaatgcatacaagctacgtttacagcgaagccacaaaaagctaattcatctgctgctgcccctaagatatatgtacgctcactcaccttcatcatcggtcgtgggcagggtcacagccgattctcccgttccattggtggaaggtgcagcaccctctgtggctaccaccgtgggctccagctgcggctcactgcattccatcacccgacagcattcgtcctcctccaccatcttctccagacagttgggattggccatgctgcgctggctgccgcgcggataacttagtcccctgcaccttggctcgcacatccagtcgccgcggttgcaggtgcaacgctcgtcgcaatcccgctccatcaactcgccgtgctgtaaataatggcaagacgttagagtctaaattcttcagcttatagccactaaataaatcaccacaaacaacaattgcttccgtggtagaccattttattcatttgttcatttaaaaacaataaaagctacaaaagattgtcgaaaatatagtaattgtgaattagcgtcgtcgttaaacttttttttgcctatcgataggaagtagaaacaaataacaaaaataaaaaatgccaatcggtcaaatgaacggacagataaacggagagacacactaggtcatatcgactaggctagtgatcctgatcaaaatcctatatacttgtaagggtcggaaaacttttcttcaatatgctacagactttccaaggaataatcacaaaaacaacaataattaatctttatatctaacatcaatgtgaaaaattatcatacatcataaaacatagcataagcaaaataattaaacaatgcagctttagatttatccatatttttatcaaatctataaccactatgaccactactttcactatcttaaaagagccctaaattacactgataatcatgcatttgattaccaagaacagccgcaaatttattccattaatgtccaaaatcgacctactgagccacttttattttttgtcaaaatacatatttcctccatttcgctgtgtgaaagctatttgcgcacaaattacgtcaatttgcacaaccaactaagcaggtgagagcaaatgggctcatcaatcatccgccccgttgattgaaggcaatcaccgtctaagatttcctgctctcgacgcggtgctccaataaccaaatatgtcatatttcaacggaacccacgcaagcttgagggcaaagtttatttgttggagttgaaaataaccttttgtctgttgtttgttctcttaattgtttagaaaaggtttttctgcgcgtttattaggttctcaggtgcaagaattcgcgcccctttgttttggccagaaatttttaatgaccgtctgttgtggggccataatttcctccccgtccccattgcttaaatggcacctaatgattcacaattgttgtgaacctttgagccttggcgtcgcaaaataaaaccccaaaaacgccctctttggcacaataaactactgaaaagaaaacccgaataagcttgataaactgtgcaattttaccgactattttctgagttatttggtgcccacttgaaaagcatttgcggcatgcggcttggcatgttgcacgtgtctaccaatcgatggcaatttataaaaaaaaaaaagtggggcttgggaggtccgatcagccgccgacaacaattcattaaaagtgaaagcaaaaattatttcatatcgaagtggaccgcaaactcgattatgaaaactacaacacaaactatgcaaaagattaagaaaaacgatattaataaaagatgagggcaggggggcaatctcgaagtggaaatactctttataaagggtaaaaccatagcagtgacaaatgaaaattatactacgagaaagatattaaaaatgcacttcaaatgccaaaattgtttaattatctttaataatatgtgctgactacattaagttagagtatttaaaaagaaaagccaaacacgcgcttaattaaaaaaaaaaaaccacaccaagattcaggcatcgcagcggaaaatgggttggtcagtaagttgtggcagatggaggcgtgctccagccacgtctagctatatatctggatatatacacaagctcccgatctggagctaacatgactgggcgccattacccgaggcgtagagaaccgagtgcaacgtttgatgaacacgtcacacttggacagacgcaaaaaaaaaaaagcgtgtagcaattattgaaattcaaagtgcccgatggctttcaatcagctgaacgataaggcataccatttttcacgttcaattgttctaactgagatatatttgtctgattacttatttaaaatgccggcaattgtcactctgcggtgatgattgctcccaattgggtatggtgattggcgctgagattgggttgggctgatccgcgaccacagcggcgatgtcaacatcaatcacagtgagcagtttcttggaattttctccctcagcctgtctgtattttgtgccttttttcttgctaatatcaaggtgcgcaaatatttgcataattgctgcttgggcgagcagcagccgggaaagctcaccgaattattttcgattttcgactttttcaacttttttggattgcgcaggcagctgcgctggatgctggaactctgaattggctctgaccggtttcactgtgggcaccaaactcgttgccattatgcaatccaggtgacgacaaggcaaattggagttgcgtgtgccaggaagtgggcaggccgacagggaaatggagacgtcgatagaggcgcagctttctctcctcgtcaggatctgtcatatattctattgtgttttttgtgatggttgtcatacggcctggcatttgacttagacaaatgctttcaattctcctcccatcaataaaaacgaatgtgaaacaacaaccagatctgtgcattgacgtcagacggttgaaaatgtcaaagattaaataaaaagtttcgagcaacgcatttaaaattgacttcctatgtgatcgtttgcgtatgcatattatagttaatggaaagtatataagtgatttttataataatgattatataatttttagtaagaatcgttttgaactaagttttaaatgatttctgtgtcatttaatacgaaccttatagctcttgttgttggccaggcattcccgctgcatggtatccccgctggcagtgatctccacaattttcggcatttccgtttccggctgagcagtggtcgtggtggtgctagtagtgctgctctctgttttgctgctgccctcgttctgatctccgtccatgctgacatcactaagatccatgagctgctcgtgtgtagagccattgtggtgcagaaacagctcgatatcattgccgccacccgccgatcgtccctcgccagcaaaggccacaaatggcgatggctcggtggtggtggtcgacgcctcggtggtggaactgctctccgactccttgaccaccccctcctcctcctcatccttctgatcctcctgctgcagcatgtgttgtccttcaacaatgttaatcactggcaccgactcgctgtccggcattattgtggtggccgcttcatcttctggatcattcatatgcatggcgcgtgctcgcgatgtggttgaagttgcggctgttgctgcagttgttgtggatgtggatatggatgtagactcggttgcagttgatggctcagcggttgccttgttctcctgactgacaacaataccagccacaatgcccgactctgtggtgctgttagtagtcgaagtggtagaggttgttgacgattcctcggtgctggtcgagagcatttgataatcttcgtgttcggccaggcgatcatgattctcggacagtatatgcacatgatagggatcttcttcgcgttcgttcgggactgtggatgtggatgttgctggtgtacctgttggcggtgtacctgttgcctctgtggatgtggaggttgctgctgccggcaccgccgtcgtcgttgtctcaacttgtttgtcactttcgatctcgacgttctcctcgctgttgctgttgctggccgttatgagcgtggccggatgtcggaaattgttgagatccttgaccacatcgtcctgctcattagagatctgattaagctcattctgctgctgatcctgctcacgctgccgttgcatctcggtggtggcatcgtcggcgccactgctctcggcgtgctcatcccgcagcggaatgtgctgaatgtggctctgatctggttccgtgttggagaagaccatgtgctgatcgggtccctccgtttcctggcggggcgttgtcgtgggctccgtggaggtgatgggttcaatgctcgtcgatcgcacgctggtctcctctggcaggctgcttgccaccggcacatttgtcgtaaaatctgaaaaaaaaaacaatatatttttttatttttcaacttgtttttattgctttgaatgtagttataggaaatataagatataaattaaagaccaccctcgacttgtttcttttccaactataactaaacatcttattgcgtataagtttttccttttcggtattttaaatggaacgcggaaatttgtcatttaatgattcagttccttcgctgaaaacttgtaacagcaaatcaaattatccatcatagcttcttagctaaaaaaaatatttggtactcttatgttgttacagtaatctataagaaattatattttcaatgaattaatttctttacgactttactttattataataaaatacgtatacgtatacgtataataaaaaatacgttcctcctttcaaaaaaaaaatacctaaattctttaatttttacgattattacgtaattatgattattatgtgaaatttaaatgtaggtcagcaaggcaaagtgaccagcgttattaggattactctgatgttgttataacttttaggtactgtaaaccaattgattgtgcagagaattccttgtgattccgttccggaattgagtcatttctggggtaaacaaactctaaggctttgtcccacatttacggtaactggcgaatagaattcttttgcaactctagcggaaaccacgttgatcgtattggaaatatctcacgcgtctcgtcatcattatcatcatcaccatccgcaattcgcattggatacgccatcattgaaacgtaatttctgtttttcgctcggtttatttttgtttttcttttttgtggcggccgcagcatcaattcctcaaaatctgcaaggtattcattaagccccgtctgcctgagtcttctgcctgctgaatcatcgtccacaggtcgaaccattctcggaagacccgggcggacgaggcccgaccaaaatatcaggcaatacacatcttgtatgatataattcttgtttctcttcggttttctgcttcttttggctcgagtatgttggcctttaaagctcttttgtgggctcagacagacacagacccggcaacttgttgttctttgtgattttctcttctctctcttatataattacatttgttttcgggcacagtttcggggcgcaaaactcatgtcataaataaatgacgaccttagtaaggggtctttaaaaagttcttataataaaccaccagaaaacacttgactcgcccatggatggccacgagattcaagattgcttctgccaagctcgcagactattcacaggaacattcaattaagacttaattcattaatgggaacttgaacttcattgctaattgttgcgcacgaatgggaaatggtcttgaagatgaaaatagctgggaaaccttttccctccaccgccgattctccaattttaagttcttatctcgtaagttagtcaatcaatattcatttagctggtacttaattatgtttgattgccctggctgtcaaggaattccaaaaatttccatttgaattctgtcttcagtcccattccggtaataactttaaaatggtctagctgcaattttcaacgtactcgggcactcgatcatccagttggaatggtaaataaccctcgcacatacgtctctgactcatggaaggtttcgaggaggggaactggaatggagtaaacggcgaccccatggggacggcatttacccagtcaagtcctccggctcgacaggcctacgtaaagtgtgggtggagggggagtgcgactgtcatgcgtgcgtcgtaatgggcataaaagcggtcccctaaaccataagccctagtccccagtccctaatccctagaccctagtgcctcctagtccctagtccctagcttcttgttcctgatacctggtgcagacacaacagttgtcgccgctccaatacgacgacgaagagctgaaatgaatttttctttggtactggacgcttccaggcagtcagtcagtcagattcaaaggctgtctcgcagtcagagtcggcatgcaacgaacgccaatttagcgttaaaaattcttcttaaaagggcgaacttcgaaagttgaatacccttcagcttagtctttcaaattccaaactttagattaaatggaaacaaaaggtagtacagcatttactgagatcgaataaccgatttaaattcgataagtttaaaaattcattattagtataagatgatggttgcgatttatttcctggcaataaaacattcttgtttcaatatgcaatatttctaaatattttccaaatcgatatacctcttaaaataaagggtacatggcacctagcgaaacacagttcggttcgttagtcaacagagtgaatgggagaaagaggccctagacgatttctatatagagagaacatctttatgtgtgtgtgtgttttatgttttagctgttgcttttattgttgtgccgggactggagcttagggttactgacatgaaccttgaatttgagttcgttatgctgcggctggcagcctccagctccatctcgagctccagctagggttgccattgcagtggtggagctctgtttttggttcttgattcttggttcttggttattcgacggtcttgctgtcacggttagtcgtttataataacgcgaactgttcgaggacttttgcggtgtcgagctccaactccatttgttttgttcgtttttacttggcgcacaatttgtctcttactgtcattgattttcatttttcactggcactcgttaagcgcgaccaggcgtcctctttgtaaatatatacccatactggtacatgctgcacagataggacttgcctggtggtctgcccttccgttatgcaagtttttgcattgtgttttcatctgaaacttctgcgagtgcatacgaaagactcagacaacaaacttgagttttcgcctcagttctttctgggcttttgacttagcatagtttatgactcaacgctaagccggtcagccagcttgattatgatatatatgcatgcgacaacgaatgctaaccaccatcagcaccgcaaaccatcacccgaggacaggccacttatgcagaaatgcaaaactgctgtccggtagttcaaactcatttgcggtttttctaagtcgccgcacgttctgcggctccgcaaacaaacaaatgaacagacagttctttggtggagtgggagatcaattttaaagcaggggttgtggaactaggcaaaggagagcccataagtgatgtgcttagaatagacaagctgccattaagcgatgcatgcaaaccggatgtctttgttaggtgggattgtagctcttcttcttcttcttctgggtaatggttgccattgatctagagttgattatgcctggaaatgtgcttcatatgcaatagggaaggagtttcatggtcaatttatttattccgaagccatctgtatattagtaaaaaaattttatctaaaaacatctaatgaaatgccaattaaagatccaaattggcatacttaggccgtgaattttgttttgtacaaaaaatactatttaaagaatacaatttattaatgaatttagtgatttaagtatgcatcacttctgacccaataacacaaagccggcagttttatcgttaatcttattcccagctattagacttttattatatccgtatttatagttttgtcgcgtagtgtactggaagcactgaacgtggccaaccggaagcagagcttcaaaacggtccctgcctaatggccatgcccacgcccctgatccccgctaacctgtcatcgccccctgccccgttatcatcacactgttggccgacttttgtaatgcgcaaaaagtgtcaacaaaaatgaaactggtaatagcaatcgaaggggggagtggggggaagttgaaaggttttacctttttaggggtttgggtaatgtaacggtcatgcttagagtgtgtcatgaatccataacgtattatgcagctgtttgctgtggtccggtttaagtttcgaatcataaacaaatttgaattgattacgcaatccacgatgttgcctgcattcgaattcactcgcttctttttgggtgttaattttgattatattttcgttttaattaagcccatctttttgaggttttcctattgtatttgttttagaaatttgctgatgttaatgaaattgcgtggcctttgttcacaataatgacgttccacaaaagacgagtatggaaatttgtgcaacgaagtgttaactttcagtggcgcgcatgttcaatgaaaaaaaaatatacattgatatagaaaccatttttttttaaagaaaggcctcaaagtgataattttaagaacggcttgcttccgcatctagaagaaacttcgagattcatagaaagagaacaaagtacacagcattatcgtgaactcatctcaattgcagttaacagaacttgctcttaacccaaaccgttcttggcatcttatcggcctttctatctggctaatgatataaaaatgtgctcagaccatagagaaaccccaagaacacaactcaaacgaatggccggtggtcagtaaggtatgtaagagcatctgcgatagggcaaaattccaccattcctccattaaaaaacaacagttcacaacaatatcattaacaagcaaaggggaagacgagtcaaaccgttcggcaataaagcaaaattatttcccaaccagtatttaacctttttcaactcgaaagttcatgtgcatctaacaacaacacaaatgcagtttgacccgctaaaaaggggaagaatgtgggggggcggggtagtgggaggaggaggttcacccgattgaaggcaaaacaagttttaaatactaccaagagcgcatgtcattgtccatttggagttcgggctgaaggagccgggacaaagacctccggcagaaatgagtctaaacaacaatatgactaaacacaacgacacttaactggtgtagttgcagctctagttgtatctgtatccgatctcaatggaatgactccacacacttttagccaagtgagtgcgagttgcttggccggccatgaaatcgaattggaagtggagtttggattggaattgaagccgacagtgtgtgtgactcttgcaccgtcaactagctgacttgtaactagtgccaaagtgcgttccgaattgaaggtcaatcgaatggcacaagcggcgaaaacaagatggcttaggggataaatttacaatgtactgtgaacgtgttcggaatatcgatttagtaaacacgttgaatcaaaacaacactattcactcccttgtatattagccaaaataaaagttatgtaacgcctaggaaataccgtaaacaatattactaattttaatatatcatattatattttgtccgtttttattataccatttctgtatttacttgatctactgttttaatatatacattttatataaacattcgattaacaatatttcaaattgttatgttgaagattatatgtatgtgcttatatggttttataagggtggttgatctgcaaattaacaagaacttcattttccgcttatgggtgtttcgaaaaattgttgaactgccattactccccttagctaatctttcagctcaaaacaacagtaaaattattcagaacctgtaattaaattaatttccattcttttatttgaggctcccgcttaagctctaacttcctgaccacatttgccgctctcagcaccgttcaatgacacagataattgcccagcacacactcaactctagttattcgcaattaaaatgcattaattagccgcatattgcctttctgtgctacatttttctcactgcgcacacaggtgagaaaaagatacgtacatacatgaaaattatctaattgaaaaatgcaagccagccaacgcacgtctagaccagggagggaatggcatgatactactgtaagtggaattgatgccattgcttaatgcatatttcaaacgagttacatttgagctaaatttttgcctttattttgatttgcgcccctgacataaatgcgattgagttcacagccaggccgggccgggttttcacttgcctaacccgtttggttctgctgattgggaggctgtggccggagaaagcccacaaatccgctgtggaaaacccacttaaagttcaaagcccaaaagtgattttttcggcacttgagtacgaaacatccaaagagccatttttacggccaaaatgttaattgtcgctgtctgcactttcacgcgcctccctctcaaactgaagctcagttgagtgtcaatgtacaaaaccataataataactgcggcaaaatgcccaccggctaacggcagacaatgaacaatcgcgcactgttgttgtatttgtcactctacacatacgactcaacgtatttcgtcgaactagccgtttgaaaagctcttttaagctacttttacttatcggttcattatagcagtcccatgaaattcgccagctaatcgagcatgaaccccaaagcgaaaggtacagctaatgtcagttaaagtcagaaatcacgcaccgaattgccacaccctccaaagaaatatgtttctcacactacgctgaaatagttatccttgaaaaatctgagaaaacaaaagactgtttgcctgtctgttctgcagaaattctcagttatgaaacgggtaaacaacagcgtaaaaataaacatgaaagggaaggtgaagaagatgctcaaatgggtgcggcaaacaaaagacttaaggtacgaacttgatattgcacctcggagatgggtgtattccattcggcaaaactttatattttcgcgtaaatgttaacttgtcactaggggcacaccatcttttcagagtgcaagtgatggggattgtttttaataccaaaactcacgatagtcgtgccagaaatatgtaaatttcactatgctatgaattgaaaaaataataataacaaacaatcaacaagtccataaaacagcaggtcactcagcacttttcaattttatttattgttattttttgcccgccgtacattttcccttgaagaaagtgagccgcagacaagttggcctgttgattgaagtcgttattgaattttgtaaatttcgtgatacgtattattttttaagagacctcgtgcaaacctataaatatatttatttatttttggcaagccatttcgagtgcagtccctgacttgcaatgccaacgcattgaaaattgctcaataggattttttttctgcatttttaaatttctgcccgcgctctatcaaggccataatttagcacccaaaacagaccgcaaaactgaaaattaacataaatgatttatgtactcgactttcaagtacaactgcagccagttgtggtatacaattttccaactcattagtattactttgctgattttttcctcagattgaaaacaatttgctgcaaatttgcaaaatgttttatttggattgtggttaatccaaaaacgggtcgataatagcataatatccccaaaaagacatgcattacaaaacacgaaatttgtattaaaaatgaaaatgaatattgtgcacttactttcatgatttcgttaaaatctagtctagctttatttctatatttattgcttcggtaactgtaattataacacgaaaccagtttatcaactgtctaaagtcttgcccaataattgatttgctaatacatatgtgcttgttttaattataaaatccaaatcctcaatccactagctacccactcaacgcctggcaaaataagagtttgcatcacttgaaatacccattttaaaatgtaatcaggtgcggtttcttctccaagtttgtaggtgtttcatttatcacatctgtcaatgactaattgctatttatctctcttagctaatttcctgggcacatacttatataattagcccccgcgaaaagacattccgtgtttctgtacaaagttaacacccaaaatttaacaaagttaactccaagattatggtacggactacgtaggttaagggcatgagtcatgacagttggctgctttgcatttaaattgagtaatttgtgaaggcttaccttaccaccatcccaatgtttgctgttaaatctcattaacttcccgtggcatttagaccggctaaaaaaggccagtcccttttaaacaatgcattcccacttgccatggcaacaacctatgctcaatcgatctagacctgtgtgtggcctgctagacctcgttttatcgagtcatcaatgaatctagatggaatagtatcaaaacaatgaaaaaccaattgaagtttttacgacggagtgcttgcctcgtgaagagtttggtgtgcaactgacattaagcccaaacaaccttctagataattataaatctgttacagccaagaactcggcaatggaattgcccgattaatctattttgcaaaaggtacgtgtgtgaaagttaatcattccatctcaggtgatctggttaaacgaatttctccagttatcctaataacctaaatgtgaatgtgttcattcaacagaattacaaaaaaaaaaaaaaaaatctaatctgatttattattttttattttatattaagtatcaattgtatcgaaatagaagtataattcaatttatcttgagtatcttgggtgtagtacgagtagaatatattaagatttaattaagttcattcacttgttctagcacgaataataatttctcgtataattggtttccgagattgagcttgagggccggaaattttaatattttccctttaatatgccgcgtaattaactaagtaattcaacaggaaaccgcttatgtatatcttcaaatattcttccatccattaatagtcaaacaatttctcttgttcgctccatttaaccgaatcggaaaataattatggagaaatgccgtacaaatcgaaacgaaatgggtaaaaaaaagggcggaccagaagtcacgcaccggcacggcgttaattggtggctcagagaacgagatttgattacggcgcagagagcacagcgcggctaggcgggattaaagtgtctggccggagatcgggatgagatgccccagctatgcgagcgtcgtcgcgtagatgccgtctatctataattttcatggctttcggcttggactcaccagtttcggtcgcattggatttgttggccgcctcagttgttgtcgtcgtggaagtcgttgaaccatccgccgcctcggtggttatgctgctgatgctgctgctttgttctgcggcagttgtggctggagtggtggtggctgcaacggcgtctggggcatctgttgtggtatccaaaggtggcatcgttgtggccgctgcgtcttcgcctgcgggcgcagacgccgcacgctcaatttgaatgccaagcaaaagtaatccgcagagagtggccaggcacattctactccacttgatcgtggattggccgccggaggcttttcttcttctacacgtttgcattttggtttatgtttgtgctccgtctttttggcttttcctctttgatttttctcacacgtttgcacttgttattgttaatttatagtaatctgctataaatatggaattaaataaattacatgcacttttaaacgtttcgaagggtctcgataactcattacctacttttgttcactagttattatttagttttctcttttggggtgcgggattttcttatgcggttattttagttcacacgacatctgtggcagcggtttctgttatttgtcattgactcgctttggtaaccccaaatgctgtcatttccgttgaaagtcggttgaataacgatctctcaagtgtcaactcaagtctatattttgccagccgatttgttgagtgatttgttaggtcgccctacgcggaaattggaaagttgttagcttgaaaataggggtggcttactcttgactcaatcaatcaaaaataatatgtgagttaattaagctacgaaataaaagtattagctaatttttccaaatacgccgcatatctaaagcatttcctatgtcacacatttatgtaatgaccaatttaagtgtgaaagcgtaaacatcttcgatgccactcacgcaagttcgtttcccaagtcttttgttttataaagtttcgcatagttttgaatgtgtccgaatttttgaaaacctatgtagatttacgatacgtaaaccctatttagcatatttcatttagatttacaacttctgtacctaagcctagagcagctcataaatatctttcatttttttaagactacgccgccagcacaatgtttacttctcaccattcaaatcagaaactaggcaaataaaccagcttgccaaaaacaaaggctgccaattgggctctaaaaaaagatatactgtttatatgcaaggcagtcgatgctcatgcaactcgctacaatgcaacgccagcaacaaaaaaccctagacccaaattgcgatagcaaaatatttcaaccggttccaacggcagcagcagaaactgcaactgaaaacggctgcagaccgcagaatttgctgcacgcctttttggccatattggtacgaaggcaattagacagcgtgcggttctatttattccatatctgctggcaattgttaatatttcttttggctaacatctagtgatgtcattgtaaaagttgatagctatttgcactgacatttcgcatttcacatttcactctcactccttttttgtagaaatggcaaatggcagaaagcaaacagcgaacaagcgattcggagctggagggagaaaacgtgttttcggtatttccaatggaatgttttcggtcgtggttctcttttcttctgctgggccgtttatttcactaccagatcttgtgtttgtttaataagaaagcaaagatttgcataaatcacaaccgcacacacacgcaggcacgcttaaaacgaagattagcaccaacccggcgagaaataggtataggtattggtatatatctcctcttatctggccacgtttgtgggcagcgcggtttatatgtatatataaatcgttcgcaaagtaatgcgatcgcactcggccaaccgctccgtctcaagcacgaccaccaactgatctctccggcggcacggatcttggctggtagcgttgccaactcaccacggtctgcatctgcaggctgccaacatgtaactggtttgctgttgctctccggccaactcttagttggctctcatctggctggctccttctcgcgcgtcagctgagcgcaacaggtgagaccgtgcacgtaatacataatacccattaccattaccccgtggttgaatgctcgctctcacccacactcaggtgtgtctaggctgttgctgtctgccagtgtgggtgtagtgagcgaaaggccctctctagaagtcgttggattcgaaacaagacgaccatgatgcatacacaagactcaaagacggagtttttttttttcaatttggcaaggcaactgcaatagtcgattccttgacaagtgaactcagcgcgatctatttggactgtccaattggatggcgaaaaactcaatcccattgaaaaacccaggccaagccgagttggcattcatcgttccgattacgcctaccttcggtttctttcttcctcgacttctttgtctgactttttgaaagagcacaagcgtagattcgtattagcggccctgcatctccatactcgtagatccagagtgttcatgagtcagggatgcttggggtcacagcggcactaagagattaatcccatttacagctttcgtaaatatgattaaataaagaaattctatgctacttcgaaagagtgaaatgataagtgataaggtgataccttatcacccctattgtagggtacattgaacactcgtgagtgataaaaatgattagtataaggatagcattagtactatattatattatattatgtgaaataattactataatccctaaatgtttggtgttctaataatatttaaccaattactttgggataagtaaaactagagataagataagtacgccgacgctattaaaacccaaaaactagtcgaggtcaaatcggtttctatagaggaaagtacgatatatgtatatataactacataaaagttatttttactgcgatacccgaaata

SEQ ID NO: 4223 - DNA, 4867 bp, DROSOPHILA
cagatgcagaccgtggtgagttggcaacgctaccagccaagatccgtgccgccggagagatcagttggtggtcgtgcttgagacggagcggttggccgagtgcgatcgcattactttgcgaacgatttatatatacatataaaccgcgctgcccacaaacgtggccagataagaggagatatataccaatacctatacctatttctcgccggcacaaacataaaccaaaatgcaaacgtgtagaagaagaaaagcctccggcggccaatccacgatcaagtggagtagaatgtgcctggccactctctgcggattacttttgcttggcattcaaattgagcgtgcggcgtctgcgcccgcaggcgaagacgcagcggccacaacgatgccacctttggataccacaacagatgccccagacgccgttgcagccaccaccactccagccacaactgccgcagaacaaagcagcagcatcagcagcataaccaccgaggcggcggatggttcaacgacttccacgacgacaacaactgaggcggccaacaaatccaatgcgaccgaaactgattttacgacaaatgtgccggtggcaagcagcctgccagaggagaccagcgtgcgatcgacgagcattgaacccatcacctccacggagcccacgacaacgccccgccaggaaacggagggacccgatcagcacatggtcttctccaacacggaaccagatcagagccacattcagcacattccgctgcgggatgagcacgccgagagcagtggcgccgacgatgccaccaccgagatgcaacggcagcgtgagcaggatcagcagcagaatgagcttaatcagatctctaatgagcaggacgatgtggtcaaggatctcaacaatttccgacatccggccacgctcataacggccagcaacagcaacagcgaggagaacgtcgagatcgaaagtgacaaacaagttgagacaacgacgacggcggtgccggcagcagcaacctccacatccacagaggcaacaggtacaccgccaacaggtacaccagcaacatccacatccacagtcccgaacgaacgcgaagaagatccctatcatgtgcatatactgtccgagaatcatgatcgcctggccgaacacgaagattatcaaatgctctcgaccagcaccgaggaatcgtcaacaacctctaccacttcgactactaacagcaccacagagtcgggcattgtggctggtattgttgtcagtcaggagaacaaggcaaccgctgagccatcaactgcaaccgagtctacatccatatccacatccacaacaactgcagcaacagccgcaacttcaaccacatcgcgagcacgcgccatgcatatgaatgatccagaagatgaagcggccaccacaataatgccggacagcgagtcggtgccagtgattaacattgttgaaggacaacacatgctgcagcaggaggatcagaaggatgaggaggaggagggggtggtcaaggagtcggagagcagttccaccaccgaggcgtcgaccaccaccaccgagccatcgccatttgtggcctttgctggcgagggacgatcggcgggtggcggcaatgatatcgagctgtttctgcaccacaatggctctacacacgagcagctcatggatcttagtgatgtcagcatggacggagatcagaacgagggcagcagcaaaacagagagcagcactactagcaccaccacgaccactgctcagccggaaacggaaatgccgaaaattgtggagatcactgccagcggggataccatgcagcgggaatgcctggccaacaacaagagctataagcacggcgagttgatggagcgggattgcgacgagcgttgcacctgcaaccgcggcgactggatgtgcgagccaaggtgcaggggactaagttatccgcgcggcagccagcgcagcatggccaatcccaactgtctggagaagatggtggaggaggacgaatgctgtcgggtgatggaatgcagtgagccgcagctggagcccacggtggtagccacagagggtgctgcaccttccaccaatggaacgggagaatcggctgtgaccctgcccacgaccgatgatgaagccacgcccaagccccgaactgattgccactacaacagcggtgtctacaaattccgggagcgtctggagatcgggtgcgagcagatctgtcattgtgccgaaggaggcgtcatggattgcaggccacgctgcccggaacggaatcacacgcgtctggacaagtgtgtgtatgtaaaggacccgaaggacgtgtgctgccaactggagctctgcgatgtcacgctggacgatcacgaacagcagccaacgccgctgcagagcaacaacaacgaagatccagaggagatcgaccccttccgcttccaggagcaggctcgcgacgccggaggcgccaagcccacttgcacattcaagggcgcagaatatgatgtgggtcagcagttccgcgatggctgcgaccagttgtgcatttgcaatgagcagggcattcactgtgccaagctggagtgcccctcgaactttggcctggatgtccaggatccgcactgcatacgctgggaaccggttccggcggacttcaagccctcgccgccgaattgctgtccggagagcatgcgttgcgtcgacaatggcacatgcagttaccaaggcgtccagatcgagaactggtcccctgtcccagccaacctgacaggttgcgatcagcattgttattgcgagaatggacgggtagagtgcagggcagcttgtcctccggttccagctcttcctccggcggacttgccctgccatccagccttggcccgcctgctgcccattcccgatgacgagtgctgcaagcactggatgtgtgccccccaaatcccgaaaatcggaggtgcgggtcaggacgaagagacggaagctacttcaacccattcctcgattccagcaaatggagccaacaacctgcaacctgatatcgaagttcacacactggaggccatcgatcctcgttccattcgcatcgtcttcaccgttccccaggtctatgtgaacctccatggacgcgtggagctgcgctactcgaatggacccagtaacgatacatccacctgggaacaacagatttttgctccgcccgaggacctcattgccacatcccagatggagttcgatctgcccagtctggaaccaaactcactgtacaaggtgaagatcaccttaatccttcgtgatctaaactcgcagcccacgagcagtatctacaccgtgaagacgccacctgaaaggaccatcactccgccacctccgttccccgattacaggccagacttccaggacatctttaagaacgttgaggatccagaactgacggtcagcgaaacgaatgccagctggttgcagttgacatggaagaaacttggagacgaccaaatggaatatgtggacggagttcagctgcgctacaaggaactgacgggcatgatctactcctcaacgcctctgatccatcgcacgttgaccagctacaccatccagaaccttcagccggatacgggctacgagattgggctgtactacatcccattggctggacatggagctgaattgcgtgccggacacatgattaaggtgcgaactgcccagaaggtggacgtgtatggcttcgatgtgaccgttaacgtaaccaaggtgaagacccagagtgtcgagatctcatggaacggagtgccctatccggaggacaagttcgtgcacatttatcgtgccatctaccagagcgacgctggcaaggaggactccagcgtcttcaaggtggccaagcgggacagcaccactggtaccctgatcatggatctcaaaccaggcaccaagtaccgcctctggctggaaatgtacctgaccaacggcaacaccaagaagagcaacgttgtcaacttcatcacgaagccaggtggtccagccactcccggaaagactggaaaactcctaacggcgggaacggaccaacccgtaggcgattactacggcccccttgtggtggtttctgtgatcgccgctctggcgatcatgtctactttggccctgctacttattatcaccaggagacgagttcatcaaacggcatccattacgccaccacgaaaaagcgacgctgcctacgataatccctcatacaaggtggagatccaacaggagactatgaatctgtaaatggcgcacaatgccctaaaaagcaactagagttaaagcagattcttgtaaatattgaaggaaatggatgtggaagaataactcagtgtcagtaaaggaaaatcctgaatcaatcacattaaatcagatggagcaagcaattttctgaaaccggcgcaatatcaaaaaatttgttcaaatcgaaatggccgccatgttgaatgtagtggttaagtaatctaaaagcacataccttttgttaaacaatttgtgacttgtgtaaatagagagagattgagacagaagcagacaccctatagaagaaccaattgacaacagctccacaactcaaattggcctcgctgggcgtatcgattctattggcgatttcaaaatgcatacgagtttagttagtttaacttgtaaattgtagctttacactaatcgtaattaaagggcgcatcagcatcaacagaatccgcagcaccagcaatacgatgcgttcttcaattaacagtccataaatatttaaattagcttttaaaacgtacatagatatgcatatatgtatgtatgtgagtatggataaataaagaaaagataataaaaccc

SEQ ID NO: 4224 - protein, 1348 aa, DROSOPHILA
MQTCRRRKASGGQSTIKWSRMCLATLCGLLLLGIQIERAASAPAGEDAAATTMPPLDTTTDAPDAVAATTTPATTAAEQSSSISSITTEAADGSTTSTTTTTEAANKSNATETDFTTNVPVASSLPEETSVRSTSIEPITSTEPTTTPRQETEGPDQHMVFSNTEPDQSHIQHIPLRDEHAESSGADDATTEMQRQREQDQQQNELNQISNEQDDVVKDLNNFRHPATLITASNSNSEENVEIESDKQVETTTTAVPAAATSTSTEATGTPPTGTPATSTSTVPNEREEDPYHVHILSENHDRLAEHEDYQMLSTSTEESSTTSTTSTTNSTTESGIVAGIVVSQENKATAEPSTATESTSISTSTTTAATAATSTTSRARAMHMNDPEDEAATTIMPDSESVPVINIVEGQHMLQQEDQKDEEEEGVVKESESSSTTEASTTTTEPSPFVAFAGEGRSAGGGNDIELFLHHNGSTHEQLMDLSDVSMDGDQNEGSSKTESSTTSTTTTTAQPETEMPKIVEITASGDTMQRECLANNKSYKHGELMERDCDERCTCNRGDWMCEPRCRGLSYPRGSQRSMANPNCLEKMVEEDECCRVMECSEPQLEPTVVATEGAAPSTNGTGESAVTLPTTDDEATPKPRTDCHYNSGVYKFRERLEIGCEQICHCAEGGVMDCRPRCPERNHTRLDKCVYVKDPKDVCCQLELCDVTLDDHEQQPTPLQSNNNEDPEEIDPFRFQEQARDAGGAKPTCTFKGAEYDVGQQFRDGCDQLCICNEQGIHCAKLECPSNFGLDVQDPHCIRWEPVPADFKPSPPNCCPESMRCVDNGTCSYQGVQIENWSPVPANLTGCDQHCYCENGRVECRAACPPVPALPPADLPCHPALARLLPIPDDECCKHWMCAPQIPKIGGAGQDEETEATSTHSSIPANGANNLQPDIEVHTLEAIDPRSIRIVFTVPQVYVNLHGRVELRYSNGPSNDTSTWEQQIFAPPEDLIATSQMEFDLPSLEPNSLYKVKITLILRDLNSQPTSSIYTVKTPPERTITPPPPFPDYRPDFQDIFKNVEDPELTVSETNASWLQLTWKKLGDDQMEYVDGVQLRYKELTGMIYSSTPLIHRTLTSYTIQNLQPDTGYEIGLYYIPLAGHGAELRAGHMIKVRTAQKVDVYGFDVTVNVTKVKTQSVEISWNGVPYPEDKFVHIYRAIYQSDAGKEDSSVFKVAKRDSTTGTLIMDLKPGTKYRLWLEMYLTNGNTKKSNVVNFITKPGGPATPGKTGKLLTAGTDQPVGDYYGPLVVVSVIAALAIMSTLALLLIITRRRVHQTASITPPRKSDAAYDNPSYKVEIQQETMNL

SEQ ID NO: 4225 - DNA, 2945 bp, DROSOPHILA
acacacgcacacacgtaaagctcgccgctgcactggtgttggtggtggaggcatctgcagaagccttttgcgcactcatcacattttcgtggaaatcggagcgccaaggagctgtggaaaggtgtatactccgcatccgttgcgaatccttggcgaatcgaactgtgccacaatcattcgtccagtttgtaaccagttttcagtgcagtcgcagttgttgttgccaattaccttgtagaagcgatgccattgcggccccttgtccttgtactccgcctcgatttgcagacgggcagcggccgccgacccactcccactcgttttctgctcgctcattgtgcacactttgctgcgatttgttccgatttaataacttttaatttggttatcaggcggctggttaatttcagaggagaactagagctggacaactcacgacagtgtcgatgtatcgaatatttgagcttgcgaaatactatcggtatttgcagtgcgataccgagtgatagttcgattgtacatcactatattgatcgcattacatattatattctcttatggtgattcctatttacaaatgcaagccaaacacaatatattgtatctgcgacattattattctgaaatattagttacgtctatcgatattttcaccatcaaataatgtgaccaggcgctgtagagcaatagaacacatactgaaactaaagtgcttgcgcagaaattagaactttactgaaacataatataacattcgggataagttttctataatttatataaaattaaatacttaactaaagacataacaatataaaaacaattgaaataaaatattttaaataaaaataaaataaaaaaaataaaataaaatattttaaaagtaaaatagaaaaattctgataagaaaattgggttcaaatactttaaaataccgatattacaatcgctcatcgttgaccagtgttatcgagtaataccaaaagtatcgaatcaacaactgttacccaatttattaataacaacagaaagaagccaaagcaaaatgctgacccgcgtgttccgcctagtgcacgacaggcgcctgagtgtgcctgtcctgcgttgcttccaccacgagttctccaagccgccacaacaggcagcgaagggccaggaaatcgaaggcaatcccgaaaagactttggttgccggcgtgcaagacaagtacaaaatattccgcgatgaggaagccacggagatttttgatgtggaagaggcacgccaccaggagcagcaacttccagagccggacctggagctggatcactattacggcctcaatttaaagcgtaggttggcaatcgtccagggagagcagaaatttaagcctttgtttccctttgcaggaggtgttcgcggagtgttcgacgttgaggacttggtggagctgctccgcaaggagaatgtggacgacatattcgtctgctacgtgccggagaacctgaagtacgttgaccacctggtggtttgcagtggtcgcagttaccgacacatgctgtccaccgcggagttcgtgcgccgaatgttcaagatcaagcggggcaagggtgacatattgccgcgcatcgagggcgataagagccgggattggatggccatggacttgggtgggtattgaaataaatgcatattccggtttctccgctctaacacgttccgtttccttttaggcaacattgccctgcacatattttcaccgagtgctcgcgaggaatacgatctggagtcgctgtgggccattggctccgaattcgaccgcgaaagccaaaaacccaccaatccctatggcgatattttcatggctcaaacacccctttctttcgtagacaaatcgaaactaaagacgtaaaataatacatttcactattaataaaaaaaaactctttagagctgcgtacgtgcgagatcacttgcagtgtgatttggaaaaacaataaggtatgaataaatatttcgtgtcagacttgttattctcgtgtcacggccaaaataactatgcgatcgcccatctctagtttcttactgggtgcattcgctcaggcagccatctttaaaataactgtaatttttattaacatcgagctctaatagggcaataatagccataatccgtcagaatatgacagcagtatttccaaacaggagctaaattcttttgtagatggccaagcgacgctagcgccacctatttctgaaaatctgataataacaagtgcgcactaaagtatactgcaaaaaatgaaaataactcttcttttcagagaataaaggcagattcccttatatctatgaaatgtcacaatcaaattgttatatatttgatatgtgatgtattttaatttgtctttatcgaatattgtcggtatatctggttgtagcaacgcgtcggaacattttctccattcaactggaagatgcaacaatagacagttaatcctgtaatttagggttttaataactttaagaagccgtacagtttgatagataacaaattgtaataaaaacgcaaaataatatattatgaaccagaaagcattccaatgattttatacttcacaatcgaatttcccattcattcagagaaagccattaaactcaaatctcaatggctcgaatatatcctgcggcgttttttaacgactgtttgctcaaaatataaatacgcccactcaacgatgttcattgtgtttttatagtcatcgggcgaggtgtgaacaaggctgttttcagcacattgatttgtggatttgcaccggccagcggaatgctgaatgaaattggaaaatcagggaactagggtccaagaaggagatcctcctggcatttggaaatcatttcttcgcaggccatcagcgccagttgcgtcacgaggagaattcgaacttaatatttttaaaatacgt

SEQ ID NO: 4226 - DNA, 825 bp, DROSOPHILA
ctgttacccaatttattaataacaacagaaagaagccaaagcaaaatgctgacccgcgtgttccgcctagtgcacgacaggcgcctgagtgtgcctgtcctgcgttgcttccaccacgagttctccaagccgccacaacaggcagcgaagggccaggaaatcgaaggcaatcccgaaaagactttggttgccggcgtgcaagacaagtacaaaatattccgcgatgaggaagccacggagatttttgatgtggaagaggcacgccaccaggagcagcaacttccagagccggacctggagctggatcactattacggcctcaatttaaagcgaggtgttcgcggagtgttcgacgttgaggacttggtggagctgctccgcaaggagaatgtggacgacatattcgtctgctacgtgccggagaacctgaagtacgttgaccacctggtggtttgcagtggtcgcagttaccgacacatgctgtccaccgcggagttcgtgcgccgaatgttcaagatcaagcggggcaagggtgacatattgccgcgcatcgagggcgataagagccgggattggatggccatggacttgggcaacattgccctgcacatattttcaccgagtgctcgcgaggaatacgatctggagtcgctgtgggccattggctccgaattcgaccgcgaaagccaaaaacccaccaatccctatggcgatattttcatggctcaaacacccctttctttcgtagacaaatcgaaactaaagacgtaaaataatacatttcactattaataaaaaaaaactctttagagctgcgtacgtgcg

SEQ ID NO: 4227 - protein, 241 aa, DROSOPHILA
MLTRVFRLVHDRRLSVPVLRCFHHEFSKPPQQAAKGQEIEGNPEKTLVAGVQDKYKIFRDEEATEIFDVEEARHQEQQLPEPDLELDHYYGLNLKRGVRGVFDVEDLVELLRKENVDDIFVCYVPENLKYVDHLVVCSGRSYRHMLSTAEFVRRMFKIKRGKGDILPRIEGDKSRDWMAMDLGNIALHIFSPSAREEYDLESLWAIGSEFDRESQKPTNPYGDIFMAQTPLSFVDKSKLKT

SEQ ID NO: 4228 - DNA, 6535 bp, DROSOPHILA
gtgtttcttttccctctattgtttcttcccgattttaattaaaaggtatttccctttaaggttgtgattttattttgatctcactcccctcgagtgtagcttaagactgacttattacaaaggagaatcaagtattatgtatggctctgtgttgtcgcgaatctgctgacccagcggatttggggaatgcctccgttttgctgcgctgtttccgcctacactgttgcaacatgaggggacaacgaactagcggctcagcgtggaggtttaggggggtggggaagtagtggcgtggactgctgatgtggtcagatgtgggccaacgaactaatggttctggcgtggaggtttagggggtggggaagtagatgtagatgtggtaactcctcccccccttgaataaagtgacggccataacgaaggaatagacggaacgtagttgactgaggtaacagggttgggcaggtaagtagtgtttctccttactgctaaagcatacagtataaatatgaccaggatgatacttgatgccgtaggttatgaatcgaaggttaatccgtagattccttgacttggaatattttagctttattctcttgaagatgcagtactattttgcttaggcttaaatcctccgatgttgcatttatagatatgttcttcgttacttggtagtgataatttaatcctttcttggtagaacaattcgctgtcatcgtatttggtaccgtctataaatatggaacagtttatgtgattgataatccgtcgttccctcaatagtgaacggttcagcacaacttggttcagcccttagttgattcttgctgataatgacaatccactgttgttccggttctactaccgcctcgtccgtgttgataatctttgcctcgcaaacagggttcattccttgtagcacttgtttcacgcactccctgttggccatgttactttccgcagttccggggtcgcagatgtaagtgccatgtattcttgaacatttttcttgaaaacttaacatataattaaatttatcatcgtacaatatatatttgggtagagtgagaaaattcgtgccattgataggtaatttaattaggtgagaaagtgtgtaagtgtacttatcaaatattggaatctttatatgaaatattatttttgtttttttggattctatctctatgttgagtagtctgtaaatatgctcttctgaattaatagaaaaattttgaagtttaaaaatctgtgcaatatctttcaattcttgtataggtaaaataaaattgggaattattttgaatttagccaatagtatactttcagctatatcatgtatgtggttttggagaatatctatattattatttattatattcaatatttgtaaaattctaattttcttatcttctactattaattccttagaaatgccatttttaaagttattaatgtacctctcaattttctcctgttctttataaaaatgatcagacatattattaaaatttacgattatgtcgttgttataagaaatttgttgcccgaggttcttgttaatgttttcttcattttcaaatacttgcttaaattttgtctcgattttagctgcgtcctctgcgtccatgttcccagttactttctttataacattacctagaccgtctattaagcctctcttttctcttcggtttggggtcaaggaatagatcttttctcttgcttggtctatctttctttgtatgggtgttattgaatcattagagtcttcatcttgtaaattttgtagacttgattctaatttattcaaattattttttaactccgttagttctattacatgggccactgaactatatgttttaatggtccttgcttctcccagtttgatctctgctaggggggtattttccttaacatgttgaacatggagcagttgagctgctgtcatgtataacctgaaatgatattattatatatttatctactattttgtctgattctttttttaatttttgatttatgtattttctgtcttttgttcgttgtaaaggttaccccgttatcatcagctactttgtgttgggtaaatctgggtgttagcttatttctcctattttcctttctaaaaacagtatctccttcctgtaccgctattggtaatactctgtcctcatttagttttagaattttgttgagtttttgactttcaaattcttcctttacttctacatataagttgttcttataactttccagttccctcatgtagtcttgttgactgactgccttataattttgttcgaaaatatgggttcgtcctgtaaaaacttcatatggagtcaattttgtagacgagtgtatggcgttgttgtacgttataaatgtttctgttaggatacaatcatggtctaggttgagttttaatgcctttttcttttcgaaaattatcctataaatttccgtcaacgatgaatgtaatctttcaactggggcattactacttgattgttgaaaagatgttacatgtaaagttatattgtattgattacacaattctttgaaaataattcctgcaaattcggggccttgatcgcaaactattgttttgggaataccatgggtcttgaagaagaacatcatatgtttagtgatgttaatggaatctcgagatggaatagtgtaaccttctgcaaattttgaaaatttgtctattattgttaaaatggttttattgttaattgagtatagatctatgtgtacaatgtctagtggtttattaggtgtttctgttagctgaaatattggtttctgaggttgtctatcatatttgagggtttgacaaatgtcgcatttgtttatcagttgggaaaccctctcttttaaacaggggaaataaatctgtcgtttaatatgactaacggtttcgtcaatgcccctatggttgttcttgatatggtagtcagatatgtattcgacctgttcttctggtgttcggagttcatctaaatatgttgtacaccttataattttatatgatttacttggagcgaaaaatgctgcataaattttttgcactgattcgaaaattgtatcagtggtataaattgcatgcgtcttatttgatcttagtgccgtttttaatacgtctatcattgtctgatcgtcgaacagaggtctggaaataattcgtctgagtttatttttaaaaggtgtttccaataagtcgtttgcacaatctgcaatctttaatatgatctgaattgcaaattcatttattggtctgttagaggttaaaatttctgtatctgaggttattggtctggcttcattagtgttgagttcgacaacaattctgcttaatgcatctgccaccacgttttgagaaccttttttataaatgacttcacagtcatattctaagagttggagtttccatctcactaacatggaattaggctcttttaggttttttaaccaaactaaaggcttgtgatcagtgaccagtagaaatttgtttccaaataagtatggtcgaaaatatttcactgcccacactattgccagtaattctttttttatggtggcataatgcgtttcggactccgatagtgtcctacttgcatatgctataggtctatcatttcctacagttccttgggacaacactgctcctattgctacattactagcatctgttgttaaaataaacgatttagtgaagtcgggatactgtagtatggggtcattacataagagtgttttacaaaattcaaatgttttaatatagttatcgtcgatggtcacgtctgactttcctttaagttgctgagttagaggtttagtgattttggcaaaatctctgataaatcttctatagtaccccagcaaccccaggaatgacttaatttcttttctggttttaggcatagggaaggctttaatagtttcaattttctttggattcggtttaacgcctttttcggtcactatgtggccaagatattctaattccttcttgaggaattccgatttatctggctgaagttttaaatttgccagagtgagttttttgaagatcgagcttaggtggttgatatgttcttgtaaggacgtcgagaatactattatgtcgtcgagataaatcagacaaaatttgccattgaattctgccaagacattatccatcaccctttggaaggttgcgggtgcattagataagccgaatggcattcggatgaattcgaaatgaccacctactgcggaaaaggctgttttcgatctatctttaggctccacttcaatttggtggtaaccacttgctagatctagggccgaaaaatactgagctctccctagtttgtctagaatttcattgatgttgggcattgggtatctatctttgatcgtcttgtcatttaattgtctgaaatctacaaccagtctccatttcttcttatttgaagcgtccaatttctttgggaccagaaaaactggagcactccaaggtgaatggctgtgcctaattatgtcctgctctaggagtttgttaatttggtcggttatttctgttttttctgcaggactgtatctgaaaggtcttttgtgtactggtatttcgtcagtggttttaatgctatgtttgactctattagtgaatgttaatttgtctccttctttgtagaatatattaggaaattgtttgcataattttttgaacgccgttgtttcttctgaatttaaaagttctaatcttagggtactgaacttttctttttccttttcggagtttatcgtaccatagtctttaatatcatttactatatagaattcgtccgtgttaaagtgatttacctctattggtgtttctaggtataatttttcttgcttcttggaatagtttaccacctccatacaactgtaatagttgtgggccgtgtacaggcctccggtaataaacaaatttcctgaaaccttttggtcttcaaataaaaatgtaccctccttaattgtgacgggtagcattaccaatatcttggatgcttcttctatgttaaataattcagctttttgttttacttgctgcagtaattcaaaattgaatttgggtgttgataagattttacttggtatatctattactcctaaaattttattcaacgtgttcatgcctataagaccgtcaaaataattatgaaatttgaagagaagtaacggaaaggtatcgttacagttgtgtttagtaaataattttattttggctatcttgtttactttatgagagcctagtgctgttgtgattaagattggtgtatttagggtttgttggttatgttcctcaataagttctggattaatgaaggaagaagtggcacctgtgtccactagaaattttagtggactggttggaccgaagttaattaaaatgtacaataaggaacctccaactttaaatttttctaagtatcccgtctgtccgacgaggcttttaattgaaaatttttatcatcaatattatgtaactcctgtacacctgctgtctcaatattgttaagggtctgtctttgctgtcccggatttccgtgatttcgtgagtaattattgtctctgtcatagcgttttctgtcctcttcttttggcataatagccctcattttgttaaaatttctgtcgttgtctctgggctttgaataacttcctctttgatccctagatctgatgtttcggtcgaactccgatttcttattatatttctcaacccgatgttcgtcatttctacgataatctctcccattataattgtaattgtttgatctcgaactctgtgtttgtctagaccaattttctctcataaaaatatccctttccttaattgccacatcataggcttcttggagactcctaggtctaaatgctctgacagtagaccccaatgggcctttaatgccgtgtataaacgtatacaagcatgttttttcaaaagattcctttttaagatttagtgctgctgtttctattcccatgttttccatggttctaccgtaagttgcttggatgtctaaaattcgttcgtaaaattcctgcagtggcaatctcttgtgaacaagtccgtgaagttcaaagtttagagtttcttcgcttcttttgtcagcgaatttccctattaatgcttctttgatgtcatcccagtttaagcctatgcctaatgataataataacgcctttgctttaccttctatcttgttttttattgctcttaacaagaactgaccatacggagttttatccgtgcctctaatgagaagaagaatttcctcgatattatttataaattcgtttagggtagttggatctccatcatagggagtaaggtcgcgaatgccatccggaatttttagggataggcaaatgtcctgaggggaaattggagggggtggggaagaaaagttacttgtctctgacgaactagtcattgtgcttggtgcactactcgaagaaggtctaattctgggtggtagggcaacctggtcttccc

SEQ ID NO: 4229 - DNA, 4271 bp, DROSOPHILA
aggtgtacaggagttacataatattgatgataaaaattttcaattaaaagcctcgtcggacagacgggatacttagaaaaatttaaagttggaggttccttattgtacattttaattaacttcggtccaaccagtccactaaaatttctagtggacacaggtgccacttcttccttcattaatccagaacttattgaggaacataaccaacaaaccctaaatacaccaatcttaatcacaacagcactaggctctcataaagtaaacaagatagccaaaataaaattatttactaaacacaactgtaacgatacctttccgttacttctcttcaaatttcataattattttgacggtcttataggcatgaacacgttgaataaaattttaggagtaatagatataccaagtaaaatcttatcaacacccaaattcaattttgaattactgcagcaagtaaaacaaaaagctgaattatttaacatagaagaagcatccaagatattggtaatgctacccgtcacaattaaggagggtacatttttatttgaagaccaaaaggtttcaggaaatttgtttattaccggaggcctgtacacggcccacaactattacagttgtatggaggtggtaaactattccaagaagcaagaaaaattatacctagaaacaccaatagaggtaaatcactttaacacggacgaattctatatagtaaatgatattaaagactatggtacgataaactccgaaaaggaaaaagaaaagttcagtaccctaagattagaacttttaaattcagaagaaacaacggcgttcaaaaaattatgcaaacaatttcctaatatattctacaaagaaggagacaaattaacattcactaatagagtcaaacatagcattaaaaccactgacgaaataccagtacacaaaagacctttcagatacagtcctgcagaaaaaacagaaataaccgaccaaattaacaaactcctagagcaggacataattaggcacagccattcaccttggagtgctccagtttttctggtcccaaagaaattggacgcttcaaataagaagaaatggagactggttgtagatttcagacaattaaatgacaagacgatcaaagatagatacccaatgcccaacatcaatgaaattctagacaaactagggagagctcagtatttttcggccctagatctagcaagtggttaccaccaaattgaagtggagcctaaagatagatcgaaaacagccttttccgcagtaggtggtcatttcgaattcatccgaatgccattcggcttatctaatgcacccgcaaccttccaaagggtgatggataatgtcttggcagaattcaatggcaaattttgtctgatttatctcgacgacataatagtattctcgacgtccttacaagaacatatcaaccacctaagctcgatcttcaaaaaactcactctggcaaatttaaaacttcagccagataaatcggaattcctcaagaaggaattagaatatcttggccacatagtgaccgaaaaaggcgttaaaccgaatccaaagaaaattgaaactattaaagccttccctatgcctaaaaccagaaaagaaattaagtcattcctggggttgctggggtactatagaagatttatcagagattttgccaaaatcactaaacctctaactcagcaacttaaaggaaagtcagacgtgaccatcgacgataactatattaaaacatttgaattttgtaaaacactcttatgtaatgaccccatactacagtatcccgacttcactaaatcgtttattttaacaacagatgctagtaatgtagcaataggagcagtgttgtcccaaggaactgtaggaaatgatagacctatagcatatgcaagtaggacactatcggagtccgaaacgcattatgccaccataaaaaaagaattactggcaatagtgtgggcagtgaaatattttcgaccatacttatttggaaacaaatttctactggtcactgatcacaagcctttagtttggttaaaaaacctaaaagagcctaattccatgttagtgagatggaaactccaactcttagaatatgactgtgaagtcatttataaaaaaggttctcaaaacgtggtggcagatgcattaagcagaattgttgtcgaactcaacactaatgaagccagaccaataacctcagatacagaaattttaacctctaacagaccaataaatgaatttgcaattcagatcatattaaagattgcagattgtgcaaacgacttattggaaacaccttttaaaaataaactcagacgaattatttccagacctctgttcgacgatcagacaatgatagacgtattaaaaacggcactaagatcaaataagacgcatgcaatttataccactgatacaattttcgaatcagtgcaaaaaatttatgcagcatttttcgctccaagtaaatcatataaaattataaggtgtacaacatatttagatgaactccgaacaccagaagaacaggtcgaatacatatctgactaccatatcaagaacaaccataggggcattgacgaaaccgttagtcatattaaacgacagatttatttcccctgtttaaaagagagggtttcccaactgataaacaaatgcgacatttgtcaaaccctcaaatatgatagacaacctcagaaaccaatatttcagctaacagaaacacctaataaaccactagacattgtacacatagatctatactcaattaacaataaaaccattttaacaataatagacaaattttcaaaatttgcagaaggttacactattccatctcgagattccattaacatcactaaacatatgatgttcttcttcaagacccatggtattcccaaaacaatagtttgcgatcaaggccccgaatttgcaggaattattttcaaagaattgtgtaatcaatacaatataactttacatgtaacatcttttcaacaatcaagtagtaatgccccagttgaaagattacattcatcgttgacggaaatttataggataattttcgaaaagaaaaaggcattaaaactcaacctagaccatgattgtatcctaacagaaacatttataacgtacaacaacgccatacactcgtctacaaaattgactccatatgaagtttttacaggacgaacccatattttcgaacaaaattataaggcagtcagtcaacaagactacatgagggaactggaaagttataagaacaacttatatgtagaagtaaaggaagaatttgaaagtcaaaaactcaacaaaattctaaaactaaatgaggacagagtattaccaatagcggtacaggaaggagatactgtttttagaaaggaaaataggagaaataagctaacacccagatttacccaacacaaagtagctgatgataacggggtaacctttacaacgaacaaaagacagaaaatacataaatcaaaaattaaaaaaagaatcagacaaaatagtagataaatatataataatatcatttcaggttatacatgacagcagctcaactgctccatgttcaacatgttgttataaagaaagtaactgggaacatggacgcagaggacgcagctaaaatcgagacaaaatttaagcaagtatttgaaaatgaagaaaacattaacaagaacctcgggcaacaaatttcttataacaacgacataatcgtaaattttaataatatgtctgatcatttttataaagaacaggagaaaattgagaggtacattaataactttaaaaatggcatttctaaggaattaatagtagaagataagaaaattagaattttacaaatattgaatataataaataataatatagatattctccaaaaccacatacatgatatagctgaaagtatactattggctaaattcaaaataattcccaattttattttacctatacaagaattgaaagatattgcacagatttttaaacttcaaaatttttctattaattcagaagagcatatttacagactactcaacatagagatagaatccaaaaaaacaaaaataatatttcatataaagattccaatatttgataagtacacttacacactttctcacctaattaaattacctatcaatggcacgaattttctcactctacccaaatatatattgtacgatgataaatttaattatatgttaagttttcaagaaaaatgt

SEQ ID NO: 4230 - protein, 1062 aa, DROSOPHILA
MNTLNKILGVIDIPSKILSTPKFNFELLQQVKQKAELFNIEEASKILVMLPVTIKEGTFLFEDQKVSGNLFITGGLYTAHNYYSCMEVVNYSKKQEKLYLETPIEVNHFNTDEFYIVNDIKDYGTINSEKEKEKFSTLRLELLNSEETTAFKKLCKQFPNIFYKEGDKLTFTNRVKHSIKTTDEIPVHKRPFRYSPAEKTEITDQINKLLEQDIIRHSHSPWSAPVFLVPKKLDASNKKKWRLVVDFRQLNDKTIKDRYPMPNINEILDKLGRAQYFSALDLASGYHQIEVEPKDRSKTAFSAVGGHFEFIRMPFGLSNAPATFQRVMDNVLAEFNGKFCLIYLDDIIVFSTSLQEHINHLSSIFKKLTLANLKLQPDKSEFLKKELEYLGHIVTEKGVKPNPKKIETIKAFPMPKTRKEIKSFLGLLGYYRRFIRDFAKITKPLTQQLKGKSDVTIDDNYIKTFEFCKTLLCNDPILQYPDFTKSFILTTDASNVAIGAVLSQGTVGNDRPIAYASRTLSESETHYATIKKELLAIVWAVKYFRPYLFGNKFLLVTDHKPLVWLKNLKEPNSMLVRWKLQLLEYDCEVIYKKGSQNVVADALSRIVVELNTNEARPITSDTEILTSNRPINEFAIQIILKIADCANDLLETPFKNKLRRIISRPLFDDQTMIDVLKTALRSNKTHAIYTTDTIFESVQKIYAAFFAPSKSYKIIRCTTYLDELRTPEEQVEYISDYHIKNNHRGIDETVSHIKRQIYFPCLKERVSQLINKCDICQTLKYDRQPQKPIFQLTETPNKPLDIVHIDLYSINNKTILTIIDKFSKFAEGYTIPSRDSINITKHMMFFFKTHGIPKTIVCDQGPEFAGIIFKELCNQYNITLHVTSFQQSSSNAPVERLHSSLTEIYRIIFEKKKALKLNLDHDCILTETFITYNNAIHSSTKLTPYEVFTGRTHIFEQNYKAVSQQDYMRELESYKNNLYVEVKEEFESQKLNKILKLNEDRVLPIAVQEGDTVFRKENRRNKLTPRFTQHKVADDNGVTFTTNKRQKIHKSKIKKRIRQNSR

SEQ ID NO: 4231 - DNA, 3434 bp, DROSOPHILA
tttctattattagaagattgcaatacaattacaattaattagtttagttttagtttctgtcagcttaaattgatcccctgtcttgttaggcattaaatatgattcctagattttcgctcagtggattacccggcgaggggagttatttatagatttatgcaccctcacgcccagcctaaagtcgccattgccgccggtttcggtgtttgggccaaagctctttgggacagaaaatagttggcctgtgtgttcttgcggactgctaggatatcttagacccgtgagtccgcattattgctgcgcgactgagcaaactactaccctatttccttccaagccactggtggagtcatttatatgtcctcgggtgctagccatctccttccgccccagccacacatcctgaagtcgtgtcaggaatctcgtaacgcgtcctggctgggccaataattaacccccttattaatatccaagctatcgaaagtgtatgtgtgtgttacactttccgggctactttttcattctctacagcaaatggtgccagccaaggaaaagctagagaaagggttatagtcttttagttgggcaaacttagggatacagtaaaacaaattaaacttaaattatattgttcataaactattttattgcaaaaactacttggtaaacttttgttacgactttttaaattttgtataaaaatgcatttcttattttagtgtaggatatgttggtagaatagtcccacattgcctccattatcctttatatcccccaagtttccacggtatcgatttcaccgtgtgggacgccccgcaaagttggtcccattgttggcgaggctgccagttgacttctgagggcgcccaagagctttcccgattacccaagacgttgatttttcgaacaaaggaactgagctgggtaaatggttaagtcatgctaaatatagttgctcggcaggtaattaacacgcgagacatttacaaacagcgtaatatcaaagacagggcatctgaggggacccccgcagctccagctccagctcctgctcctgctcccccgaaaggatcctccgctcggtcatcagaggcgccctcctatcccgatcctggaggcgcttcttctggaggtggtagctgcaggagcaggccttgccatgctttttttgaggcttatcttcgtttgggtcttccccagtggtactttcattttcctcgatctcgagcagatctcccccattcttaattcgacacctctgcgtatcactatccctatccttgtttcgatgcctctccttctgcaccaccacgttcctttttccacccctgtccctttccctacccttttgctgcgattgttgctccggcgactctcgcttcaaaacgacccagtcgaagaggaagtcacacaccttgtactggttccggaagagcaccttgaacagctgctgcagatacacgtaatccggcttctcggcgaagtgcagcttgcggcagtacttcagatacatgaagaactcgacaggcaatccggagcagagttgctggagtgggatgttggccttgtactcagctatcttctcgtacttctgggcctgcgactgcgcccggattccctgccagggaagacgaccccgctggaagtagagcagcaggtagcccacggactctaggtcatcccgacgactctgctccgcgtaatgggcccgcacactggcgtaccgggccgtacctaccaggtcccggttctccgtgtagccgatgtgcttctgggtgcgcaggctgtagaactttttggccagtccgaagtcaatcatgtacacctgagtctggtggcggttcaggcccatcaggaagttgtccggcttgatgtcccggtggataaagcatctccggtggagcagctccacgcgggcaaggatctggtcggccagcatcagggtggtcttcatgctaaaggagcgcgagcagaggtttagcagatcctccagcgtgggccccaggaggtccatcaccatgacattgtacgccccctcggtggcatagtgcttcacatgcgggatgcccagtccgccctgcaggatgccatagatcctggcctcgcgtggcagcaatgggtgcttgaccgtggagctctccagctttatggccaccttctcgtggtacttgaggccctcggcctggaatagttcgccgaaggatccgtttccaatacgcttcaataaacggtactttcccgccactataatttccggtagggattgcttctcctctgagaaccgacgatcttgtcgctggtccttctcatgaggatgatttggctgtggcggatggcggcgctcctttcggatctgcggcttggattggtgaacatcggaacggccttgccaacgtctgtcgtccttggcacgccccttttcccgttccgccatgcgattcgggagcttgccagacttctacgcaggcaggaagttgatgtttctggcgatctattgttgccaccttcgataagtatgatgtggagtatgattgaattttctgagttcatcgatcatagttcataaaatagaaagaaaaaaagtagccccatagtagtagtccacttataaaataaagtggaaaacagctccgcacttttatttacccatcatatggaacccatttgacattacgaccaatcttcattgtcatcaattgaaattgttttttcagcaagttttccctctttccagttggcttttatcatttgtttggctgcttaagaaacttttgcacttcattttcaattaaccgtactgagctggcagagttatgtgtccacatgactgtcgaatcgatattcttcacatatgtatatatgtatgtacatcatgttgtgtggatttacccacggaagtggattaatttactcgaacctggctggctctctcaccctcgcattcacctcagatattcgcatcgtatgcgaattcattgtgaggatgtcagtcactcgaatttctagactatctggcttaaacttcgaccggaaatagctgacagctgtgctctgcaaattgcactttcaattaagagaattcgagccgtgtcaaactatcatttatccgatctgcttctttcatggcttttaaacgcacgctattatcttgtatcaaatgccacactttggagttacgaaaatgtttcccacttgattagatttatggacaaacctattataaatattcataattaaattgcctgtgcccagattgcgctggaagcgatccaaaaatgtttagccagcaatatgtgaattgaaaacgacggataatgcagagttgaaatggcaaaattgttttgcgaactaggcacagttgtcatttacataaatgctatgcaaaatcagtttatttgtactgaacgtaatgaagccacattcagctgaaaatt

SEQ ID NO: 4232 - DNA, 1434 bp, DROSOPHILA
atggcggaacgggaaaaggggcgtgccaaggacgacagacgttggcaaggccgttccgatgttcaccaatccaagccgcagatccgaaaggagcgccgccatccgccacagccaaatcatcctcatgagaaggaccagcgacaagatcgtcggttctcagaggagaagcaatccctaccggaaattatagtggcgggaaagtaccgtttattgaagcgtattggaaacggatccttcggcgaactattccaggccgagggcctcaagtaccacgagaaggtggccataaagctggagagctccacggtcaagcacccattgctgccacgcgaggccaggatctatggcatcctgcagggcggactgggcatcccgcatgtgaagcactatgccaccgagggggcgtacaatgtcatggtgatggacctcctggggcccacgctggaggatctgctaaacctctgctcgcgctcctttagcatgaagaccaccctgatgctggccgaccagatccttgcccgcgtggagctgctccaccggagatgctttatccaccgggacatcaagccggacaacttcctgatgggcctgaaccgccaccagactcaggtgtacatgattgacttcggactggccaaaaagttctacagcctgcgcacccagaagcacatcggctacacggagaaccgggacctggtaggtacggcccggtacgccagtgtgcgggcccattacgcggagcagagtcgtcgggatgacctagagtccgtgggctacctgctgctctacttccagcggggtcgtcttccctggcagggaatccgggcgcagtcgcaggcccagaagtacgagaagatagctgagtacaaggccaacatcccactccagcaactctgctccggattgcctgtcgagttcttcatgtatctgaagtactgccgcaagctgcacttcgccgagaagccggattacgtgtatctgcagcagctgttcaaggtgctcttccggaaccagtacaaggtgtgtgacttcctcttcgactgggtcgttttgaagcgagagtcgccggagcaacaatcgcagcaaaagggtagggaaagggacaggggtggaaaaaggaacgtggtggtgcagaaggagaggcatcgaaacaaggatagggatagtgatacgcagaggtgtcgaattaagaatgggggagatctgctcgagatcgaggaaaatgaaagtaccactggggaagacccaaacgaagataagcctcaaaaaaagcatggcaaggcctgctcctgcagctaccacctccagaagaagcgcctccaggatcgggataggagggcgcctctgatgaccgagcggaggatcctttcgggggagcaggagcaggagctggagctggagctgcgggggtcccctcagatgccctgtctttga

SEQ ID NO: 4233 - protein, 477 aa, DROSOPHILA
MAEREKGRAKDDRRWQGRSDVHQSKPQIRKERRHPPQPNHPHEKDQRQDRRFSEEKQSLPEIIVAGKYRLLKRIGNGSFGELFQAEGLKYHEKVAIKLESSTVKHPLLPREARIYGILQGGLGIPHVKHYATEGAYNVMVMDLLGPTLEDLLNLCSRSFSMKTTLMLADQILARVELLHRRCFIHRDIKPDNFLMGLNRHQTQVYMIDFGLAKKFYSLRTQKHIGYTENRDLVGTARYASVRAHYAEQSRRDDLESVGYLLLYFQRGRLPWQGIRAQSQAQKYEKIAEYKANIPLQQLCSGLPVEFFMYLKYCRKLHFAEKPDYVYLQQLFKVLFRNQYKVCDFLFDWVVLKRESPEQQSQQKGRERDRGGKRNVVVQKERHRNKDRDSDTQRCRIKNGGDLLEIEENESTTGEDPNEDKPQKKHGKACSCSYHLQKKRLQDRDRRAPLMTERRILSGEQEQELELELRGSPQMPCL

SEQ ID NO: 4234 - DNA, 3631 bp, DROSOPHILA
gattacctttaaaaatgtttcgcctcggcgagtcacgttgtggaaacgttaacatggatgcgtaacatttaaatggttgtcaattcgcaaattgctaactcttccagcaattttctacaccgagagaacacaacttgagttgtaaaaatgtacgaacttttcagatttcaggccatattggagaaaagaaatcaaaccaaagtctaaagctatatcttagtaagtttctgcttaaattcttttttaaagttctatagtaaagtgaaaactttttcaagtgtcatattcacttttccctttcacactggcactctgtcataattgagacaacgtgcgtaaagtgggcggtgaatgggtgaggaaacaatgacaccggcatcatctgtacgacgatccattggagcgcctggcacgtccgcaaaagtggcgtttccactgtccactattcggcagccactgcgacccactcccaacttgcaactactaccaacgcgccccatcaagcaacccactccactccacatcctcgtcgcggatgcggtacgcatttgaaatgagcccagcactgagttcgttcgccaggatgatgaggagcgggcggtcgagaaacaacgtggggtaagtgaggaaatgaatattcgaaattgcagtgatatatcatcgatggcttcatcgcgctggccggttgactgcctcccccaccaacggtgaatcgagaaacgttacgcaaattttctggcagattgtcatgtttctgatggtttggcaaaatgattgattactttgttcctgttcctctgccgaacaaacaaacgaacgggctgcaaatggcaaaaaggcgaaggggatgatgaaagtgccaaatcggaaatgcaaaagtgggcaggtggatggggaaaaatgttggattgattgaaaagggtttttccatagttgccatagttcgaggccatcaattcccagcgacgttttgatgctgctagcaatttgtattgtattccacaaatacaatattaatctcagcatatgaatgtgataatttaacaagcaatctgaaacattattccttggaatgaaactcaaaatgtgtagacagaaacataagcttaacgattatattagcatccatagaaattgttgaatccaagaaattattgttttggaacccagttttcctagtctcaaagaacacattttgcccaaattacatgttgatattagataaaaggcaatgccgatagacagactccgtccattgccggtggagaagctactgagcttccgaaggaatcccgatctgctgcagcaacatcgacagcagaccgatgaaatggaggccataccgaagtttttgccatcccgactccttccggacgacgaagatgccaaggttggaagtcgcaggatggcggataacgatgaggatacccttcggctgcctcctccacgaagatctccggtctcgatgagaaatctccaacgggagttgtattcgcccattcagtgtatgaatgctctcaaagtcatggccgtcgtgctaaccatttgcttggtgttcaccacgataccactattacgccgtcaaactatgcaggagagtgataatcttcggatgatccttctgtggaatgagccaagcctagtaaatgcaccagcgcacgtggagtgtggctgcctggtcaccaccagccggagtcacaatgacaaagctttcgatgcagtggtcatcagtgccgatcatccctactcctttgagggtcttggtggagtcaagctacatcccgatttctatgcggtttatgccgccaagaagccgctgagttcgacgcagaatccattgactaatttcacgctgccccccttcaatttgacaatgacctatcgcctggactctcagctaatctggacggactactacttctcccatacgaatctggccaggcggctcaagtggttccgggcgcccagcaagagtttcgcagatgacatgccagctacaacggttcttcgtctggagagtgaaatattgaaaaagtcgcgactggctgtgtacttggtctacgaggtgaatgagaagactctgccggagagcctctatatggaggagctgcgcaagtacgccgacctggacgcccatgataactgtctgggcaccgatgagtgagttggccaaactgttaacgcaaactgagattcttatcattcgagccttttagctgcagtcactaccactttatgctgatctttgaaacgtcggcgtgtccggactatgtgccgccgcaaatgtccatggctatggacaaactcctggtgcccgtcctgatcggaggaggaaacctaaccaatctggtgcccagccactcgtacattagcagccaggactttgctacgccgcaggacttgatcattcacctcaaggatctagcaaacaaccagctggagtacaggcgctatttctggtggcactccatctacaggctgcgcaagacctcgcagccctactgcgccctctgctccctcatccaacagtctcctggggggcacgaggtgcgccagagatcctacagcttgggtttcatcaactggtggaccaaataccagtgccccaatcgatccaccaccttcctctgattccttgagccccaatccccaattataattaccaacgatcgcaaattgccctcgttcggtgtggttccgtttagttcgttcttccatcatcttggtgctttttcggcggcttcttgctggtttaattccgcggaatttcggcggcacttcattgacctcgccgacagctcgggaatgaagggagcttaataggttatacactaacagggagttgaggttgcttcaaattgttaattggtatacaacgttttggaaatgttactttttgtttcaaagttcagagcacccagcattcggattcttgcccccaaaatgcgggcataattcccttcaaaatgttttgttattttagcaagtcgctcgaaggatgtcaggatgcctctggatgcctggagtgccaacccgtgccgggcggcctgttgaaatatccatcagctaatgccgccatatgggcgacttggagggtacattggggctgcgatggaggaggcggtgatgggaattgcctggcagctattgccgttcaaaagggagggagccttctgcctgggaaaaagcagagacagccgtcaccggcgatgggcatagataaagcaaatagagcaaacttgtcccacattgtgggccattccagatgagaagctgctgcagatggagtgggaacctgcgacgggcaggttgggatgacgacgaaggcaagcgagtgggcgacgagacaaggcagggcggtccagaagtgtgggataagttgggtggagtggagtgggttgggttgggtccaggtgaggtgccaaccgagcacacaatgcacgaaaaacaaacagaattgtcatgggaaatatttcacagcgctgcgagtgaagtgcccgagatgctccccattcgcccccctccaactgacaactcccctctcccctcaccgctgcactgcactgcactccactccatgccgcaactcagcttggaatgtctttcaaaacggtatcacacacacaaaaca

SEQ ID NO: 4235 - DNA, 1569 bp, DROSOPHILA
cacaaatacaatattaatctcagcatatgaatgtgataatttaacaagcaatctgaaacattattccttggaatgaaactcaaaatgtgtagacagaaacataagcttaacgattatattagcatccatagaaattgttgaatccaagaaattattgttttggaacccagttttcctagtctcaaagaacacattttgcccaaattacatgttgatattagataaaaggcaatgccgatagacagactccgtccattgccggtggagaagctactgagcttccgaaggaatcccgatctgctgcagcaacatcgacagcagaccgatgaaatggaggccataccgaagtttttgccatcccgactccttccggacgacgaagatgccaaggttggaagtcgcaggatggcggataacgatgaggatacccttcggctgcctcctccacgaagatctccggtctcgatgagaaatctccaacgggagttgtattcgcccattcagtgtatgaatgctctcaaagtcatggccgtcgtgctaaccatttgcttggtgttcaccacgataccactattacgccgtcaaactatgcaggagagtgataatcttcggatgatccttctgtggaatgagccaagcctagtaaatgcaccagcgcacgtggagtgtggctgcctggtcaccaccagccggagtcacaatgacaaagctttcgatgcagtggtcatcagtgccgatcatccctactcctttgagggtcttggtggagtcaagctacatcccgatttctatgcggtttatgccgccaagaagccgctgagttcgacgcagaatccattgactaatttcacgctgccccccttcaatttgacaatgacctatcgcctggactctcagctaatctggacggactactacttctcccatacgaatctggccaggcggctcaagtggttccgggcgcccagcaagagtttcgcagatgacatgccagctacaacggttcttcgtctggagagtgaaatattgaaaaagtcgcgactggctgtgtacttggtctacgaggtgaatgagaagactctgccggagagcctctatatggaggagctgcgcaagtacgccgacctggacgcccatgataactgtctgggcaccgatgatcactaccactttatgctgatctttgaaacgtcggcgtgtccggactatgtgccgccgcaaatgtccatggctatggacaaactcctggtgcccgtcctgatcggaggaggaaacctaaccaatctggtgcccagccactcgtacattagcagccaggactttgctacgccgcaggacttgatcattcacctcaaggatctagcaaacaaccagctggagtacaggcgctatttctggtggcactccatctacaggctgcgcaagacctcgcagccctactgcgccctctgctccctcatccaacagtctcctggggggcacgaggtgcgccagagatcctacagcttgggtttcatcaactggtggaccaaataccagtgccccaatcgatccaccaccttcctctga

SEQ ID NO: 4236 - protein, 445 aa, DROSOPHILA
MPIDRLRPLPVEKLLSFRRNPDLLQQHRQQTDEMEAIPKFLPSRLLPDDEDAKVGSRRMADNDEDTLRLPPPRRSPVSMRNLQRELYSPIQCMNALKVMAVVLTICLVFTTIPLLRRQTMQESDNLRMILLWNEPSLVNAPAHVECGCLVTTSRSHNDKAFDAVVISADHPYSFEGLGGVKLHPDFYAVYAAKKPLSSTQNPLTNFTLPPFNLTMTYRLDSQLIWTDYYFSHTNLARRLKWFRAPSKSFADDMPATTVLRLESEILKKSRLAVYLVYEVNEKTLPESLYMEELRKYADLDAHDNCLGTDDHYHFMLIFETSACPDYVPPQMSMAMDKLLVPVLIGGGNLTNLVPSHSYISSQDFATPQDLIIHLKDLANNQLEYRRYFWWHSIYRLRKTSQPYCALCSLIQQSPGGHEVRQRSYSLGFINWWTKYQCPNRSTTFL

SEQ ID NO: 4237 - DNA, 7750 bp, DROSOPHILA
aatgaacccttcagtagcgaggtattcctactttctaaacgcactcgaaattgtgttaattaaagatgtttaggtcaacaaaataaggtttgaatactcctgaaaactcaaatcactttaaaaatatgttatgtttaatccatattgaataaaaaaatttgttagttttagtattaaatattccaacgctctagataattgtagcctaaccctaaattagcacttttaaaattgtgctcttcttgtattatcctgtttcaagtttgtatccccagtagagcctaaaaaggccgtatgccaactactagaatcgacaatttacatcagcaaaagttctggcttgggttttcaagttactgtgccaatttgtattaaggacaagaaagcgagtagaaagttttcaaaggcgcacacacacgcggataaaaccgactgttgccacatagtgtttgtgagcggaatggctgggagtttgtgggtgagtgtgtgctggcgtaattaacataattactattattgtgccgttgttgatttagttttacatatttagttacatgcgtctttttttcatttcgtatgcaaattgttttttagttcgctcttgtgtgctctctgcgcatacaaatgaacttcctcccacacaagagcacaaagccccacacatgcattaaatgctgataaataaaaagtgctcttaggtcgtgtttatttttaagcgtttagagctcatgctttaatggaaagggacactggcatactgataggataagccgccggaatgcgtgcaatgaatacgcaattataaaactgcaagaaactgcaaaagtaggagcgtaaattaaatcacttgaatgtgaattgagcaattataatgtaactaaattgaatccctgccatccatccgcatcgtagtcgtcctttttgcttttgctgacctacggtccctcgtccctggaaatcgccatgcaaattttaagccatcgtcattactcctgattagtcaaggtcctataagcgaagtttgatgaggatgttgagccaaaaggcctttacgccttattgacaccgtggtgctggaagctcgtaaatttaacgaatcattaggcaggtcacaaagccgccaaataccgctggcctgacgaattgaatcaaaggacacaaaacactattcaaatgaagatgccagtgcaaatgaagtagacgcgctcgcatcgccacagaaagcactgtgcgaaaataagtgacgctctttaaattttaaaacaaaatgaactgtcaaaccacaagtgtatcatatgcaaagggcattgttcgtcgtttcaaaagataccaattgggaaagaaagttggttgaagctattttaattttgactaatgactccaccctcatttctttccgtgtagaccattgaaaggcattaccaggcattacggctgtttataatggtccgcatatcgctgatgcggttgttggcgcgcctaaataattcaattggtcgaggactactcaccgacgatggcgcaaacaatcgagcaggacatcgtcgtcctctgcctccacgtgctcgttgagtggacattcgagggcatgggcgatttgcatcgtcaattgcagggactgattgctggcggcccagtcggacatcgcggatccggacatgaggatggccctgtgaaagaggcctgcggtggaggggaggacaatatgttctcatcgaattatgccagtcgtaatccacccgactcacctgaggccaccggcgataccattaggtaattgacacacgccgcccccgtactgtgccccattaaagtgacacgcgaattgtcaccgccgaaggcttcgatgttttccttgatccagtgtagcgccgcaatctggtcgagcagggcgtaattcgctatattatgcgcatcgatgctcggccgtaagaatcctgtaagcgggtagtccctaaatcaatttagtctaaggggaaaactctttaacagactcacccaacactcccagccggtagttgacggtgaccacaatcacctctccatagctggacaagacggagccatcgtagggattgccactgttccactcgaaggactccccgtgcagatagaccagcacagcgtattgcttgggggtgctttgaggctctaaattttagatacaaaattcacttcagcttggatttgtcacatatggcaaggcttttaatataaattaagattattgattatattcgactgtcagatacccgttaatgagcagagattaatacgcacaatgtgtgacagcacattaattgcattttatcggtaacaagctccgactctatcaaattttcagatctctgatatatggggccgacctaccttcatgtggcacatacagattgagatacaaacagtcctcgctctccgtccgcagataagggagcagtcgactcaggtgtttatgacgagcccgggacatattttcactgccgtggggcgaaagatctggcaatttctgcggacacacgggcggaagatgtcgcgctatcttcaagccctgccatggtagtggagcacctagaaccatagacaataataagaaacatattacccagtttttctattactagatcatagactacgttcgaaagttttgcaagactttaagacttatattcttttcttgcaaagaaaatagacaaagatattaattcttttcatatttgattttagagagtattttcattactcagcaacagttttcaggaaatgtaaaagcttttcacgacgtttttacgaacatctctatcgaacgttacacaaatctttaagaattcaatatcccccagcagggaactgacaaagagggcataccgaatgacatcctaacccattgtggccaaacacatttcgctttttctcctctctgtttcgctgtcattcgattgctggcgaagcgctgtggccaaaaagtcaattccgtatttatgtaacacggtcaacaggcacttgaaaacgccataaacaagcaaacacagacactgcctccacaccatagagctcgcccatcctgcacacaagtgccatcggagaccaaaggacactcggtgctccgtatttggtcctgtccggatccgattcgtggccaagttgactgcggttacgctttggtgttgcagttaacgtcaaaccgtgctcgcagatgcggagaatcgtcggtgagtggacaaccacgatttggtcaagttagttcggattctggtctccggtctctgcttccgaatccaaatccaaatttctgcggcttaggggggtgatgctgagggacaaaccggagcagatgagggcaatccatctcggtggagaattggcaaatcgcttacacattttgacaccgcattgttacggcttcagattgttttgcggctatttaggagcgatcgatatgcaaatgacgtggcttacgcaaattaagtggcttcaatcacacgcacagccaggaatgaaaatattattagaagttcgaaccaattcaataatgatattagcatagctgatggttgccacaattgctttaggtcggacataatacacatacgtgtaaaaaaattgtttacaattatcctactaaaagtttttactgccgtaaaactctaagggtacaattcgcaacaaatgatggcaacacactttctttcattaggaaaatgaataataagagttattatcggatatcaaaaaaagaatttcgaaacagcaaattatcccaatcatgataaattaatattacaactttgttatggaagaacgtttcagtttcaggatttatataccccaaagcgggttcaaatcccaatttcgctactagctcgacagcaactaaaaaaaaagaaacatttacactttgacattcgcagcgaacaaatttcattttgtcgagttattgagcccataaaaatgcaaagaaaagagcaaacgccgaacgaggattcaatatgcggatgtgagcaatatttgcattttgttattaataaatttggcaacaggcaaaggaaaaggctccagaaagatgtggccgaaatggaaaacgcagagctgaatcgaaaacgatgtgtatttgtttggttgtcgcgcacaaacaaaatctatcacacaaacgcacaggactctgtttgcatacgggtttgaatgtcctccgctttgacaggatctctacacattacgcatacgcagcgtgagcatatttgcattggcttatatttgcggggcgaatttcaaggcaagttgtatcagcgacagcctgtttgcaatgccacactcacaacaacttcccctggcaaatatctcctcgccccatccgtctccggctcctgttgttgttgctgctgctgctgttgttgttgctgcggtgatgcaatatgttgctgctgagtggcgctgctgtccgctcggattgagtgcgcggcgctgaagtgctcaataaactcagcgcgacaaacggcgaagtgcaaactgaatgctgaaaactgcctctggaaactgcaactagaaactacaacataagcagcacatctgacacgcaaatcgcggccaacacttgcgacagcctctggggcgtgttaatttattgtcttcacgtaatgcaattcggaggaccaaggcgtgttatgccgcctacactgaaaacattttttggacacctcaacttgttttgactaatctaccagttttagagttttagtttcctattcaaataaatgacggtatttcttagtttgggtacactaattagatatgagtagtagcttgtaaaattatatggaaaataaattatattcttggtgcatagccaatgaaaccggatgaccaagtggaagggacctagttgtggtggcaacaattgaagctgcggcttgtttgtgcccagaacagcaggatgcaggcccgaagttggctgaagtgttggcagcttggcggcttcaaatctcacagacaaattggcacgggcaacgtagctcatattttgataaacaaactttaaatagatataataccagcaattttcactcttaattaaacaagcaaaatattcatgtacaaagtccgaaacataatcgcacagcagatggcaaaataaaagggcgaaggggcggggacgcctgggatttacattgcaatccttgtaaaaacaagctgcaataataatagccattcgagacaggaagcacacacacacacacagggacgtgctttcggaaccaacatcctgccagatcgctgttagagagggcacatgtcaagtcctgaaagcctaatgccgggccagcttcaacgataattgcttaaattgctggctaaattctaagtgccccagcagcgtccccaggaccaacaggatgttctggcatggtcggcaggggaagtgcggcggcacatgtcggttgttcgaggagtggtcggtccttccgaagacacccctgctcctgctcctatttgagttctggggtttttggggtttcgaggttttcgggtttgcctgttggtgctgcaaagtggcaatttgccatcatatttgcggtcacaaatagtgctgcctgcctacggcgggtcgggcaaggggaaataaataggtggtactccctgccagcaggttggttcaaacagaggatatcgttatttatattatagaatattgcccgttcaacttaacaaacttttattgaattattttagcccttccgaagacttgatgtatgcaaataaatcgatttactttaacacagtatattttaaaataagcattttgcaatcaatgtcaaaaacggactcaggggataatatttattggttttggtcgcccttgtcaatgatattgtgatgatacttggcttacttggctttgccattagcattttctttaatcttaattaattaagggaaaatatttataatgctattgctcgcttatgtaagaaaagtatactttcaaattgaaagttccatctgccaaacggtagacccaagccgatcggcatcatgaggtgtctttgagaacagctgaaattgttttagcttaaaagctatctatctatgtatatatcttgtatcaaaataaagttaaagactcttagaggacagttttgtacactcacccggtggcatgaagcgtcgatttccggtgggcgcctccgcgtatggaagccccaggaactggtccacctggcgcagcccgctggtcacctggaagcgacgtgtgatgcccatgagccggccctgcttcacctggatctcctgggtgtactgcagcttatcggggaccacgtgtcgccgttccgggtgatgagtggttgacggctcgtgttcgctggaaccttcgtcggtggccaaaactgcggccgtggtgttgtcagtggcattggtgtggcccacgtgggtggtttcatcgccggcgaaaagcttgttcagattctgcctgaaatgcagctccaagctgggcggcggggccttggcacgtcgcaacgcctgatggccaattgatcggcccggatccgagtccggctgaattgtcgtcgtgatgtccccgataacccgggattgctttggggcttcacgcaatttcattgcgttttccagctcatttcctttgtgcaacggctgcttttcggctgccacgcccattggggaaacgtggcttaatagcttgtgattgccgccgactgtcagcagaaatagccaaaatgctgccaaacgaaacttcatggctttgtcttccgcctccgggacctggacccggtctttcctgccggcttctgggatatttcgatattaatttcggtcttacacttcccgctctgtccaaacttttcacattccgctcgtgtttgctttccagtttggttaattgttctttttccccaactgttcgctgtttcccttctttgttgcgtcaaaccgaatggctcacattttctggacgctgtatttacatggattttctttgagcgccttaaatagtttcgacagtttgtttactcgctgtatttagcctgctcctttgtgcagcttctttctgtatttaatttcatttgcaacaaaatttttgtcctattttgtatgcgaaaagaaaaacacgaggaaaatgttggtgagaaacactaagtaaattgaatcggctcgacaatgccatcattatttaattttagtttcttaaacttaggtattacaattgtggctcagaaattgcaacgtatcataaagttaaagtacttgtaaaattatattatatccgcattttagcgaatatctaaacctaaatacatatttaagtaacaaaaagggaaatgagtgagtttctttaagaaaactcttatccaaaattaatgaccccttctgattgagtcatagctcagttctcagtggcactgcattttccaattgacatgccccctcttgtgtgtcagaaaatcgatgtgctgttcattttcaagatttcaaatattattttaggactcatccatggaatggttgagttcatttatttatagtggcccactagttatgaaggcccttagactttggactttgtcaaatcgattcaatcggagtgaatggaaatgaaataaaagcgacgcttttcgttctgagtatgataattcgaaatttatatacaaatactgggcgtcgaacaaacgtccgtctttcaagagtcctgacatgtggaaaacgagctcggaaggcttttcagaatttagtgccgtgt

SEQ ID NO: 4238 - DNA, 1664 bp, DROSOPHILA
atgaagtttcgtttggcagcattttggctatttctgctgacagtcggcggcaatcacaagctattaagccacgtttccccaatgggcgtggcagccgaaaagcagccgttgcacaaaggaaatgagctggaaaacgcaatgaaattgcgtgaagccccaaagcaatcccgggttatcggggacatcacgacgacaattcagccggactcggatccgggccgatcaattggccatcaggcgttgcgacgtgccaaggccccgccgcccagcttggagctgcatttcaggcagaatctgaacaagcttttcgccggcgatgaaaccacccacgtgggccacaccaatgccactgacaacaccacggccgcagttttggccaccgacgaaggttccagcgaacacgagccgtcaaccactcatcacccggaacggcgacacgtggtccccgataagctgcagtacacccaggagatccaggtgaagcagggccggctcatgggcatcacacgtcgcttccaggtgaccagcgggctgcgccaggtggaccagttcctggggcttccatacgcggaggcgcccaccggaaatcgacgcttcatgccaccggtcaacttggccacgaatcggatccggacaggaccaaatacggagcaccgagtgtcctttggtctccgatggcacttgtgtgcaggatgggcgagctctatggtgtggaggcagtgtctgtgtttgcttgtttatggcgttttcaagtgcctgttgaccgtgttacataaatacggaattgactttttggccacagcgcttcgccagcaatcgaatgacagcgaaacagagaggagaaaaagcgaaatgtgtttggccacaatgggtgctccactaccatggcagggcttgaagatagcgcgacatcttccgcccgtgtgtccgcagaaattgccagatctttcgccccacggcagtgaaaatatgtcccgggctcgtcataaacacctgagtcgactgctcccttatctgcggacggagagcgaggactgtttgtatctcaatctgtatgtgccacatgaaggtagcacccccaagcaatacgctgtgctggtctatctgcacggggagtccttcgagtggaacagtggcaatccctacgatggctccgtcttgtccagctatggagaggtgattgtggtcaccgtcaactaccggctgggagtgttgggattcttacggccgagcatcgatgcgcataatatagcgaattacgccctgctcgaccagattgcggcgctacactggatcaaggaaaacatcgaagccttcggcggtgacaattcgcgtgtcactttaatggggcacagtacgggggcggcaacatattgtcctcccctccaccgcaggcctctttcacagggccatcctcatgtccggatccgcgatgtccgactgggccgccagcaatcagtccctgcaattgacgatgcaaatcgcccatgccctcgaattgttttgtgtcctttgattcaattcgtcaggccagcggtatttggcggctttgtgacctgcctaatgattcgttaaatttacgagcttccagcaccacggtgtcaataaggcgtaaaggccttttggctcaacatcctcatcaaacttcgcttataggaccttga

SEQ ID NO: 4239 - protein, 524 aa, DROSOPHILA
MKFRLAAFWLFLLTVGGNHKLLSHVSPMGVAAEKQPLHKGNELENAMKLREAPKQSRVIGDITTTIQPDSDPGRSIGHQALRRAKAPPPSLELHFRQNLNKLFAGDETTHVGHTNATDNTTAAVLATDEGSSEHEPSTTHHPERRHVVPDKLQYTQEIQVKQGRLMGITRRFQVTSGLRQVDQFLGLPYAEAPTGNRRFMPPVNLATNRIRTGPNTEHRVSFGLRWHLCAGWASSMVWRQCLCLLVYGVFKCLLTVLHKYGIDFLATALRQQSNDSETERRKSEMCLATMGAPLPWQGLKIARHLPPVCPQKLPDLSPHGSENMSRARHKHLSRLLPYLRTESEDCLYLNLYVPHEGSTPKQYAVLVYLHGESFEWNSGNPYDGSVLSSYGEVIVVTVNYRLGVLGFLRPSIDAHNIANYALLDQIAALHWIKENIEAFGGDNSRVTLMGHSTGAATYCPPLHRRPLSQGHPHVRIRDVRLGRQQSVPAIDDANRPCPRIVLCPLIQFVRPAVFGGFVTCLMIR

SEQ ID NO: 4240 - DNA, 2815 bp, DROSOPHILA
aacacggagccagcacttccactccattccatttctttcgacggaggagtgagcttgagtgagctcgtgttgggatcaccattacatcgcacctcggatttgctcaggttcggtaaagtgccaagtaagggcttttcgtggaagccccaatcccaaactccaaactcttattcgacgtgagtacgagcaaaaagtctgttttgaagcggccaaaacagtaggaaaggcaaaaacgaaacaaaacgaaacgcttttgggcagctctttcagcagattttttcttttttttttgcaattggcagtaaatcgcgttcaagatcggcctcagctgttgacgctttttatggctcgcagtgagctaagaaaacagcgggccccagtgattgtttaatacttaatggttatccgagaccgagacccaggcacttggcatgcgtcacaatggcggcgtgatctcctcgagatctcctcgtgcccagaagactcgtccctaaaagcgggtgactcagcaaccgagcgtccagattctcttatatacatatgtatttgcaaccggctcgataagtttgcccagtttgaatttgaatttccagtctttgcgggtgcgagaaatgacgatgatgacgatcgtttgaacgaattcgatcatctttactctcggtcagcggcctcaactgggttctttataatctaacgatccattcagttggatgatctggcaaagctattatcagggtttaagtaatcgtcaatctcgagtggattaatagaaacaccttctgcctttctcctttctgcaattctgtttctactattatgggctttcagttggacgatttctttaaacatttatccagtcagaatcgattagatattgaatagggctataaactagaacgcatgcgatgataagtaagaactacaatgcatcacgcggttactcggaatatacatggtacacaatttattaagttttaatcaatgattggattagagtacttcaagccctggccatttggagtaggtgataaagtggcacaacgttagcgttgttcctgccgtcgaggaagttctggtgggacagcacggccctgccctggaaaacgccaggaatggcggcggaagtgagtccatcggcaccgggaagttggttatcgacctcgccagccgtcgaggagcgatagaagggatagtagggatagccagaatagccgccaaagccgggatatccaaagcccccatatccatagccgccatatccgccgtagtagttgtagccattgtagtagggattgtagtagggtcccggcggaggaggaggtcctggcggcggtggtccgggcggagggggtggcccccaaggacgctgcggtggcggcggataagcgggcggtcctggcgaccactgcggtggatagccatactgccgtgggtgctgctgatcctctggtggataatagtaatggtgttgtactgacggtttcggggtggtcgacggggctcccgaggccatcaccagcttgatgccgcccttaccaatggtcttcagcaggtgctcgtcaatcccgcgtccacttcccagcggatcgtccagcacctgttgctgcttttcggtcctggcctgtccgctgaccaggctcgtctgcagtggcgccttctcctggaaacagaggccgctgaccagcagctgcaggataactgaaaaggatgtgtcactctttctaggcagccgatcgtccgtactcacccaaaccaatcgcagtcactctccgatccatgatctctctcggaataacctgaccactccagttgcattgcccttttatacgcggtgcatctgtgatgagatgtgtgggatctcgttcccggtttcctcattagaataacccatgcagtggcccaaatttgggatgcctttctttcttctgtgtccatctccatctccatccccagctccagctccagctcgaactcgatctcgatctcggatcgatcaagcaccgttctaataactgcgctcattaatttgcatatgatataaatgcttgtaggggctttgtgggatctttccacttctcattccacttccatgatcgttctgccagccctgcatttttccaaatgaattcgaagagttcaatatcccgcgatattgctgcttgatatatgacgacatttgaatgcagatgaaggttggtcatgccactgaacaaaaaaatattcagcaaagctcttgagttggcaacaaattttttggaaatatgtgcccttgaacttattgtattatcgttgagtttccgtctttagaacttatctttactttttacgaatgtatttctccatctcgctacaaagcaaatcagcctctgcctcttggtttcctattcttaatgctcgactatttctttcggtgtgcgattaatgggttaggaactttttcgtttgggtgggactcatggtttttgggttccgttataggtcgtgtgtcgtagacatgtttacgagtcgtctgatacaacaaaatgtggagttctctgttacatcacccgttggagtatttctggatcgggaaaccagttccccactctattagaccgctgaatggggattaaagaaagagtggatcaagccgacaaaagcaacgcccccagggaacagaaagtcaatgacttcatagtagggagaaaccgtgttattgcagggatattgagcaaagtataattataatgactacacactcattaatatttacagtttaattcattttatatcccccagctagtttatctaatcatgaaagtatctgtagaggctt

SEQ ID NO: 4241 - DNA, 747 bp, DROSOPHILA
atgcaactggagtggtcaggttattccgagagagatcatggatcggagattatcctgcagctgctggtcagcggcctctgtttccaggagaaggcgccactgcagacgagcctggtcagcggacaggccaggaccgaaaagcagcaacaggtgctggacgatccgctgggaagtggacgcgggattgacgagcacctgctgaagaccattggtaagggcggcatcaagctggtgatggcctcgggagccccgtcgaccaccccgaaaccgtcagtacaacaccattactattatccaccagaggatcagcagcacccacggcagtatggctatccaccgcagtggtcgccaggaccgcccgcttatccgccgccaccgcagcgtccttgggggccaccccctccgcccggaccaccgccgccaggacctcctcctccgccgggaccctactacaatccctactacaatggctacaactactacggcggatatggcggctatggatatgggggctttggatatcccggctttggcggctattctggctatccctactatcccttctatcgctcctcgacggctggcgaggtcgataaccaacttcccggtgccgatggactcacttccgccgccattcctggcgttttccagggcagggccgtgctgtcccaccagaacttcctcgacggcaggaacaacgctaacgttgtgccactttatcacctactccaaatggccagggcttga

SEQ ID NO: 4242 - protein, 248 aa, DROSOPHILA
MQLEWSGYSERDHGSEIILQLLVSGLCFQEKAPLQTSLVSGQARTEKQQQVLDDPLGSGRGIDEHLLKTIGKGGIKLVMASGAPSTTPKPSVQHHYYYPPEDQQHPRQYGYPPQWSPGPPAYPPPPQRPWGPPPPPGPPPPGPPPPPGPYYNPYYNGYNYYGGYGGYGYGGFGYPGFGGYSGYPYYPFYRSSTAGEVDNQLPGADGLTSAAIPGVFQGRAVLSHQNFLDGRNNANVVPLYHLLQMARA

SEQ ID NO: 4243 - DNA, 6164 bp, DROSOPHILA
gagggcgggacgtgggagcacaagttgcgaacagccgaaatggaggccacatccctatgggcaaacgccctgaccaagcaaagcgaaggcaagcatcacatcggcgactttctgccccccgaggagctcaagaagttcatggagcagtacgaggcgaagaagaacaacaggcagccggatctaagcgactacaaggagtacaaactaaaggaggacaacattggcttccaaatgctgcaaaaactcggctggaaagaggggcagggcttaggacaggacggagctggaattgtggaccccgttaacaagtaggttacctatcctatgtttgaaagtatctcactgtataatatggcaacagggcaccgcaacgcgatggaaaccaaggacttggtgtcagcagcgctgcccagccagaggactgcgacaatgaatatgacgcctacaggaagcgaatgatgttggcctatcgttttcgtccaaatcctttggtaagtaatccctggaaactggcaagggaagagaacataactaatatgatagctataaatgcttaatatatatgacttcttatttgtttgcagaacaatccacgtcgcgcctactactagcactacctaaaatgacccctacccacataactaccaatatcctaggtccacttattcaactgcaactttgctgaataaaatgtcctcgtttaaattaaacagcggacacgtcagtttattttagggggtcgtttattcagtaagtagttcgtaattaacttaaatctattgcaagcgtttaggagttcgatcgtacaaaggagtacgtaagtaagaagtgtggaggtctcttagaacgagagtctgggctctggaattccattttgattcggcggcacattgcacaactcccaatcaagggactgattcgattctaccgggaactgggaactggaccacctaaacgctaataatactaagttgtactcgaactggaagcgagggctagtctaggagtagagcgtcagcacgggcgtctggttgccgcgcgccaatgccaccggacacttcatgtccgacgtgagcatctccagccatgacatgtacagcggtgccgagatggcctcctggaaatacaaaaatacgcatgtgttagtggtcaatcacgatgttagtgctcatttccgaatgtctcaccttgcgcggcatgggcagggacatgaccaccagggaagcgtttgatgagtgcttgaccaccagctcatggatgcgcagctggcgattcgtcttctccgacatgctctgcagctcatcgtccgtgatgccgaactcgttgcgggctccgcggcggaagggctcgatcagccgcttgtgcttcagcaccgtgtccgcccgcggctgctcggagacgcccttcagcataatgagctcagagtacttgatgcggaacttggtcaacaagctagccatgctgtagggtagaatttaccatttgtactatcatatttgtgacaatattttcaaaataatagtatagtatagtgagagtaataatcatcttttgatttccgtcctggcttcttcttcggtctcacggaactatatgggatggtggaaggcatatcctctcctttttattgatcggaactcttttcgctcaaatggaacccaaaccctttgaccttcgacctttgtatactttggattcggaaacgcattcttgtgcctgttacgtgttgttctaaagacttacctcttctcttcctgctcctcgtcttttccgtggcacattgcgaacacccttagcttggagttctgccagtgggagcgcatggagattatgtagggcaggagaattgtgagacctacatgtattcccaatgacttgtggattagttgcaaagtggctgattacgaccaagtacccacctccgtcgtcgtacagccagaagacatcgattgtgcccttgggctgtttgcgcgtgaatatggtcatggcgtccagcaagttttggggtatgtccgatccgcccttggtgtggtaggtgacggcgggctcatccgagctggtcaccttgtagctgcgggagttgcgctgcatgttgggcatcggtgctggctggggcattgtgaaagaggagttggggctgtccatgctggctaggttcaggttggagtcaatgtgcagcagctccgaggctgcattggccgccggcatcagttcgttggtgaatccatgcgcattggcggtatgcatgtgacccattccgttggccggcagagtgacctcggaactcagctcagagaaatccaatccgttgggcagtcggagcagggccacgcccatacgctgagaaaaagcattgctatggaagaggtggacttggtaaggcatccaataacatagtttggggaaataacttactacaaaatggaaaagtaactctccacctcctccttgcgacagcgattccagtccggcttgtagcccaccagcacaatgttcggagacattttgccgaagcccgttgactttgtcaacgcatttattccgtcctccaggctgaacccatcaatcacattgtagaaggccttgatcttgcgggcatccaggtacttttgtccatccttcaccaggtgctgccggttcttgtagcccacccgcacctgaaaggatataacaagtattttagtaagaatcaccattccgcttttcttgatgtccaacaaaatgggtgagttttcccttatcaagaaatccattcacgtaccggtattatatttgccacgaacatgagggagttgttcttggtcagcaggtagccaaagtccacgagtggcggtctggtcttgggatcgccggagagcaccagcacctggggatggtagttcttgacgtgatccgagacgttctgcagtcggtggacggccattagagcagccttgtactgctgagcctgcgtggtggatccccagttggcctccggcttgcggtacatgaccaccagatagagggcgaagatgatgccaaaggtgatgatggcggccacgtagttgatcaggaacatgatggccacgcacatggcgaacccgaagaggctgagccaggcgttgtagtacttaaaggtgggtcgccatcccaatggcttcacgaaggccgcgtggaatgtgcaaaagttgatgagggcgtaggaggccaggtagaaggtggagatcagaggagcgatcaggttaagctctccgatcagcaggaagccggtggtgatgaagaaggtgagcacgtagccgcgatacggttcgccgtgcttgccgtacggcttcgagaagaagattagacccgggtagatctggtcaatgcccagggcctgcaccagcctgggaacggaaagcaagttggtcagggccgtgcttaacgtggctgcaaagcagccggcgtagatgagtggtccccacagcgacatctcctgcatcatttcgtacgagttgaagagaccccaggtgcagttgcccgtggccatgcacggcagctccgaggaaacaatggtgccattgacgaggtcagctggtataccggaggcatctcttacagcagcgccaccggcgaagaggacaaagagagcgtatgaggacatcgagatgagcagggaccagaaggtgcccttcggtatagcagctccggcatccttgaggtctccgcagatatttgctcctgcctggatgcccgtcacgctgggaaagaagatagcgaacacgctgaaaaagtcgtggtttacgccctccgcatagcgatagtccgatccgaagttctccttcaaagtagcccctaatttaggtaaccagttatgaggttattactttcttaagttctcttatgaactcacatgaaaagccgacgaaacccctagagatttgctcctcattaccctggggtccaatggcagctccgatcaggaaattgaagatggccaggacaatcgtgacgatcaggaagttctgcgccttcgtctcccactccatacccacgcagcagattaggatgagcaccagcacggttatcgatcccacgatccggatgtcattgatcccgttgtcgacaatcttcaggtcgttgttctctggaaatgagattaatgattactccggaactaagttaaggatatcctcaaacttaattaaaccagactggatccatgaaatatagtgaaagtcgtttctatttcaacctttattttttatcctatttatttaggacatttaaagctgccccatttgtggccaccctattcaagttaatcgaatggcctctgtgtgcacaagtcaattgatactcactgagtaaaacatttagcgattcgcagaagccgatggtgttcatcgaggctgagacggcgttggcgaaggcgaagaccacgcccaccgacgccccaaactcggggcccagcgaacgggatatgatgaagtagacgccgccgcccttgacctcgccgttggtgctaatggccgacagcgagagcgtcgtgatgacgcagaccaccgcggagatcgtaattataatcagggactgcaggatgcccgactcggccaccacccagctgaggcgcaggaagagcattacgccccagatgttgagaaggcaaggtatcagcacgcccacgatccatcctagcttgatgtgtccgccagttgcctccggttcgggttcgggaatagtgatgctctgcaatggagaaacgatcttatggataataaaaatatatatgtatgtagtatgtaggtcgtccttataagtaatacctttcttaagtaagacacattagtattaacttttcacataggttatgttcaatctagccggctaatgatttgggcaaacgggaaaaggccgtcatcggattgttatttgcctgataatgggatcttgacataagtggcattcaatcgaatgtgtgctaactgtgtgagattgaattgagttcggcttttttttttaactgtatacgactcgaacagctgcttgggtgagtttttatccggaattactcatacgacatgtgtgcaatttagtactcggattcaattaacgacccgttaacgacccccaaaatacgaaagcagcagcaagcgaaggcacagccacaaccagattatgagcagcagctcacattgctttccattctaattaaagttcacttttattagccgcacttaaactggaaacattatgaaaatgttcacataaaagctgaaacccacccaatgagatgccaccaagtcaactatttaacgtatgccccaaagtatttcctttgttcggttcggatatagttcgtccaatagggcggcaagtgcaaaaacaaagacgaaatccactttaactgcggcgaggaagtgacagctatgtgtcaattaaaccctacaatagctttttagcttggctttttgctatctcatgggaatttagcctgaaaaagtgccattctaagtacttgccattttatgagaggaagtaattgtacctgcaattcatttcaaagtctctaaaagtccaaatttatttagtttctgtctcttaaatgttctatatggaatgagcttgcaaggataatggcgtaagtgcaagttgaagtcctttaagaaacaaaagcttctacaataccaagcccattgcagcagttcaatcaaattcaaaatattctttctattcagcgaaactgaatcgaattcaattcaatttcctaatgaacagcaaagaatgtttccgctcttcaagccaaaacaagtcagcaaatatatctttttatcacatgtatacaatacttggggtccaaaaacttccactggcactgatcagcacaacttcttgtgattgtgataatttaatagatttaccaagacattgctcccgtgcccttgtcgggttattgttttgccatttgtcgcagcgatggaatggggcttgtttactttattgtttgcccacataattgagtgttttttaaagcgcctccattcggactcgcctcccgtggcatgtggtggtggcggtggatgaggaggagcaggagcaggaggcagggttgggcaggacgacatcgattcgggagagcacacaacccccagacagctcaggtcgcacacgctgcgtatacgcaatgctggttagttaggctgccg

SEQ ID NO: 4244 - DNA, 2865 bp, DROSOPHILA
atggaaagcaatagcatcactattcccgaacccgaaccggaggcaactggcggacacatcaagctaggatggatcgtgggcgtgctgataccttgccttctcaacatctggggcgtaatgctcttcctgcgcctcagctgggtggtggccgagtcgggcatcctgcagtccctgattataattacgatctccgcggtggtctgcgtcatcacgacgctctcgctgtcggccattagcaccaacggcgaggtcaagggcggcggcgtctacttcatcatatcccgttcgctgggccccgagtttggggcgtcggtgggcgtggtcttcgccttcgccaacgccgtctcagcctcgatgaacaccatcggcttctgcgaatcgctaaatgttttactcaagaacaacgacctgaagattgtcgacaacgggatcaatgacatccggatcgtgggatcgataaccgtgctggtgctcatcctaatctgctgcgtgggtatggagtgggagacgaaggcgcagaacttcctgatcgtcacgattgtcctggccatcttcaatttcctgatcggagctgccattggaccccagggtaatgaggagcaaatctctaggggtttcgtcggcttttcatgggctactttgaaggagaacttcggatcggactatcgctatgcggagggcgtaaaccacgactttttcagcgtgttcgctatcttctttcccagcgtgacgggcatccaggcaggagcaaatatctgcggagacctcaaggatgccggagctgctataccgaagggcaccttctggtccctgctcatctcgatgtcctcatacgctctctttgtcctcttcgccggtggcgctgctgtaagagatgcctccggtataccagctgacctcgtcaatggcaccattgtttcctcggagctgccgtgcatggccacgggcaactgcacctggggtctcttcaactcgtacgaaatgatgcaggagatgtcgctgtggggaccactcatctacgccggctgctttgcagccacgttaagcacggccctgaccaacttgctttccgttcccaggctggtgcaggccctgggcattgaccagatctacccgggtctaatcttcttctcgaagccgtacggcaagcacggcgaaccgtatcgcggctacgtgctcaccttcttcatcaccaccggcttcctgctgatcggagagcttaacctgatcgctcctctgatctccaccttctacctggcctcctacgccctcatcaacttttgcacattccacgcggccttcgtgaagccattgggatggcgacccacctttaagtactacaacgcctggctcagcctcttcgggttcgccatgtgcgtggccatcatgttcctgatcaactacgtggccgccatcatcacctttggcatcatcttcgccctctatctggtggtcatgtaccgcaagccggaggccaactggggatccaccacgcaggctcagcagtacaaggctgctctaatggccgtccaccgactgcagaacgtctcggatcacgtcaagaactaccatccccaggtgctggtgctctccggcgatcccaagaccagaccgccactcgtggactttggctacctgctgaccaagaacaactccctcatgttcgtggcaaatataataccggtgcgggtgggctacaagaaccggcagcacctggtgaaggatggacaaaagtacctggatgcccgcaagatcaaggccttctacaatgtgattgatgggttcagcctggaggacggaataaatgcgttgacaaagtcaacgggcttcggcaaaatgtctccgaacattgtgctggtgggctacaagccggactggaatcgctgtcgcaaggaggaggtggagagttacttttccattttgtacaatgctttttctcagcgtatgggcgtggccctgctccgactgcccaacggattggatttctctgagctgagttccgaggtcactctgccggccaacggaatgggtcacatgcataccgccaatgcgcatggattcaccaacgaactgatgccggcggccaatgcagcctcggagctgctgcacattgactccaacctgaacctagccagcatggacagccccaactcctctttcacaatgccccagccagcaccgatgcccaacatgcagcgcaactcccgcagctacaaggtgaccagctcggatgagcccgccgtcacctaccacaccaagggcggatcggacataccccaaaacttgctggacgccatgaccatattcacgcgcaaacagcccaagggcacaatcgatgtcttctggctgtacgacgacggaggtctcacaattctcctgccctacataatctccatgcgctcccactggcagaactccaagctaagggtgttcgcaatgtgccacggaaaagacgaggagcaggaagagaagagcatggctagcttgttgaccaagttccgcatcaagtactctgagctcattatgctgaagggcgtctccgagcagccgcgggcggacacggtgctgaagcacaagcggctgatcgagcccttccgccgcggagcccgcaacgagttcggcatcacggacgatgagctgcagagcatgtcggagaagacgaatcgccagctgcgcatccatgagctggtggtcaagcactcatcaaacgcttccctggtggtcatgtccctgcccatgccgcgcaaggaggccatctcggcaccgctgtacatgtcatggctggagatgctcacgtcggacatgaagtgtccggtggcattggcgcgcggcaaccagacgcccgtgctgacgctctactcctag

SEQ ID NO: 4245 - protein, 954 aa, DROSOPHILA
MESNSITIPEPEPEATGGHIKLGWIVGVLIPCLLNIWGVMLFLRLSWVVAESGILQSLIIITISAVVCVITTLSLSAISTNGEVKGGGVYFIISRSLGPEFGASVGVVFAFANAVSASMNTIGFCESLNVLLKNNDLKIVDNGINDIRIVGSITVLVLILICCVGMEWETKAQNFLIVTIVLAIFNFLIGAAIGPQGNEEQISRGFVGFSWATLKENFGSDYRYAEGVNHDFFSVFAIFFPSVTGIQAGANICGDLKDAGAAIPKGTFWSLLISMSSYALFVLFAGGAAVRDASGIPADLVNGTIVSSELPCMATGNCTWGLFNSYEMMQEMSLWGPLIYAGCFAATLSTALTNLLSVPRLVQALGIDQIYPGLIFFSKPYGKHGEPYRGYVLTFFITTGFLLIGELNLIAPLISTFYLASYALINFCTFHAAFVKPLGWRPTFKYYNAWLSLFGFAMCVAIMFLINYVAAIITFGIIFALYLVVMYRKPEANWGSTTQAQQYKAALMAVHRLQNVSDHVKNYHPQVLVLSGDPKTRPPLVDFGYLLTKNNSLMFVANIIPVRVGYKNRQHLVKDGQKYLDARKIKAFYNVIDGFSLEDGINALTKSTGFGKMSPNIVLVGYKPDWNRCRKEEVESYFSILYNAFSQRMGVALLRLPNGLDFSELSSEVTLPANGMGHMHTANAHGFTNELMPAANAASELLHIDSNLNLASMDSPNSSFTMPQPAPMPNMQRNSRSYKVTSSDEPAVTYHTKGGSDIPQNLLDAMTIFTRKQPKGTIDVFWLYDDGGLTILLPYIISMRSHWQNSKLRVFAMCHGKDEEQEEKSMASLLTKFRIKYSELIMLKGVSEQPRADTVLKHKRLIEPFRRGARNEFGITDDELQSMSEKTNRQLRIHELVVKHSSNASLVVMSLPMPRKEAISAPLYMSWLEMLTSDMKCPVALARGNQTPVLTLYS

SEQ ID NO: 4246 - DNA, 5116 bp, DROSOPHILA
cccgtggcttcgacttcctgccgcgaggtaatgtcttcgccaggttcacccacctgcagcatctgcccttcacctataccatcagtttgaacaacgatagtggtgcccagcgtttcggctacgtgcgcatcttcatggcgccgaagaacgacgagcgtggccagcccatgctgatgcgagatcagcgctccatgatgatcgagctggacaagttcgtgacttcgctgaacccgggacccaacaccatccgccgccgctccacggagtcgagcgtgaccattccgttcgagcgcaccttccgcaacctggatgccaatcgtccggcggccggcactccggaggagctggagttcaacttctgcggctgcggctggcccaaccacatgctggtgccaaagggtctgcccgagggactgcagtgcgtgctgttcatcatggtgtcgaactatgagaacgacagggtatgttagctggctagtaaatcaaggatatttttgacaattatctccacctccagattgaccagcaattggtgggtcggtgcagcgatgccgcttcctactgtggcgtccgtgaccgtctttacccggatcgccagtccatgggattccccttcgacaggttgccccgcagcggagtcgaccgcctggttaacttcctcacgcccaacatgagcatcgtggacgtgaacatccgccacgagaaccgcaccgtgcagcgcccaaactagacgatccgcacctgattcgctttcccgattcgccctgacccgattccatgacctcgcccacttctagatatacaactcttagcaatctattgcatctttattgagccgcttaataaacaagacatcatggcattccacaatcccacttttgttctcaattattgtggctcggcctccgggcgagaatctctcgctgattaggcttatcagccgcccgggagaagctttaaatgccagctccacggccggagcacctcagttcgagcagatccggtgttgagtgcgaaagtgaaaccgattcccgaggagatgggcctgctgctgcttctggtgctgatagcgggcattggcgtaagcactgtaccgattaaataatctatgggtccacaaagatcccacaaaaagatgtggtctttagataactttaaatcataattttgcgtgtttgaaatatgtttcatttagatgcgtgtcagtttctatatagtttgaggatacttagaagacctagactaaactaagcctgtaatagcaataatattgtaagtgaatttgctgcttttaattgattgtcatttattttagtgcgcaactgcagcagccaacattgacctggaggccaagacgtttgtgaatcaatcgagcgatcgctactacaggttctataatgagattgccgccgaaacgtattcggccaacaacgaagaggacttcgatgcccttttctccaaactaaacaatgtgaagcggattgccgaggagctggtgagcatctcccggcaggctgcgacctacgatctggacaggattcgcagcccgcagacgaagatggccctccaggagctgcgcactgcgggtgacttgttcgtcctgggcgacgactatttctcctccgtacagatgaacttggctgcgctgcaaacactttccacggacaaggacatcgagccgtatcttggtggggccaatatgcccaacgaggacgacagtccgctggcctatttcccagacatccagaagatcgtgcagagcagcaaggatgccgacgagctgaagtactattgggaggcctggcgggataagaaccagctgtgggcctccctcaacttctacaccatagtgcagtcttaccagagggccgccaagatcctggaggtgccggtgcacaaactgtggtaccgatacgacagccaagagatgctgcagcagatggagcaggcgatgacggagctgcgccccgcataccagcagctccacgcctttgtccgccaggagctgcataagaagtacggctccgatgtggtcaatctcaatggaccgataccggatcacctgttccagcaggttctcgaacaggcctgggccagtggcagcatcctggaggattactacccgcgtgcccagttgccggagttcgatgagtacgttagtcacttgaccgccaagaccatggtgaacgagtccgaaaacttctacacttcgctgggcttcgagcctctgtccgccgagttccacaagaatcagctgaaggaacccaaccaggacagccccaacgacgactgtcgcccctccatctttgacctcacgccacacgtgtaccttatgtactgcgagaaggtcagcttccggaagctgatgcagtaccacagccacatggccagggtttactacgcccagcagaagagtcacctgccctcctactactttaaggcctacaacctggagttcgccgtcggcgaggcggtggtcctatccgcatcgtcaccggctcatctgacaggtcgccgactggccaaggaagtgcttagtgaaacggccctcatgagccgcctattccgtatggtgagtacgttactagttggccaactagggattcgcaaaacttcttttttcatttcgattccaggccatccacacgattcttagtattccgctgtactatgtgcacaccaaggtgatgcacgatcttctcaacgatactgtggacatggacaccgtgaacaagcactattggaggctcatggagcaacatgcgggcatcgaggcgccctcggatcgctctgaaggtgccattgatttcccctacaagttctacgtgaacatcgaccagagtttccagactcagtgagtaaaatccacccattcttcaaattaaaatactacaaatattttatttaggaaattcatatcggaagttctgggatatcagttctatcgcgagttctgcaagaagagttacaacagggggccgctccacaactgcgacttctatggaagcttggccgttggcaatgatttaaagtgagacattagataagctggtgtgtgataaagctatactccaatcgtatttctctagagcaatgatgtcattgggttctacgaaaccatggaaacaggtggttggcaaaatactgcccaataacacgggactgagtagcttggctctgctggagtactatcaacctgtgttggactggctcaataaatacaataaggatgccaactcgaaaattggatggactgcctccaaaaaaagtaaggtttactccataaatgatttgatacattatattaattttcatatttttacagaaatcgtttgaggacttccaatgaagagatttataagatttaaatacaaataaaatacataccaccaccttaataaatgaaattgccttctttaattggattttgaactttaaccgccttcgaaaaaagcctttttcaacactgccgcgaatcggtttaaacgggttaattagactagtcatctccctcgcacttgtgtactgggaattggcttaaggagcgcatgtgttggagggagatgacagtagctgttgcctaggcgctaaaaaatattagttcaaatttcagataaggggcagtgcaatgaatcaactaaatattaaaaaactttaggtcaagcaagttttttttcccctaatctttattctcagtaaatgtagaattaagcaactatttaccagtcagccggaaaatgcgttccggaattgggcaacctccaagagtccaagagccctcgaatgtttctttggctgcgttaaagtgtcgcaatagaagccgagagcctgtcctccggtttgaagcccatccaagcgcaccggagctcgttgtgcgttcttcgcttgattgcttccactggccagtggccactggccacatccacatccgaccgagctgctcttgcagtggttgtcaccggacaagatgaccgtctgtattttgcccacgtcacagatactctttccctcaactcagtgatgttggtcattagaaatgtgtacgattcagaattcattaatatcaagtacctacaacaacaaacctgcaaccaaatacttaaaatactgctataaagttattggagtttttggcatattgcaaatcttatataatttgggtccactttatttggctactttaataatgagtgaacaacacattcggcgtggagctcgctggtcggacttggcgacttgcaactggcacgcttcacttgctcggcgactggcgaaaggtcagcggttctgcctgcgtccgcgcggtggtcattagccacgccaaagtccaagcccagcggattgtggagcaattgcgggcggcaaggtcgttggatcgtccacccccctgtcatacactcaaccaatcaagcacccacctctttgggcatcccgccggcgggcgttacccatttagctggacgagtgcttttccccgactggatttccttttcgctttcgagtgggggcgtctgcggcaaatgggcgaatgcattgcgtgccgcctgcttttttttgtcagctggcaaggcagccgatctgcaagtctgcctgctgctaattgcgccaaattgcggtggcgactccgcgcactcggcgcggaatgaatggccgtgaaattgaatcatttccagctgcagcagaagcacacagctccgcgcactcgactcgaatccaactttgacatggcacgccgcccagccgtcgcggaaccgagtgagtgaaaggcacccacatccaggtatttcgctggtcttttggggcaaccaggaccgaactcaaaaaagaacgagaggcataaactctacatgctctatacaaataattccaattacaaatgtcttcattcaatatcaattatgttcttcagcgatgttgatctattttatattttcttggcatgcatttcatacaaagttcaaagtataattaatttattgagaaagccgatttttacgaaatttcgctggctaaatttaataccatcgctgactataaatgtaagctcatttggcaacagcttctttccattttgcgttgcaaatctcgtgccaaattggcacagcccctttgggag

SEQ ID NO: 4247 - DNA, 2025 bp, DROSOPHILA
ccggtgttgagtgcgaaagtgaaaccgattcccgaggagatgggcctgctgctgcttctggtgctgatagcgggcattggctgcgcaactgcagcagccaacattgacctggaggccaagacgtttgtgaatcaatcgagcgatcgctactacaggttctataatgagattgccgccgaaacgtattcggccaacaacgaagaggacttcgatgcccttttctccaaactaaacaatgtgaagcggattgccgaggagctggtgagcatctcccggcaggctgcgacctacgatctggacaggattcgcagcccgcagacgaagatggccctccaggagctgcgcactgcgggtgacttgttcgtcctgggcgacgactatttctcctccgtacagatgaacttggctgcgctgcaaacactttccacggacaaggacatcgagccgtatcttggtggggccaatatgcccaacgaggacgacagtccgctggcctatttcccagacatccagaagatcgtgcagagcagcaaggatgccgacgagctgaagtactattgggaggcctggcgggataagaaccagctgtgggcctccctcaacttctacaccatagtgcagtcttaccagagggccgccaagatcctggaggtgccggtgcacaaactgtggtaccgatacgacagccaagagatgctgcagcagatggagcaggcgatgacggagctgcgccccgcataccagcagctccacgcctttgtccgccaggagctgcataagaagtacggctccgatgtggtcaatctcaatggaccgataccggatcacctgttccagcaggttctcgaacaggcctgggccagtggcagcatcctggaggattactacccgcgtgcccagttgccggagttcgatgagtacgttagtcacttgaccgccaagaccatggtgaacgagtccgaaaacttctacacttcgctgggcttcgagcctctgtccgccgagttccacaagaatcagctgaaggaacccaaccaggacagccccaacgacgactgtcgcccctccatctttgacctcacgccacacgtgtaccttatgtactgcgagaaggtcagcttccggaagctgatgcagtaccacagccacatggccagggtttactacgcccagcagaagagtcacctgccctcctactactttaaggcctacaacctggagttcgccgtcggcgaggcggtggtcctatccgcatcgtcaccggctcatctgacaggtcgccgactggccaaggaagtgcttagtgaaacggccctcatgagccgcctattccgtatggccatccacacgattcttagtattccgctgtactatgtgcacaccaaggtgatgcacgatcttctcaacgatactgtggacatggacaccgtgaacaagcactattggaggctcatggagcaacatgcgggcatcgaggcgccctcggatcgctctgaaggtgccattgatttcccctacaagttctacgtgaacatcgaccagagtttccagactcagaaattcatatcggaagttctgggatatcagttctatcgcgagttctgcaagaagagttacaacagggggccgctccacaactgcgacttctatggaagcttggccgttggcaatgatttaaaagcaatgatgtcattgggttctacgaaaccatggaaacaggtggttggcaaaatactgcccaataacacgggactgagtagcttggctctgctggagtactatcaacctgtgttggactggctcaataaatacaataaggatgccaactcgaaaattggatggactgcctccaaaaaaatggttgtcaccggacaagatgaccgtctgtattttgcccacgtcacagatactctttccctcaactcagtgatgttggtcattagaaatgtgtacgattcagaattcattaatatcaagtacctacaacaacaaacctgcaaccaaatacttaaaatactgctataa

SEQ ID NO: 4248 - protein, 661 aa, DROSOPHILA
MGLLLLLVLIAGIGCATAAANIDLEAKTFVNQSSDRYYRFYNEIAAETYSANNEEDFDALFSKLNNVKRIAEELVSISRQAATYDLDRIRSPQTKMALQELRTAGDLFVLGDDYFSSVQMNLAALQTLSTDKDIEPYLGGANMPNEDDSPLAYFPDIQKIVQSSKDADELKYYWEAWRDKNQLWASLNFYTIVQSYQRAAKILEVPVHKLWYRYDSQEMLQQMEQAMTELRPAYQQLHAFVRQELHKKYGSDVVNLNGPIPDHLFQQVLEQAWASGSILEDYYPRAQLPEFDEYVSHLTAKTMVNESENFYTSLGFEPLSAEFHKNQLKEPNQDSPNDDCRPSIFDLTPHVYLMYCEKVSFRKLMQYHSHMARVYYAQQKSHLPSYYFKAYNLEFAVGEAVVLSASSPAHLTGRRLAKEVLSETALMSRLFRMAIHTILSIPLYYVHTKVMHDLLNDTVDMDTVNKHYWRLMEQHAGIEAPSDRSEGAIDFPYKFYVNIDQSFQTQKFISEVLGYQFYREFCKKSYNRGPLHNCDFYGSLAVGNDLKAMMSLGSTKPWKQVVGKILPNNTGLSSLALLEYYQPVLDWLNKYNKDANSKIGWTASKKMVVTGQDDRLYFAHVTDTLSLNSVMLVIRNVYDSEFINIKYLQQQTCNQILKILL

SEQ ID NO: 4249 - DNA, 3865 bp, DROSOPHILA
agccatacagagctaccgaaaggcagtggaggtcaacaagcgggactatcgcgcctggtatggactgggccaggcctacgagatcattaaaatgcactactacagcctgtactactttaaaatcgcccaccaactgcgtccctacgactctcgaatgctggttgccttgggcgagacctatgagaagctggacaagtgcgaaaatgctgtgaagtgctactggaaggccatcgatgtgggtgacatagagggcatagcgatgtacaaactggccaatctgcacgagaagctcggcgaccacgagacggcggtccattgctacatcatgtactgcgaggatgagcgggcggccaccgataagcagagcctctaccaagggttcatcacgctggccaattattacgagaagaagggcgagtacgaacgagccgcctattacgcttacaaatgcctagactcagaggatgtgggtgcattgttttaggaaatttgtaatgaatttaacgaaaacactcaatctttttagcgcaaaatggaggcaaaggcgctgctgaagacgattgactggaagcgcaatgctgagggacagaagaaggtaaaaacttcgacggccgtggcgaatgcagataccagttccgaggacgagatggagtgggagctccaggatgtgcgagttcgagttcccatcacatccatagccaccacgactacctccacgaccaccgtagctgcggagagcgcctcgagtagctccctgatcagcttgcgtccggaccgaaacctgattcagggcatgcgtcgatcccagtcgagcaggactagcttaaccgcgcctgccagcggcaccaccaccacgccatcggcaactgctgtcacaatgtccaccgaggaaacgcctggcacatccggtggcccttcgaatccgcccgagcaggcgccctcggatgataacagctccatggaaatatccagcgtatccatcgattagtcaaatgcgttccaattgtataaatttctatttgtttttatgaattatattggcaatccaagtaaataatgaactagtcctattcaccattgccaggtccaaaacgtcatccttctccatcatagttaatgaaaatatagtatttcacaaaactactaaatactccatattaatcgaatgtgcaaacaggatcttcaattcaaaaaactttagtatggcttataatttttgtgatcttaaactgagtgtttcataatttgttccttggtttaagaataccaaatatttgattaatctggccttgctcggctgttatataatatgaatccccatagtggagcgattcagtatgggtaaaagtaatctcgcttcagaaatcttggatccatcgtgctatgatggctgcttccttatcgcgggcatcgcgcacagaaggtggatcggccggatcgctgtggcgcaagtccaagtgatgggctccctcgggcaggatgatgacgaagaccttgtcgttgggagcctgaagcacaccgccaccgctccagggatccagaagaccgttgctgaagatgatgttggtcgcagcctccaggtttctgccgccatagcgcagaatgatgtcgtatggcttgggggtgagacggtagttcttgtagcacttttccgcgtaatccttgaagttccagctggacgtgcggaacatggtttcggagccattggagcagatgggcatcaccatctggttgcagctctggatattccaaccggagtcatcggcgttggagttgacggatatatcgaggcacttggcggactgtgtgtagttggtgtagacagccaaagcgctggacatggcgtgcagcaaatcggcgtcggtggaatgcagctccttcaggtagtagcacacctgcctcacgggataggcaggtaatggggccaggaaactgctgttgtacgggtaattgaccatggcgagattgctgtacacctcctccacgtagtccaggaacttcttcagatcgtcgtcgttcttcagggcattgcataggtggaatgcatccgatatctgcttcttgccggcctcgctggcgcccagagtctcgaagagtttccacgacttggcaatattcaaggtgcagttttcgttgtaggcattctggaacaccgatgtcacaatcctgtagaagatgtcgcaatcggttatcccggggaactgcagaacgggcgccgaggctgccagggctccgttgaccaaatgcggatacttcatccggaaccaggcggccagcattccgccataggagcccccgaaggccaccacgggcatctggcgatcgttccgcaggaacgtgatcagcatggcgtagtcctcgagcgtctgctccactgtgaagtaagccaagtgctccggcaggctggtgttgaacgtggagctaccgaagggcaatgactttccatagtaacgatgctccgcaaagatcaccagagcccgctgtcgttccgcctgctcccacaggaatccggtattctgggcgaagagttcgatgtccccctcgttgcccgtgtagaagaaaatcggggtgcgggcattgctcttgtccacgaacgagtcgttgtacaagtaccggatgttgaaggtggcgttgatcaggaagctgaaatggtccagcggcacctggaactccttgatctcgtacttgaaccgctggctgcaatcacagcccgcgatcagcaggattcccaaaaccgctaacagtgcagctctcactgtggcttctcccatatcgcgaagaatcatatgacctctgtggtttgcacaattttcagttcgttatctgcaagccgggctttatattacactttgtgcagtgttaccagatcgcgagacgtgatttttggagcggttctaaagcactcaaaaaaaaaaaagataacttgcatttcaaaatcggatacatattgttaataaaactacgcattttacatttaccactcatttggtaaagggtaatgaagaattaagtggagattcatttgaactcatcatatcttgttagaaaacaaacattgttttgatcttagtgtgccgaatcatcttaacaacgtcttatatttaaaaccttctttttaatcgccaaaagtttaaaaaacacaaaccgatgcccattaagcttcttcaaataagtacttaccaacactgcactcaactctcgataattttcagcaaagcacctgtcatttccccctattttgatttgatttgagttcgatttcgccatgcatttaaaaatgagtagtgagtaagtcggaaaattattaaaaataatatttatagtgataaaataaaatatttcatgaggcctcgtaatccgtaaaaatcataatatgaaataaacatatatgtttagtattttatttaaattttcattatgtctgttggatttgaaagttggataatttaaaacgttcattgaagaacatgtccttctgccaagctatcgggtcgttctaaagtaatatgaacataatgcatttgaatatcttcggtgcctagatgaaaatcttgcttccaaaagtgctctaatgatttcttcgaggacactttccttctcaaaagtaaacacttcgatgagtggccaatattttgcaatcattgaacagtgtaactataaagtaactttatctgttgctaaatattttaccacaacgactttggtatttagcggacactcttttaatcggatctttgtatttatttctatctggaatagaatagcccaaaggatagaatagccataacagtttttcaattcgccttgctattccgaccctgaaagctgtaccctatatatataaatatattaaaaaattgtttta

SEQ ID NO: 4250 - DNA, 1865 bp, DROSOPHILA
tggtaacactgcacaaagtgtaatataaagcccggcttgcagataacgaactgaaaattgtgcaaaccacagaggtcatatgattcttcgcgatatgggagaagccacagtgagagctgcactgttagcggttttgggaatcctgctgatcgcgggctgtgattgcagccagcggttcaagtacgagatcaaggagttccaggtgccgctggaccatttcagcttcctgatcaacgccaccttcaacatccggtacttgtacaacgactcgttcgtggacaagagcaatgcccgcaccccgattttcttctacacgggcaacgagggggacatcgaactcttcgcccagaataccggattcctgtgggagcaggcggaacgacagcgggctctggtgatctttgcggagcatcgttactatggaaagtcattgcccttcggtagctccacgttcaacaccagcctgccggagcacttggcttacttcacagtggagcagacgctcgaggactacgccatgctgatcacgttcctgcggaacgatcgccagatgcccgtggtggccttcgggggctcctatggcggaatgctggccgcctggttccggatgaagtatccgcatttggtcaacggagccctggcagcctcggcgcccgttctgcagttccccgggataaccgattgcgacatcttctacaggattgtgacatcggtgttccagaatgcctacaacgaaaactgcaccttgaatattgccaagtcgtggaaactcttcgagactctgggcgccagcgaggccggcaagaagcagatatcggatgcattccacctatgcaatgccctgaagaacgacgacgatctgaagaagttcctggactacgtggaggaggtgtacagcaatctcgccatggtcaattacccgtacaacagcagtttcctggccccattacctgcctatcccgtgaggcaggtgtgctactacctgaaggagctgcattccaccgacgccgatttgctgcacgccatgtccagcgctttggctgtctacaccaactacacacagtccgccaagtgcctcgatatatccgtcaactccaacgccgatgactccggttggaatatccagagctgcaaccagatggtgatgcccatctgctccaatggctccgaaaccatgttccgcacgtccagctggaacttcaaggattacgcggaaaagtgctacaagaactaccgtctcacccccaagccatacgacatcattctgcgctatggcggcagaaacctggaggctgcgaccaacatcatcttcagcaacggtcttctggatccctggagcggtggcggtgtgcttcaggctcccaacgacaaggtcttcgtcatcatcctgcccgagggagcccatcacttggacttgcgccacagcgatccggccgatccaccttctgtgcgcgatgcccgcgataaggaagcagccatcatagcacgatggatccaagatttctgaagcgagattacttttacccatactgaatcgctccactatggggattcatattatataacagccgagcaaggccagattaatcaaatatttggtattcttaaaccaaggaacaaattatgaaacactcagtttaagatcacaaaaattataagccatactaaagttttttgaattgaagatcctgtttgcacattcgattaatatggagtatttagtagttttgtgaaatactatattttcattaactatgatggagaaggatgacgttttggacctggcaatggtgaataggactagttcattatttacttggattgccaatataattcataaaaacaaatagaaatttatacaattg

SEQ ID NO: 4251 - protein, 475 aa, DROSOPHILA
MILRDMGEATVRAALLAVLGILLIAGCDCSQRFKYEIKEFQVPLDHFSFLINATFNIRYLYNDSFVDKSNARTPIFFYTGNEGDIELFAQNTGFLWEQAERQRALVIFAEHRYYGKSLPFGSSTFNTSLPEHLAYFTVEQTLEDYAMLITFLRNDRQMPVVAFGGSYGGMLAAWFRMKYPHLVNGALAASAPVLQFPGITDCDIFYRIVTSVFQNAYNENCTLNIAKSWKLFETLGASEAGKKQISDAFHLCNALKNDDDLKKFLDYVEEVYSNLAMVNYPYNSSFLAPLPAYPVRQVCYYLKELHSTDADLLHAMSSALAVYTNYTQSAKCLDISVNSNADDSGWNIQSCNQMVMPICSNGSETMFRTSSWNFKDYAEKCYKNYRLTPKPYDIILRYGGRNLEAATNIIFSNGLLDPWSGGGVLQAPNDKVFVIILPEGAHHLDLRHSDPADPPSVRDARDKEAAIIARWIQDF

SEQ ID NO: 4252 - DNA, 3457 bp, DROSOPHILA
ctcaggcccagtaccatgtgggccgtgcacgtcgcattgacgaggaggagcgctcgttgcgccggaagcaggaagaggagcgcgaggccttcaaaattaaggtggcggagcagcgcaagcggcgcgaggaggaggcaaagacctccagggaccagttgttagccaagcggcaggagtacgtggagaagaccaagaacatgctcatcattgcggacgctccacctgaaaaggaacgcaagaagggtggtgggcgaggtcgtaaagatgactacatctccggtaccgaaagcgataacgatggagctcgtcgtgagggagaacgtccctcgaagaagaagggcaagggggaacgcaaaaagggtggcggtcgcaagcgcaaaacggagaagtacgagagcgacagcgaggaagagccaggtgccagtggcaagtcgggaaagaagaagggcaagaagccgaagccggttaaagagtccaaggagaagctttctgccaagcagcgcctcaaggtgctttccaaggagacgatctccaccagcgaatccgagtctgacggcaagcgcagcaagagcagaagtagaagcaggagtcgaaatcgcagtggtagccgaagtggcagtgcctctagaagcggcagtgatcgcgaggctagccgcaagcgcagcaggagcagaagtggatctggatctgggagtgacagtgatgaagcaactaagcggaagcgcgccaggaatcgcatcgaatctggcggggaatcggatagatctgggtcccgtgctcgctccaagtcgagttcccgttcaagatctcgatccaagtccggatctcgatcgaggtctcgctccaagtcgggatcccgttcgagatcgcgctcaaagtccggttcccgctcgagatcccgctcgccgtcgggttcaagatcccgctctcgctctggcagccgatccaagtccgaatcccgtagcagatcagggtccccggaaaaataacgcacctctcaaccgtgttaaatcacttttgactatatttagagttgtcttcgagagctgcaaaaagatactaataaaaacgaactaattgccacacaaaggcagtggagtaattgctattggtttgctgttcaaccgtaatccggattcccaagtctattggcatggatggattaggtaatggacagggctgattgtctgggccaggtcaacaatcgacttcaaacacgtctgtgctgctggatcatgtctcttacgattacagccataggctgcgagtggcgcaggacgaaagcgtggtcgatcttcttggtgtccagctgggcgtccaccttggggtagtcttttttgagctggtcatagtaggagattggtacccatccgtcggtagtgccgtagtaaaacttgaggaggtccaggttctgctctacaatctccctttgaatcccgcgaaccctggccatctcatcgtcggccaggaagaccaccttctccgctaccgatggtttggagtactttagggcggtgcccagaaactgtcgtggaatggagaaaatcaagaagtagatctgtatcagcatcaggcgcaaccacacgggcagaaagttgaagaagctgaagaaaatgtagccaaacacggagtacaggggcatggccaccttggtgaacacccatccattgggcgactccatcatccgctcgacggtggggaacagcatatagcacttttggatgcgactccgtatccgctcgttttccagcagctgcaggatcatccacgctccgatggagtgcccaatcaagtggatcttgacatcacttggcacgtatttctcgatgaaggcgattttatgccggatttgtccgtccaaattgaagagctcctcgttgccgctgagttgaggaacctcccgaatactggcctctggcggatcatcatggccagcgtgccctggagggaacatcaagtgtgctattaccgactcaatgtggaaacgccagcacactcacctatcacccaaactggaagatcgcccaactccttttgcaaagtgcctgcgaactctgtgtagaaacctggcaaaccgggattgccagttatgcagatgacgatctccttctcggttatggtctcctcaatccacctgccccatgtgaatatgtgggtgggaatggagttgatgttgacgtaggcctcctgcatattttccgctgctgttggcgtggcaaactgcgctgaaaatcaatcggcacctgtgttgatcccactcttttcacacgcgatgagttgtctaatccccgtggcaaccggttttcctttgtccaaccacctcggctgcagcctttcacgagtttcaaatcttgaggattggcgcggtttatccccagggttgatagctctgataaacactgctatgtgtttcggccaattgtttccagcaagaatggacaaaggtcacaagttcagcggcttaaaaacggctgatacagaaaccagggcggcaagctatgccaaaatcagatgttctatattagcggatacttaccatgataacgattgctcagacagagaaaaagtgtagataattttgtttaaaaaagaaaaaaaccaaaatgcattaactttaaaaaaaatactatggcgtaaattattatttgtcaacctattgatatctctttacagtactagaagcttttataaatttcatattaacttttacctatcatcattaaatattcgaaagtactccctaacattagttacctacgtatacattttttattaaccaaaacttatatgtaaaatcgcaaattgtttcttttttcggaaaaaattgagaaaacattttgatattcgtgttcagcataagttctagagaattatccgatcttaaggtttttcaaagcggatcttaaaagtccgcaagcgatgcagccctagcttaagcccattgtcagggctgccaacgtgggcaatgtggccctatcccaaccagttggcatcgccaccattatttattggttttttgttgctggtttttgagtttttatattttttttctagaaggcctaaaatttatagagcgttgtaggtaacaggattcaggattagacttagattctgaaggcacacccatcgaaagcttgacgaggcatgaaccgagcaattggaatcgggagcaagtggacacaaaagaatgtagctaacaattggggacattctcgaaaattcttgtagcaccaacaagtaaattattatacccagaacaaccgaaggagctattgggcggatccagagcaatggcatctggcaaagagctctattgctggggaagcacgtcacatggtcaattgggacttggcggaatcgaggacgagcaggtagatagatgactttcggatataagcccactgatattacttttgtatgccattgatttcctcacagatcctcacacctagtcaga

SEQ ID NO: 4253 - DNA, 1398 bp, DROSOPHILA
ctgaacttgtgacctttgtccattcttgctggaaacaattggccgaaacacatagcagtgtttatcagagctatcaaccctggggataaaccgcgccaatcctcaagatttgaaactcgtgaaaggctgcagccgaggtggttggacaaaggaaaaccggttgccacggggattagacaactcatcgcgtgtgaaaagagtgggatcaacacaggtgccgattgattttcagcgcagtttgccacgccaacagcagcggaaaatatgcaggaggcctacgtcaacatcaactccattcccacccacatattcacatggggcaggtggattgaggagaccataaccgagaaggagatcgtcatctgcataactggcaatcccggtttgccaggtttctacacagagttcgcaggcactttgcaaaaggagttgggcgatcttccagtttgggtgatagggcacgctggccatgatgatccgccagaggccagtattcgggaggttcctcaactcagcggcaacgaggagctcttcaatttggacggacaaatccggcataaaatcgccttcatcgagaaatacgtgccaagtgatgtcaagatccacttgattgggcactccatcggagcgtggatgatcctgcagctgctggaaaacgagcggatacggagtcgcatccaaaagtgctatatgctgttccccaccgtcgagcggatgatggagtcgcccaatggatgggtgttcaccaaggtggccatgcccctgtactccgtgtttggctacattttcttcagcttcttcaactttctgcccgtgtggttgcgcctgatgctgatacagatctacttcttgattttctccattccacgacagtttctgggcaccgccctaaagtactccaaaccatcggtagcggagaaggtggtcttcctggccgacgatgagatggccagggttcgcgggattcaaagggagattgtagagcagaacctggacctcctcaagttttactacggcactaccgacggatgggtaccaatctcctactatgaccagctcaaaaaagactaccccaaggtggacgcccagctggacaccaagaagatcgaccacgctttcgtcctgcgccactcgcagcctatggctgtaatcgtaagagacatgatccagcagcacagacgtgtttgaagtcgattgttgacctggcccagacaatcagccctgtccattacctaatccatccatgccaatagacttgggaatccggattacggttgaacagcaaaccaatagcaattactccactgcctttgtgtggcaattagttcgtttttattagtatctttttgcagctctcgaagacaactctaaatatagtcaaaagtgatttaacacggt

SEQ ID NO: 4254 - protein, 307 aa, DROSOPHILA
MQEAYVNINSIPTHIFTWGRWIEETITEKEIVICITGNPGLPGFYTEFAGTLQKELGDLPVWVIGHAGHDDPPEASIREVPQLSGNEELFNLDGQIRHKIAFIEKYVPSDVKIHLIGHSIGAWMILQLLENERIRSRIQKCYMLFPTVERMMESPNGWVFTKVAMPLYSVFGYIFFSFFNFLPVWLRLMLIQIYFLIFSIPRQFLGTALKYSKPSVAEKVVFLADDEMARVRGIQREIVEQNLDLLKFYYGTTDGWVPISYYDQLKKDYPKVDAQLDTKKIDHAFVLRHSQPMAVIVRDMIQQHRRV

SEQ ID NO: 4255 - DNA, 3564 bp, DROSOPHILA
tttatttgtgtaaataccataagcatcaaggtcaaaattatgaattcgtaaccaattatctcagcagatagatagctgttgtttttttttaattaaacaatatgttcttaaggagatttacttaaaatatatttgtgtgaaatatttcatttagctgcgccaatgagggttatttaattcagttttttggggatgatacatttgatctgtgtacaaaataactctaagaggaggtgaattatatatttaattgagcgtgtccgatacaatatggcatcatgttgctgctgggcacgcaaagtaattaattccaaagataatcagtggcagagtatcatgctcgcaaaggaacagcaaagtcttatccgattgtttttcgcactgcagttgccaaattgatgcccatcgacatggatataccaaaggaagcggagtcgaacgacaagttcatagtaaagtatcgccagcagtattacgatttgtccaggtttatgcacaagcatccgggaggcataaacacactcaaaggtctcaacagcggggacatgacagctcgcttcctaaaggcgccgccacattcggatgcggccatgtacttgatgagggagtacaaaatcgatccagaggactctcggaaaccaaagtcgagccaaagggaaacgttgcatcacgatgaagatgggactttgcgacaacggcccagggaaacggaggacaagaacaataaccaggtggacgatagtatggaggtaagttggatgagcggtttttaatctgtaactctagttgctggtcgactggatcgcacgttaagttggtcacaatgctatcggggcggggtaggtctgcgatccaaatctcagctaaaaaatatattattaacgtaaggcatggttgaaaggaacacgcgtgttttgcaaatccaagattccagtagctcgctcggtcagtcagtcgatggaatgctttaatgtttttgggagctatgtagcatgagttctcacaactgtcgcgacttgctggccagcacgaagacctttgccttggagtatatgcggatgtcctcctccacggtggtcagctccttgtcgatctccgccttgcggttgcgcaccctcaacgtctgtgcagtcatgggcatgtggttcagttcattaaccagctgttcgtagcctgttaagattcgttagcaagggtcaaacttatagtagtaacattaactcacgtttcttagcattagtgaggtgcgtcagtcggtcctgatcgctgagcaacacatggccacgcggacagtcgggatccagcgattccgcaagctgcttggccaccgccttctcgcgcttctgcttttccaggtaacgcggcaagcgcacctcatctcgggctgtcaaaaagtacaaattcatgactagttcaaatcaaatcaggagggaatataagatatttaaaatagagaataattatagattatatatgaaataattatcaaagatatttaattttgtcattactgtcgctgacaattggtaaacaagggataaactcacatcctagtttatgctcacgacgctttgacttagagcttatggtggtgacattggaggccgttgtgaaacgactacgggcactgagtggagcctcgtcgtctgaggcgccgtagtttgcaggttcggcctcggtcatgggcatagcctccatttcggacatgttgaagcgactctgcttcgaggagttcgaacgcgccgaaagcggcaactgttccaaatcttcctcgttttcatattgcatgggtttgtagttttccccgtattttgcaccggattcctccagtatagatctggcatcaaagttacatctgcggataagataaacctttgtgaaaaccttcgagtttggtgcaaaaagtcatacttcttcagagcatttgttagatagagttcgtcggtaatgtcctcagtttggatggctatgctggtggagctccgattcgtgccacacgattgacagcgatcaatgtctgtatccgacgaaggctcttggagattctcggattctaagttctccgacgggtcatataagatgggattgcgctcctccaggccatcgaagcgttccccctccgccggaacggccacggccagttggtgctgtgagcgagaggtgctgcggccattttgcaacgagttctgttttatagttttgcccttagctgctggtttctccgccttcgagtctcccatcacggaggaagagcgtcgcagcgggggcatccatttcgggcgcgtcggctccttagcggccaacttctggctggtggacttttccagcgagcgcaggctcaccttgttttccttgaggaagtttcgggactgtgtgacgcctgtgggaacggagaccaaaacaaattaccaactggttgccatggccaagcggctgtttggaaaagaaatcttacgcggcaccgaaaagatgccctttaacgttggaatcgggcgaactgaagtattcgacatgttccacctactcccgaactataactagacggctggggctccagaaatgtgatctcgactacgacaagtggaaactgcgtcgttgtgtgaagtaaggcacaggttcaaatgacaattttgaaccagctgcttgtgattgtacctgctcatcgatgcccgataacattatatatcggttcggtgctgacccgcggctggccacattcgagccaactaacggtttatgggatgtcctagtgtttaagtaaatattaaataaaaaagcaagtagaaatcaagtgaaattcttactattctgtaattatagtaaagttaaaataaaataaataaaaaaatataaaataaaataaaaactctgcacagcttctaattttaaatatttaattttcaaaggtaattaaccaaaccaatttatggtaatacatactgtattaatttattgactaacctattgtaaattcatgaattccagcacctagtggactggtctaaggcaatgcttccgcagatagctaacataacggattgctacgatgagtgggttcacaagccggtggacaggccactgcgtctctttgacccttggtacttggagatgtgcaccaagacgccctggtggctggtgcccctgttctggataccagtgatcgtgaaatgcgccgtggaggagttcaccaccgcctggcaggatagcaaccaggtgagtagtcgcgcaatcttcgcattcttggatacgatcttctaaaagtatcttctttctgcagctggctgtgttctccggttactttttatttggcgtgctcctgtggtctttcctggagtacacactgcaccgctgggtgttccacgtgaagctgagcaacaagagcggaagttggctatgcaccttccacttcatgatccatggcctgcaccacaaggtgcccttcgatccgatgcgactggtgtttccgccccttcccggcgcagtgctcgccgcggtcatctacaccccgctcagctttgtcctgtcccatccgcgagtgatcttgtctggagctctggccggcta

SEQ ID NO: 4256 - DNA, 1218 bp, DROSOPHILA
cacatttctggagccccagccgtctagttatagttcgggagtaggtggaacatgtcgaatacttcagttcgcccgattccaacgttaaagggcatcttttcggtgccgcgcgtcacacagtcccgaaacttcctcaaggaaaacaaggtgagcctgcgctcgctggaaaagtccaccagccagaagttggccgctaaggagccgacgcgcccgaaatggatgcccccgctgcgacgctcttcctccgtgatgggagactcgaaggcggagaaaccagcagctaagggcaaaactataaaacagaactcgttgcaaaatggccgcagcacctctcgctcacagcaccaactggccgtggccgttccggcggagggggaacgcttcgatggcctggaggagcgcaatcccatcttatatgacccgtcggagaacttagaatccgagaatctccaagagccttcgtcggatacagacattgatcgctgtcaatcgtgtggcacgaatcggagctccaccagcatagccatccaaactgaggacattaccgacgaactctatctaacaaatgctctgaagaaatgtaactttgatgccagatctatactggaggaatccggtgcaaaatacggggaaaactacaaacccatgcaatatgaaaacgaggaagatttggaacagttgccgctttcggcgcgttcgaactcctcgaagcagagtcgcttcaacatgtccgaaatggaggctatgcccatgaccgaggccgaacctgcaaactacggcgcctcagacgacgaggctccactcagtgcccgtagtcgtttcacaacggcctccaatgtcaccaccataagctctaagtcaaagcgtcgtgagcataaactaggatcccgagatgaggtgcgcttgccgcgttacctggaaaagcagaagcgcgagaaggcggtggccaagcagcttgcggaatcgctggatcccgactgtccgcgtggccatgtgttgctcagcgatcaggaccgactgacgcacctcactaatgctaagaaacgctacgaacagctggttaatgaactgaaccacatgcccatgactgcacagacgttgagggtgcgcaaccgcaaggcggagatcgacaaggagctgaccaccgtggaggaggacatccgcatatactccaaggcaaaggtcttcgtgctggccagcaagtcgcgacagttgtga

SEQ ID NO: 4257 - protein, 388 aa, DROSOPHILA
MSNTSVRPIPTLKGIFSVPRVTQSRNFLKENKVSLRSLEKSTSQKLAAKEPTRPKWMPPLRRSSSVMGDSKAEKPAAKGKTIKQNSLQNGRSTSRSQHQLAVAVPAEGERFDGLEERNPILYDPSENLESENLQEPSSDTDIDRCQSCGTNRSSTSIAIQTEDITDELYLTNALKKCNFDARSILEESGAKYGENYKPMQYENEEDLEQLPLSARSNSSKQSRFNMSEMEAMPMTEAEPANYGASDDEAPLSARSRFTTASNVTTISSKSKRREHKLGSRDEVRLPRYLEKQKREKAVAKQLAESLDPDCPRGHVLLSDQDRLTHLTNAKKRYEQLVNELNHMPMTAQTLRVRNRKAEIDKELTTVEEDIRIYSKAKVFVLASKSRQL

SEQ ID NO: 4258 - DNA, 2879 bp, DROSOPHILA
tcgttcagggcatcatttgggacatcaactcgttcgaccaatggggtgtggagctgggcaagcagctggccaaggccatcgagccggagctggatcactgcaacgaggtctccacgcacgacagttccacgaacggtctaattaacttcatcaaagccaattggaagtaatcatgtctggctatttgttgcgaattaaaaagaaatgtttacacaaatgctctaattgttagtagtttctgagccgttattcagtagccgccgcttatgtatactcgagctacaagccccctgttattggcacattattcaactgtatttatgaactggatatgtttgtttgcttgcgtatcgatgaaatctcgtgtcggaattagaccaacaattggctctcactattcgttgttgcacgtagtttaaaaccgtaaataaaaatttatgaattcgatgtaaaagactgtgtttggaaaaaaatgctaatttattttctcgcggcgcaacaacaagggaattgcatttaagcttaaattacgggtagactgtctaatccatggatacgtcagagtctgtgtctgcgtcggcgttaccatcgtcggtcgccaggtcgtcgtcggccaccagctcgtcttccaatgggctcttcggactgcctggctgatcctcctccagatcgctccagttcgtttctgcttcgggatcgggctcatctgcaagcaagcgaattaagactcgagccttgtgcgaataaaaccacttgataacttacctggatcttcgtccaggatcagggctttgttatcgttgagatgattgtccgcgttgcgtttcatctggttaattatcaggttgactcgcccggttattctaaaaataaagaaggcattgaaaaggtgttataacaatattgccaatataacaataataggagtacacgcattactaaattttgtcgtggccagatttcgaaaatggatcttttgtgcaatgatggcgctagctgtatggactacttctccagcccccacaacaagaaacccccgagtccaggcagtggcgtgccagcattgggaccaggcggtgccctacccattgccataatacccagcatatccagcttagtcaaccagtgcaacaagccggcctgcgatgacgctgatatgcagtgcatcatcgacctgatcgaaggcacactctgcgaagcggtggccattattgagtcagacccgcgtggtctttttatctacaactttccgaaaaagcaaaagatgtcctccatcagcctgatctcttcagtgttcaccgacaccattgtggccaacggagaggatgatccctcgatcacgaatcattacacgggtggccttggcatttcggcggactccgtatccagtggcttggcgcgcaagatgctgaccatcggggactttgaatactccaatgccattgccgacattagggattttgtcagtcgctgggaactttcgccggacacgaagtgtgtggtgatcagcaatccgattcgacacgaggtggccaaaaagggaaccattctctttgtggatgcccatttctctcggccaacaccccgttgtccgaatcctctggccgtcgccaaggtgcgtttcatcatttccttgtcgaagattctattgaagcattatcccgtgatgatcacctaccgcttcgagggttacaacacgctctactacggcctgggcgaacgatgcctcaactcgttcacttttcagcgattctacatcgacaccattctgcacaccaagctgaccttcttcgctgcgatctcggagtgtcgccacggcaccattgaaaagcccaagaataatatcaagccgaaaaattcaaagaaatcgggatcttgaacttgatttccctattaaaacctttgttttgtgtctttcaattccccaattttacttactgcaaagcttccgatagacagtgcatgcgctgctccgccacgccgaggcaaacggctagtttttcgcgcaaagcctccttgtcctcggacatcaagacactagtgtgggtggaggtcagtgcgtgcagccaacgcagggcggagcggacactgtaaaagaacgtatttagaaaaagactcaatagggctctacggaaaacactcacctcgcgtgctttccttgcagcaggatggaaagttcgttgaccaggggattgacataatcgagcggtagccgatccaaggtcaactgtatcgtctctggatcctgagtgctcagaacggcttgtatcatccttaaaaaacgaacttctattaaaacatctattgccattgttcgaaaatcccttacgcctgatccttgctgtgtaatgcctgcattagcagctgcgttttgctctgcgtcaacaacttgccgccactcagtttggttccttgaattttaagatgttctagtcgggcttccatgggcacttcgttttgcactttcttctgcgagatgggcagggcgctgttgtactccacatttttttggtttacaatgggcttctggaccttggtggcggcctggtagcccggctgctcctttcccttctttttcgcatagagctttttgggatcggcgcgcacaataacgtttagtttctcgccatagttgggcgtaaaacgttcaaactgcagctgttggcgacttccgtagccaaagaggatttcgtgggagcgatttgagtctgtcacaaagtgggccgccacggctagaagtggttccactgtttcggcgccatcggaaacgatctgcagcgaaaccttgggcttcacaaacttctctgcggataaactgtgaaacatagtacttcagtacgagtgacaaaacgtgtattcacatgacccacctgttcaca

SEQ ID NO: 4259 - DNA, 879 bp, DROSOPHILA
atggactacttctccagcccccacaacaagaaacccccgagtccaggcagtggcgtgccagcattgggaccaggcggtgccctacccattgccataatacccagcatatccagcttagtcaaccagtgcaacaagccggcctgcgatgacgctgatatgcagtgcatcatcgacctgatcgaaggcacactctgcgaagcggtggccattattgagtcagacccgcgtggtctttttatctacaactttccgaaaaagcaaaagatgtcctccatcagcctgatctcttcagtgttcaccgacaccattgtggccaacggagaggatgatccctcgatcacgaatcattacacgggtggccttggcatttcggcggactccgtatccagtggcttggcgcgcaagatgctgaccatcggggactttgaatactccaatgccattgccgacattagggattttgtcagtcgctgggaactttcgccggacacgaagtgtgtggtgatcagcaatccgattcgacacgaggtggccaaaaagggaaccattctctttgtggatgcccatttctctcggccaacaccccgttgtccgaatcctctggccgtcgccaaggtgcgtttcatcatttccttgtcgaagattctattgaagcattatcccgtgatgatcacctaccgcttcgagggttacaacacgctctactacggcctgggcgaacgatgcctcaactcgttcacttttcagcgattctacatcgacaccattctgcacaccaagctgaccttcttcgctgcgatctcggagtgtcgccacggcaccattgaaaagcccaagaataatatcaagccgaaaaattcaaagaaatcgggatcttga

SEQ ID NO: 4260 - protein, 292 aa, DROSOPHILA
MDYFSSPHNKKPPSPGSGVPALGPGGALPIAIIPSISSLVNQCNKPACDDADMQCIIDLIEGTLCEAVAIIESDPRGLFIYNFPKKQKMSSISLISSVFTDTIVANGEDDPSITNHYTGGLGISADSVSSGLARKMLTIGDFEYSNAIADIRDFVSRWELSPDTKCVVISNPIRHEVAKKGTILFVDAHFSRPTPRCPNPLAVAKVRFIISLSKILLKHYPVMITYRFEGYNTLYYGLGERCLNSFTFQRFYIDTILHTKLTFFAAISECRHGTIEKPKNNIKPKNSKKSGS

SEQ ID NO: 4261 - DNA, 4238 bp, DROSOPHILA
ggagcgctcgtccgtcaaggaccaaacaacaaccctacaatcggcacccacagtgtataggtggccagcgttgtcatttgtaattgaggtcactggtccatcatggctgtcgccactgagcgttcgagaaatctgcaaggattgcttgtggtttattcgccttcaaggctctttgtccgactcacctttccctcggctaatgagtatataaccactgagcccttgtacgttcccagagcaatgtgaagctgatcaccggctgcatcctgtgcctggaggctcttccgcgacttcttgggccgggaaccggccaccaaaacccacgtgagagctgtgcacgacccggataactgtagattgggcgtaaactcctgatacagcgtgttcgtctctgtgttccatatccgcagaactcccgactcgtccaccgaggcaaatagttggccaccattgggcgaaaatcccaacacgtgcttcttgcccagcgacatcgttttttatgttttgaattagagatgggcgctaaggctagtgtttacatcggctcacactcgtcgcacttaatgcaatctatcacgcaaatgtcacgcacgactcacgattgaattgcatttaccgacgtttcctatacccttgaaagatttatcaaattatatgcaaacaaaattcatcgagtgaacaatataataaaccaatgggaatgtgaattttttaaataaacttttcagtttttaaattaaataataaaatattttactctaattgttttaaaatttcctcaaaacttaaaatgagtaaattcttttgcaactgtaaatattacttatttggagtaacttatatacattatcctggattatttaagtaaatgcgttcaaagaccaagaaataaactcgatttacaggattctttggggcgtaaactccactgctgaactatattgttaattgcatgctattcatcataaaccattgagaatcgttaccttattgaaaaagatcaattcaaatgtaaaataaaaataaaatagcgccagtcaccgtttacgataatcgataggcaagtgccatcgctatcccatccagaatgttcgcggccactttgaggttataactatagctggaatttaccgactgactccgtgtgaaattgaaatctgtgttaaaaaatggctttatccgttcccaaggctcccggtgtgtcgcagatgctgaaggatggcgcccgggtaagtgcaacaaggaggaataactctgcgaggagtccgccgggcatcggtttcattgagattcggcttaaaagaaaacatgccgtcttgcggaggcgcgtgattagtcatcctcatggaacggggctcgacatatgaaagaaaaatgactaatttaatggctttacttgtgtcctcagatgtacagtgggctggaggaggcggtgttccgcaacatcagcgcctgcaaggagtttgcacagaccatgcgctctgcctatgggccaaatggcatgaacaagatgatcatcaatcacatcgagaagcagttcgtgaccagcgatgccggcaccatcatgcgggagctggatgttgagcatccagccgccaagttgatcgtcatggccagccagatgcaggatgccgaggtgggcgatggtacaaacttcgtggtggtgctggccggagctctgttggagtccgctgaggagctgctgcgtctaggaatcaccactgccgagatctccgacggctatgaaaaggccttggagaaggctctggagattctgcccaatctggtgagccacaagatcgaggactatcgcaatgtggagaaggtcaaggaggtactccgcacatcgatcatgtcgaagcagtacggccaggaggacttcctcaacgatttggtgagcaaggcctgcgtctccatcttgccggatgagggcaccttcaacgtggacaacattcgcatctgtaagatcttgggcagcggactgaccaagtctgaggtggttcgcggcatggtcttcaagcgcttcgtagaaggcgatgtgacctatgcagagaaggccaagatcgtgattttctcctgccccgtcgatattatccaaactgagaccaagggcacagtgctgatcaagtcggccgacgagctattgagcttttcctccggcgaagagagcctgttggagagccagatcaaggctatcgccgacgcaggtgtcaaggtggttgtggccggcggcaaggttggcgacatggctctgcacttccttaacaaatacggtctgatggccgtgcgtctcaactctaagttcgacctgcgtcgcctgagccgatccgtaaacgccactgtcctgccgcgcatcaccacgcccagtcaggaggagttgggctactgcgacaaagtttgcatcgaggaactgggagacaccacaattgtggccttcaggtgggattttcaatggaattagcgagagaaaataccattataatttcttattgaatcattgcaggaacgagggcaaggactcgcgcattgccaccgtggtgatccgtggagctaccgacaacttcatggatgacattgagcgtgccctggatgacgctattaacaacttcaagtgcctgacccgggatggccgctatctgcccggagctggcgccaccgagatcgagttggccacccagctgtccgcctatgctgatactctgcctggtctggaccagtacgccgtgcgcaagttcgctaatgcgctggaagttttccccaaggctctggccgagaactccggcatcaatggcacggaaatcgtcaaccagttgtatttggcccacaacaacgaggccggaaagacaatcggcttcgacattgaggccgagaaggccagcaccatcgacacaacgaaggcaaagctcttcgatctgtaccagtccaagttctggggtctcaagtacgctgttggcgcggccgcaaccatcttgaaggtggaccagatcatcatggccaagcgcgccggaggtcccaaggtgcgacaggctgccggcagcgatgacgagagttaagcggctcctctgtgattcgtactccctactataactagtttctcccgctcccacaaagagtgcattgtattttcataaacgagtcccatggaaattataaatttcattaaccactctcacactcacccacatacacagccatgcacacagtttcttgtattaataaacttaacttacgaaaactgaactgaaacgcgtgatccttcgggggcctttgaaataaaacaacgtggttttcgcaccgaacccggtgccaccgctagataacgaatctaagtaagttatcgctttttatttttgaaatttaagcaaacgattattcattttgttgagtacaatatttcaaatgcttattcgcagatacatttcaataatatttgtgaggactcgtccccgtttgcatcgcaaaagagttgtattaattttcgaataaaatacgatctcgttgtcgcttttcatttgaagtgaaaggtgttaaagtgtattcgatgaccatgattgattttgagtacgtgtgcatctaatgcccttcctttccaaatgcgatttaccctctatggataagttatagaaaatgacacatctgaggacgaaaccaaaccatccgtgctccattgggtggttcggctgtcctcgggctaataacattcagggataactaaaaagtttggatgcaaagtgtccgttggatcgaaaactgttgaatgcggaatgtttaagcagaaactgggaggactcccgtaaccgactgcagtttcgattgatagggcggctcccatgaaagcctttcgcaatggcggctttggaccacattttgctgtttgctcacgacagcaaactggagctcaaaaccttttatataggtttccgaatagaaaatgccgtctccaaaaacgtgtgattcttggtactaagtaaacgttgtctgaattttgctacgttaggaactaaaatcaccgccaattcaaaaactcttgttaaatgcaattttggaagaaccgatcaaataaactataccttcctcattcccatccacactgagctggcgacttggacagttcgtctcagcgggacgagaatcgtaagttcgggatgcaatatgtgtgtatgtacgacttggtgggtgtatgctgatatcatacgcgtgctctccctacaggataatcattgcgtctatcattccaa

SEQ ID NO: 4262 - DNA, 1935 bp, DROSOPHILA
tcaattcaaatgtaaaataaaaataaaatagcgccagtcactttgaggttataactatagctggaatttaccgactgactccgtgtgaaattgaaatctgtgttaaaaaatggctttatccgttcccaaggctcccggtgtgtcgcagatgctgaaggatggcgcccggatgtacagtgggctggaggaggcggtgttccgcaacatcagcgcctgcaaggagtttgcacagaccatgcgctctgcctatgggccaaatggcatgaacaagatgatcatcaatcacatcgagaagcagttcgtgaccagcgatgccggcaccatcatgcgggagctggatgttgagcatccagccgccaagttgatcgtcatggccagccagatgcaggatgccgaggtgggcgatggtacaaacttcgtggtggtgctggccggagctctgttggagtccgctgaggagctgctgcgtctaggaatcaccactgccgagatctccgacggctatgaaaaggccttggagaaggctctggagattctgcccaatctggtgagccacaagatcgaggactatcgcaatgtggagaaggtcaaggaggtactccgcacatcgatcatgtcgaagcagtacggccaggaggacttcctcaacgatttggtgagcaaggcctgcgtctccatcttgccggatgagggcaccttcaacgtggacaacattcgcatctgtaagatcttgggcagcggactgaccaagtctgaggtggttcgcggcatggtcttcaagcgcttcgtagaaggcgatgtgacctatgcagagaaggccaagatcgtgattttctcctgccccgtcgatattatccaaactgagaccaagggcacagtgctgatcaagtcggccgacgagctattgagcttttcctccggcgaagagagcctgttggagagccagatcaaggctatcgccgacgcaggtgtcaaggtggttgtggccggcggcaaggttggcgacatggctctgcacttccttaacaaatacggtctgatggccgtgcgtctcaactctaagttcgacctgcgtcgcctgagccgatccgtaaacgccactgtcctgccgcgcatcaccacgcccagtcaggaggagttgggctactgcgacaaagtttgcatcgaggaactgggagacaccacaattgtggccttcaggaacgagggcaaggactcgcgcattgccaccgtggtgatccgtggagctaccgacaacttcatggatgacattgagcgtgccctggatgacgctattaacaacttcaagtgcctgacccgggatggccgctatctgcccggagctggcgccaccgagatcgagttggccacccagctgtccgcctatgctgatactctgcctggtctggaccagtacgccgtgcgcaagttcgctaatgcgctggaagttttccccaaggctctggccgagaactccggcatcaatggcacggaaatcgtcaaccagttgtatttggcccacaacaacgaggccggaaagacaatcggcttcgacattgaggccgagaaggccagcaccatcgacacaacgaaggcaaagctcttcgatctgtaccagtccaagttctggggtctcaagtacgctgttggcgcggccgcaaccatcttgaaggtggaccagatcatcatggccaagcgcgccggaggtcccaaggtgcgacaggctgccggcagcgatgacgagagttaagcggctcctctgtgattcgtactccctactataactagtttctcccgctcccacaaagagtgcattgtattttcataaacgagtcccatggaaattataaatttcattaaccactctcacactcacccacatacacagccatgcacacagtttcttgtattaataaacttaacttacgaaaactg

SEQ ID NO: 4263 - protein, 526 aa, DROSOPHILA
MYSGLEEAVFRNISACKEFAQTMRSAYGPNGMNKMIINHIEKQFVTSDAGTIMRELDVEHPAAKLIVMASQMQDAEVGDGTNFVVVLAGALLESAEELLRLGITTAEISDGYEKALEKALEILPNLVSHKIEDYRNVEKVKEVLRTSIMSKQYGQEDFLNDLVSKACVSILPDEGTFNVDNIRICKILGSGLTKSEVVRGMVFKRFVEGDVTYAEKAKIVIFSCPVDIIQTETKGTVLIKSADELLSFSSGEESLLESQIKAIADAGVKVVVAGGKVGDMALHFLNKYGLMAVRLNSKFDLRRLSRSVNATVLPRITTPSQEELGYCDKVCIEELGDTTIVAFRNEGKDSRIATVVIRGATDNFMDDIERALDDAINNFKCLTRDGRYLPGAGATEIELATQLSAYADTLPGLDQYAVRKFANALEVFPKALAENSGINGTEIVNQLYLAHNNEAGKTIGFDIEAEKASTIDTTKAKLFDLYQSKFWGLKYAVGAAATILKVDQIIMAKRAGGPKVRQAAGSDDES

SEQ ID NO: 4264 - DNA, 2609 bp, DROSOPHILA
tgagccagatggctaagaatggcaaagaccttttttgtttggttaaactgcgaaagtgagaatgtagggccctacgctgatatggttgatatggttttgatttgaatttttgttcactcacatcttcccaggaggatttcagttcggcagtctcgttgcccaccatggtgtgggtcttccctgtgcccgtctggccataagcaaacaccgtgcagttatagccattgaggacctcctcgatcagcggagacaccacgacggagtagacatcgcactgcttggactcggggccaaaactgcggtcaaaggtgaacttcttggtgagcttggagtccagcgtgtggcgggtgaccacttcccgtggtccgaccacatccacgacttcggccgagcggatgcaacgttcccgagaattaaggggtctacaaaagatatagaagatatatgtagatctttttaaggggttttggttacatatacaaactcacctgacgcgcacatacacctggatgttttggttggacttcttttggggctggcgcgacgtattcccaccagatatgtccatattgatcaattgaaacaattaattgtggttttagcgcgtacagtccaaaaaatgacgcctgtcgcgtgtatcggtatgcgtgtgtgtgtgtgtttgattcctggaaatccttgtgcttcaccttccaccgagccgaatgctgataactgtaactactatttacagaaggctggcgtggaaaaccaattttcgcactatttccaatgagaacagagagaagcagcgtcttcagttgtccgttcaattttaaaataatgcgcaaatagtgtgaccgcaacacggcaccctgaaaataccaacatcgaaaaatacaagtattggaaaactacagaatgttcaaattatttgaattaaataattttttatcttttatttgttctacattaaaccattaaatatgtatagtaaactcttattatcaaataatcccgactaggctatgtggtgaagaatgccctgcctcacgagagactccacctgagctcggggcagatagtgctggctgttcttcttcaggtggatcacctcgccgtcgtccagctcgaacttcccatagtcctccatgcagcgcacctcgatgtaaagtgacttgggcggacgcagattgttggttagatcaatgggcaagccctggttgtagcccgcactgcacatgtaggcagccagggacttggagtagttgttgaagaaggtgacctccggttcgcagagtgcctgcttgatgtccccggggataatgggtccaaactcccacctgagggccttgatcctcctgcaccgctcgtataggtaggccagcaggcacctcttgttcctctggagagctgcgtgcctgaagttgagcaggggccacagactgcgatccccggaagcattgtagctggaggcctgggccacgttctcctcgaatatcgccttgatctcctccagcacctggcgcaccccatcgtcgtcgaaggcgggaattgtctgcgacgatctctccagttcttttagcaggtcgaaggctttctcgccgaacatttttgtttgtcggctcattgttgatcctctctgtttttctttggtttggggatctagtgatggattcgcgccaaaatgttcgtcgacttgtggtatcgatacttggtatttcttttggtatatttcaaaaaataacaaaaatttcatcctcagtagccatgttcctttaaaatagatttgaaacggtgatttatcaaaatttagcttacgaggcccaaattatgccgtcctaagaggaaatgccatcctggttagattggtgcaactgcgggagtggagtaccacatgcaagtaagtgggtgtgaacatcttaaagtatcgaatatattagctattcgctattcggctatttagccaactggtccatccctatcacacacgtagtggcaaagagttggcccaaaaatcagatgaactgcaatttgtgtgttaaatcaataaagaacgagtaacctcctgattgtgtggctgattttggtgctgtgcgtgtgtgacagcggtgatagcgacagtgaatccccgattacaggaagtgagcagagaaagaggaagcagcactggctatagctattaacccttatcccatttttaacccttagtcttcgaagtgggccagccaccgcccccggaaatcatggacagcagggaggagaacgccgtgtacgatgacatgaacctgtacatcgcaccgcagagcttcatcatcgagccgaatggaggagatgagttgctggtcatcgggcgccacgacaaagtcaccagggttcagccagcgagcggaggtcttgtggccaaccttcgccccaccaggaggatttgtggtgtgctgggaaccattcacctactgagctgcgactaccttctggtggcgacccaccgcctcttcgtgggcgtgctcaatggcgcagttgtgtggagattagcgggctatgacatcataccttacattccgaattccttccagcgcaaggagaacgaaaactacttgcgactgctacgccagacacttgacaccaag

SEQ ID NO: 4265 - DNA, 609 bp, DROSOPHILA
atgagccgacaaacaaaaatgttcggcgagaaagccttcgacctgctaaaagaactggagagatcgtcgcagacaattcccgccttcgacgacgatggggtgcgccaggtgctggaggagatcaaggcgatattcgaggagaacgtggcccaggcctccagctacaatgcttccggggatcgcagtctgtggcccctgctcaacttcaggcacgcagctctccagaggaacaagaggtgcctgctggcctacctatacgagcggtgcaggaggatcaaggccctcaggtgggagtttggacccattatccccggggacatcaagcaggcactctgcgaaccggaggtcaccttcttcaacaactactccaagtccctggctgcctacatgtgcagtgcgggctacaaccagggcttgcccattgatctaaccaacaatctgcgtccgcccaagtcactttacatcgaggtgcgctgcatggaggactatgggaagttcgagctggacgacggcgaggtgatccacctgaagaagaacagccagcactatctgccccgagctcaggtggagtctctcgtgaggcagggcattcttcaccacatagcctag

SEQ ID NO: 4266 - protein, 202 aa, DROSOPHILA
MSRQTKMFGEKAFDLLKELERSSQTIPAFDDDGVRQVLEEIKAIFEENVAQASSYNASGDRSLWPLLNFRHAALQRNKRCLLAYLYERCRRIKALRWEFGPIIPGDIKQALCEPEVTFFNNYSKSLAAYMCSAGYNQGLPIDLTNNLRPPKSLYIEVRCMEDYGKFELDDGEVIHLKKNSQHYLPRAQVESLVRQGILHHIA

SEQ ID NO: 4267 - DNA, 2628 bp, DROSOPHILA
caatcgcagctcaaatggcgcgtagtgattaaataaccatgccgaaattctgctctacggcaatccccttggatcagtcgtctgcaagccccttcctcgagcgcaatgctttcgcgtgccgcttttcttactgttctcctaacgctgatctatgccagccatgcggctgcgggattgagcattacagttccgggcacaaagtggtgtggacccgggaacatagcagccaactacgatgacctgggcactgagcgcgaagtggacacgtgctgccgggcgcacgacaactgtgaggagaagattccgccgctggaggaagcctttggcctgagaaacgacgggtttttccccatgtaagcgtggattccatagcacccatgctgatcttgggatcaataatcgtgcgctccccgcagattctcgtgtgcctgcgagtcggccttccggaactgcctcaccgctctgcgaaacggacactccctggctcttggcaaaatctacttcaacaccaaggaggtgtgctttggctacgggcatcccatcgtttcctgccaggagaagcaggccgacctgttcgagacacgatgtctcagctaccgagtggacgaaggtcagccgcagcgctggcagttctacgacttggccctctacacacacgtaagcggcagcgaggaggactcccgagattgaacttcgacgtccggcgataagccctcaattgtttacaaaacagattgtgcggggagcgaaacctaatgtgattaggattttgacggtaggttatttgtgtaataaattttcgaagcttaaggctaagtagcctggaattatattaaaaactgaattcggaggctcaattaaagttcaaaatgatcaagaaaatattcggagtattttatatttcatccagattaaagtgggattaccttataagtaataattaatgtgatgtgcgcatcaggtaatgtaatcatcttgtctacaaatcgttgatatcatgtcagcccgccgacgctgggattgtgaagaacggcatgtcgtagaactgccagaccttggccttggacttgtccacctggtagcggatacagcgcttgcggaaggtgccctcctggtactgcttgcatccggtggtgggatgtccgttggcaaagcacctgctcctgctgccatagtagatacgacccagagttttggccgtgatgctgttcactgcctgcaggcaattgataaactgctgctcgcaggtgcacttgaggctaaattgaaaagtgtctgtcaatgtgcacaaaatcgataagggactttaggaggtttaccgcttacatgggaaaccagtctgtgttggtgggcagtccgtggagtgctccgtgggactcgataatctcgtcgcaatggtcgtgggcacgacagcacttgtccgtctcccgttcgcggcccaaatcctcgaagttcgccgccgtgttgcccggtccgcaccacttggttccgggcaccgtgatgcccgtatggggaactggtggcagtgcctggttgtagatgtcctcgtcctcaaagatagcctcgtcgccgaaggcccaagccatggccagtagcccaaaaaagaacgcttcgcgcagcagccacatgtctcagcttcggcagtcgcagcacaactaagtttgatttcgttgacttgagctgcctttgctcgagctgataaggcggcaaacaacaaatgaagcaagcaagatgtactttagtaactccaaaattaattcttgaggtctaataaacagcggatactcctagttaagaataattcgcatttccaactgacctctaacaatagtttagataaggtttattagtttaaacaatctatatactagctaagtatgtccttaaaagcttcgacagctgtcttggccgttttccgcttcgtctcctttgtctgctcggcgtccagatgcttggacaaactttcctgccattgcgtaggtgaaagcttgtacgtgtccaggcggtattttgtgtagatgatccgaccgtgtggtgagcccttcagcatattggccttggaaaacagttccttggccatgcgcagtttctgcgcatcttgggcggccttaaagcactgttcgaagacgcgggaaccatgtcgagtgatggccaagtctacgtagaagccatccaactggcggatcagacgctcgcgggacttctcgccgatgaacttgctctgcatgaaggcgtcaacgatgtgtgagccattgggtgtgttgaagacctgagccagttgggtggcgggcagatcgaggatacagttgaccagaaagattggcttgttgaactgcagcaggtgttgagtaataagcgaaccgtgcagatgaacaaaggccgactcgtcgccggtcaccacctcaaagggctttaacttaatcaaacatgtaaggaaaagcttcgatttctccttgtcgccactgacatggagggcactctgcaaagcggctatcatctgagactgcttggtggccagtcgcaagcaggcggcactgagggcggacacgacgccggtgtatcccattttcagcagctcctccacatgcggctggagttcggtgaaaacggactcgaaatcaggcacct

SEQ ID NO: 4268 - DNA, 561 bp, DROSOPHILA
atgtggctgctgcgcgaagcgttcttttttgggctactggccatggcttgggccttcggcgacgaggctatctttgaggacgaggacatctacaaccaggcactgccaccagttccccatacgggcatcacggtgcccggaaccaagtggtgcggaccgggcaacacggcggcgaacttcgaggatttgggccgcgaacgggagacggacaagtgctgtcgtgcccacgaccattgcgacgagattatcgagtcccacggagcactccacggactgcccaccaacacagactggtttcccatcctcaagtgcacctgcgagcagcagtttatcaattgcctgcaggcagtgaacagcatcacggccaaaactctgggtcgtatctactatggcagcaggagcaggtgctttgccaacggacatcccaccaccggatgcaagcagtaccaggagggcaccttccgcaagcgctgtatccgctaccaggtggacaagtccaaggccaaggtctggcagttctacgacatgccgttcttcacaatcccagcgtcggcgggctga

SEQ ID NO: 4269 - protein, 186 aa, DROSOPHILA
MWLLREAFFFGLLAMAWAFGDEAIFEDEDIYNQALPPVPHTGITVPGTKWCGPGNTAANFEDLGRERETDKCCRAHDHCDEIIESHGALHGLPTNTDWFPILKCTCEQQFINCLQAVNSITAKTLGRIYYGSRSRCFANGHPTTGCKQYQEGTFRKRCIRYQVDKSKAKVWQFYDMPFFTIPASAG

SEQ ID NO: 4270 - DNA, 4163 bp, DROSOPHILA
ttgggagcctccgtcaccgggtactgcaatacaatagcgatactgtgaagctggatgaccttaaaaattaatcgtgtccattgtacttaccgaatatcactggcgacagcttgggttcagggggggcagaaggattatcatttcttccatgccatttgctaaatggccaaaagcactcgcccagggccaagaaggtggtcagcaggagcagcgaaagcactcccgatttgagcctcattgtggttgcgttgtaaacaaagcaggagtggcgactgactacttggagtatatagctcgcaggttatcggatcgcgctactcaattgacgccagataaaggcctcctgcgcataaacaagtgaatcagcctgccgagctttcttttgtggtaattgtaatgcatttatatggagcccttgtggtctgcgcactttccgtcagctgagatttgacctttaaactatgtgtgtgtgcgtatgtgtgtatgcggaacttcggcggtcgcacttccctcgcaaaacgacgtcaagagtggctgttattgttttaacaaaagcgttggctttgcaattttgttgttttctgcctaatctgtattgttgttgttgcgcagtttgttatggtcagcgtttatttctcccctcttagtaaaccatccctctaggtgtgaccaggtgtctgcacacactctgttatctttgtgaaccagtcacggttttcataatgttattcatattataaaaaataatttacggaagtacatattcgcacaactatagaagtaatctaatcttttgcctgtaaaaaccactccatatttgtaattcaagcagagctcattactaacctactagctatctatctagtgactggtcacctaaggagcacccccacgcacttatcgatacacacgaatatcaatgtccgatagtttagttagcacaccactaggcgaagcgcgccggcaaataaaattgttttcatagcctttccaaacaaatccggaacaatggcgatgcagaagttcttcagcgtgctgctgccggatgtgaagcgggagctgcgccgcgggatcatcgagtgctccaagcggggcctcctgcacagcaccaagtggctggcggaaatgcatcacggactggccgatgtgcacatagacaatgaggcgcctgatgaggatcgcacattcagcgagtgtcagctggaggggattgcgccggaggagtacagcgactacttcctggccaagagctactacgacgtgagggagtacgacagggcggcgcatgcggtcaggaactgcgagtccagtgttccgcgcttcctgcacttctattccagctacatggccagggaaaagcggcgactggactcgaccacggaccaggcgaatctgcacgaaccgaatcagatgcgcgatctcgccgacctgctggctacgttgcgcatggaatacggcaaaagtcggctcgatggctacggaatatacttatacggagtagtcctgaaagcactgaatctcaaccaggccgccgagcaaatgctggtccaggccatcagactggtacccatgctgtggagcgcctatctgaagctctcgcccctcatcatgaagaagaagaaactgctgagcctgcagctgggtggtcactggatgcggcacttcttcatggcgcacacttacctggagctgtacctcaacgacgacggcctgaagatctacgaggacctgcaggcatcgggtttcagcaagagcatctacttgattgcccagatggctctggtctatcacaataagcgggatgtggacaaggcgattgagctgtaccaggcgcttctcgagagcgatccctaccgcctggacaatgtggacacctattccaatctgctgttcgtcaaggagatgaaaaccgaaatggcacagttggcccacaaggctgtcagcatcaacaagtaccgcccggagacgtgttgtgtaataggttaggctctgctttgctttaatgttatagcttaccataatacacgcttttccatcaggcaactactacagtatccgctgtgatcaccaggtggccatttcctactttcaacgcgccctgaaactgaatcccaagtatctggcggcctggaccttgatgggacacgagttcatggagctgaaaaacacaaatgcagccatacagagctaccgaaaggcagtggaggtcaacaagcgggactatcgcgcctggtatggactgggccaggcctacgagatcattaaaatgcactactacagcctgtactactttaaaatcgcccaccaactgcgtccctacgactctcgaatgctggttgccttgggcgagacctatgagaagctggacaagtgcgaaaatgctgtgaagtgctactggaaggccatcgatgtgggtgacatagagggcatagcgatgtacaaactggccaatctgcacgagaagctcggcgaccacgagacggcggtccattgctacatcatgtactgcgaggatgagcgggcggccaccgataagcagagcctctaccaagggttcatcacgctggccaattattacgagaagaagggcgagtacgaacgagccgcctattacgcttacaaatgcctagactcagaggatgtgggtgcattgttttaggaaatttgtaatgaatttaacgaaaacactcaatctttttagcgcaaaatggaggcaaaggcgctgctgaagacgattgactggaagcgcaatgctgagggacagaagaaggtaaaaacttcgacggccgtggcgaatgcagataccagttccgaggacgagatggagtgggagctccaggatgtgcgagttcgagttcccatcacatccatagccaccacgactacctccacgaccaccgtagctgcggagagcgcctcgagtagctccctgatcagcttgcgtccggaccgaaacctgattcagggcatgcgtcgatcccagtcgagcaggactagcttaaccgcgcctgccagcggcaccaccaccacgccatcggcaactgctgtcacaatgtccaccgaggaaacgcctggcacatccggtggcccttcgaatccgcccgagcaggcgccctcggatgataacagctccatggaaatatccagcgtatccatcgattagtcaaatgcgttccaattgtataaatttctatttgtttttatgaattatattggcaatccaagtaaataatgaactagtcctattcaccattgccaggtccaaaacgtcatccttctccatcatagttaatgaaaatatagtatttcacaaaactactaaatactccatattaatcgaatgtgcaaacaggatcttcaattcaaaaaactttagtatggcttataatttttgtgatcttaaactgagtgtttcataatttgttccttggtttaagaataccaaatatttgattaatctggccttgctcggctgttatataatatgaatccccatagtggagcgattcagtatgggtaaaagtaatctcgcttcagaaatcttggatccatcgtgctatgatggctgcttccttatcgcgggcatcgcgcacagaaggtggatcggccggatcgctgtggcgcaagtccaagtgatgggctccctcgggcaggatgatgacgaagaccttgtcgttgggagcctgaagcacaccgccaccgctccagggatccagaagaccgttgctgaagatgatgttggtcgcagcctccaggtttctgccgccatagcgcagaatgatgtcgtatggcttgggggtgagacggtagttcttgtagcacttttccgcgtaatccttgaagttccagctggacgtgcggaacatggtttcggagccattggagcagatgggcatcaccatctggttgcagctctggatattccaaccggagtcatcggcgttggagttgacggatatatcgaggcacttggcggactgtgtgtagttggtgtagacagccaaagcgctggacatggcgtgcagcaaatcggcgtcggtggaatgcagctccttcaggtagtagcacacctgcctcacgggataggcaggtaatggggccaggaaactgctgttgtacgggtaattgaccatggcgagattgctgtacacctcctccacgta

SEQ ID NO: 4271 - DNA, 2045 bp, DROSOPHILA
ccggaacaatggcgatgcagaagttcttcagcgtgctgctgccggatgtgaagcgggagctgcgccgcgggatcatcgagtgctccaagcggggcctcctgcacagcaccaagtggctggcggaaatgcatcacggactggccgatgtgcacatagacaatgaggcgcctgatgaggatcgcacattcagcgagtgtcagctggaggggattgcgccggaggagtacagcgactacttcctggccaagagctactacgacgtgagggagtacgacagggcggcgcatgcggtcaggaactgcgagtccagtgttccgcgcttcctgcacttctattccagctacatggccagggaaaagcggcgactggactcgaccacggaccaggcgaatctgcacgaaccgaatcagatgcgcgatctcgccgacctgctggctacgttgcgcatggaatacggcaaaagtcggctcgatggctacggaatatacttatacggagtagtcctgaaagcactgaatctcaaccaggccgccgagcaaatgctggtccaggccatcagactggtacccatgctgtggagcgcctatctgaagctctcgcccctcatcatgaagaagaagaaactgctgagcctgcagctgggtggtcactggatgcggcacttcttcatggcgcacacttacctggagctgtacctcaacgacgacggcctgaagatctacgaggacctgcaggcatcgggtttcagcaagagcatctacttgattgcccagatggctctggtctatcacaataagcgggatgtggacaaggcgattgagctgtaccaggcgcttctcgagagcgatccctaccgcctggacaatgtggacacctattccaatctgctgttcgtcaaggagatgaaaaccgaaatggcacagttggcccacaaggctgtcagcatcaacaagtaccgcccggagacgtgttgtgtaataggcaactactacagtatccgctgtgatcaccaggtggccatttcctactttcaacgcgccctgaaactgaatcccaagtatctggcggcctggaccttgatgggacacgagttcatggagctgaaaaacacaaatgcagccatacagagctaccgaaaggcagtggaggtcaacaagcgggactatcgcgcctggtatggactgggccaggcctacgagatcattaaaatgcactactacagcctgtactactttaaaatcgcccaccaactgcgtccctacgactctcgaatgctggttgccttgggcgagacctatgagaagctggacaagtgcgaaaatgctgtgaagtgctactggaaggccatcgatgtgggtgacatagagggcatagcgatgtacaaactggccaatctgcacgagaagctcggcgaccacgagacggcggtccattgctacatcatgtactgcgaggatgagcgggcggccaccgataagcagagcctctaccaagggttcatcacgctggccaattattacgagaagaagggcgagtacgaacgagccgcctattacgcttacaaatgcctagactcagaggatcgcaaaatggaggcaaaggcgctgctgaagacgattgactggaagcgcaatgctgagggacagaagaaggtaaaaacttcgacggccgtggcgaatgcagataccagttccgaggacgagatggagtgggagctccaggatgtgcgagttcgagttcccatcacatccatagccaccacgactacctccacgaccaccgtagctgcggagagcgcctcgagtagctccctgatcagcttgcgtccggaccgaaacctgattcagggcatgcgtcgatcccagtcgagcaggactagcttaaccgcgcctgccagcggcaccaccaccacgccatcggcaactgctgtcacaatgtccaccgaggaaacgcctggcacatccggtggcccttcgaatccgcccgagcaggcgccctcggatgataacagctccatggaaatatccagcgtatccatcgattag

SEQ ID NO: 4272 - protein, 676 aa, DROSOPHILA
MQKFFSVLLPDVKRELRRGIIECSKRGLLHSTKWLAEMHHGLADVHIDNEAPDEDRTFSECQLEGIAPEEYSDYFLAKSYYDVREYDRAAHAVRNCESSVPRFLHFYSSYMAREKRRLDSTTDQANLHEPNQMRDLADLLATLRMEYGKSRLDGYGIYLYGVVLKALNLNQAAEQMLVQAIRLVPMLWSAYLKLSPLIMKKKKLLSLQLGGHWMRHFFMAHTYLELYLNDDGLKIYEDLQASGFSKSIYLIAQMALVYHNKRDVDKAIELYQALLESDPYRLDNVDTYSNLLFVKEMKTEMAQLAHKAVSINKYRPETCCVIGNYYSIRCDHQVAISYFQRALKLNPKYLAAWTLMGHEFMELKNTNAAIQSYRKAVEVNKRDYRAWYGLGQAYEIIKMHYYSLYYFKIAHQLRPYDSRMLVALGETYEKLDKCENAVKCYWKAIDVGDIEGIAMYKLANLHEKLGDHETAVHCYIMYCEDERAATDKQSLYQGFITLANYYEKKGEYERAAYYAYKCLDSEDRKMEAKALLKTIDWKRNAEGQKKVKTSTAVANADTSSEDEMEWELQDVRVRVPITSIATTTTSTTTVAAESASSSSLISLRPDRNLIQGMRRSQSSRTSLTAPASGTTTTPSATAVTMSTEETPGTSGGPSNPPEQAPSDDNSSMEISSVSID

SEQ ID NO: 4273 - DNA, 4320 bp, DROSOPHILA
cgcagatgtgtctcaatattggaaaacaactggagttcattgtgctgccggagtcgaaacagaatcggatttgggatagactatacgataaaaacgacttgttttaggtgggggagtttgtatgcatgtatattttgtaaataaatagcagctgggtatcgccaatgaagattttaaaaacaattttaattaataattgaataaaatttgaaatattcatgtttgctgtcaacatagccctacaaatatcgcttaacgtgctgtaatcgaaaatgaaactaaacttacatttcaacgttggccataggctaaacaaggcctagaaaaatatattttaaaaaattgtatacatgttgcttaagcaatatatgcaatataaatggttttatctagataaatacaactggtttggggctaccattaatcacaacgcgaaaagcaattcgcctttgccaaggtagttttccatgaaatgaccttaaacttgatcttcgcaatgactcgactatgtttgctgtttataatgagagataaatgccagtggcaactaaagcaatgttcaatggcaagattaggttaaaaataaggttttcttctgccaataattttacaaaaaaacgtcaatttacctcacaaataagtcgccaatctctaatttctatttataaatggggacattttcaaaaacttgcacgacccacaaccaaaatacttccttatctataaacacaaaagtgcaaaatttataaatagaaatttgtttgtgattattttgagaagtcttgaatgacggtctttattataataagaagtcatttcaatatgtatattgttgccaaaagactaatatgagtgatatatatctatatttattcattattaagacaagtgataaattggaatttaaagaagatatttgggaataagacatttaccctcaaatggtaacttcgtagaacatctggagcacttatattaaccttagaattagatttgagaactagaagagcgactccctgggataaaatgtatcccaaacggctaggcaatcggactccggcaaatctcgcatctcaagatcgtggctaatgttgaagcacttctccacggcattttctttaagctggacggcttcccatttggcagatcccagttctgggcaatttggattcccactggaggcaaacgacgtccacatgccaaccattctctcaatggttttgtattccatcgatgacttatccagtttggaggctatgatgttgtagaacaggtatgatagttcatccgcatgggctactccgcgaatccgatcgccgcacaccagtcggcgaaattgattgaagtgcggggagtcgaagtcaaaacgatatagataggtgggcgttttgggggcataagattgacgggcgagaataaagcgatgcgtatcgtgccaaatctggcgatgcgaaaatatattcagggcctcgaacatctccatcgattcctgcatctcgttgttgaagtagagttgctttagtcgccgcaccagtagatcctgcccttccagactgctcgtttctctaacctcccttggcaggatgttgtgaaagtttttcaaggcccaaggatcttttcttactagttggtaggaaaacaagccctcgaaagaatttccaccgacaataacgggaatgtcgttgccccacgcttcggacaacagatccttgtgccttttgggcaccacacagtggtcggtttcgtagggttctatcacaggaccaaatgcgaatagtaggaagcttcgcacctcgtccaaattgataacgtcctgatcaatagccgctatctggcgtgcgcaaaccttactaagaaagcttagtacatccgcatccttctcgtcgcccttgtagcccagattctgggccagccggaatgcccaattgttatccggactctccacccattcgctgagggcacatcccgattgcatgatagccttatggaagagaccacgtgtttgctctgtggtcatcatgacgtggacagaagccgatcctgcactttctcccatcaatgtgatgttgttggggtcgccattgaagtgggcgatgttctgacttatccaacgcagagccattacttggtccttaagtcccgcattgccaggaacatccagcttcgggtcctttagactgagaaatcctgaaaggaagacaggttacataaatattttattttatattttattataagatgttaaaaaaatgtgtattgaccactttagtatgtttcttagaacataccgtaataggaataattttgtatacttttattcttacctattaaattaataaaattggttattgtcaatgcttataaaaagtatatatattgtaggaacattttcttctattcctagtttacatgcgaatgattaggcgccttatcaaaaatgtgctatttctctcattcgaatacaataactacaagtactgtgtacattagtccaatagacttacatacatatatttctgtcatatttaatactttaattttccggcttttgtttgtatggaaattgattccttacctagtgctgccaacctgtagttgatagcgacgaataccactggcttcttcatgaagtaatccggactgtaaatatccctggaggcctcacccttttggaaaccacctccgtaaatccacacaattacgggcagcggtttttccgacttcaaggctttgacataaacgttcaaatgcaaacaatcctcactgccctcgacaattcccaggagcatgttcctctgcatgggcttggatcgattggtagtgcagttgagcactccttgccagggttccggtggctgaggagccctgaatcggaggtcacccacggggggcttggcgtacggaatgccctcgaaggcaaagtacggctccttgtcgtagaccgtcttcctttggagtccgcgcacctgtccgtacttggtgtccaaaatcactgtgtgacccgtggagagccggtactgttgcaccttgtggccaaccaacctgagtgagagattgaatcagatcggggataatagtagacagactgactgattggggacaaagaacaaggtccgaaggtaacgattgccaataatcacgacattgaccatgcactcttggcctgtaatctaattactcactgggctcccatcttgatcagctttggccatcccacttgcacctccatgatttggttcttttctatttgctaggattatattcgggatctactaatattttgtttcgagggcttcgctgtatttctggtccgagcgaataatgccgtgcgactaatcggagaaattcggtgatagcaccttaaatcaggagagacgccgacagcatttgattacattttaatactcaaaagtattttgccggatgatcattatcaagcacaccataggtcagcaaaataggtaactgcctgacaacatacatacttcaaatgatagacatatcttattggcagcgaataataataattacatgcataaaatatatatatatatatatattatatatatatataaaatatataaaagttaataaaataatttaacatatttttaatttgtgaaagtataacgtggtcctccactgtaaaagatagtgcgcattaattataaaggaaattgtacattgtaagctaataatacatgcatttgaaatatatattttgaattatttgtaaaagtaaattaaaaaaaaaaattattaaaaaactagtgagattttcaatggagtagctaataatttaaacaacctatttatttgatattttatatatacaaagtttgtaaaagagttagaagacgaagattcatttcaacaaaatcagatagcgaaaaactccatctggcttatttaatcggtagtgtagctgaaatagcctcaattaattatgaattttcaaaaggctattacacgaatataaaatttcttgaagctgcggcataactttgaatttgatcaaataaacttaaaccgaatgctcaaagctgcataaaatgtcaactaaacttcttttgataggtagcacaccaatgcactttttgcctcgatttacgtgttatttggtcataattgctatccattccacttagtgcaattcggatgttatatgtgttcttgtggttttgaaattcgaagaactttttccgagtttgttggattggtcaaagtttccgtgatactgattccgattgtatctcgaggcagaactgagaaatgcaagatctaattttctttgaaattcaacagccttgtaaataaata

SEQ ID NO: 4274 - DNA, 1792 bp, DROSOPHILA
attcgctcggaccagaaatacagcgaagccctcgaaacaaaatattagtagatcccgaatataatcctagcaaatagaaaagaaccaaatcatggaggtgcaagtgggatggccaaagctgatcaagatgggagcccagttggttggccacaaggtgcaacagtaccggctctccacgggtcacacagtgattttggacaccaagtacggacaggtgcgcggactccaaaggaagacggtctacgacaaggagccgtactttgccttcgagggcattccgtacgccaagccccccgtgggtgacctccgattcagggctcctcagccaccggaaccctggcaaggagtgctcaactgcactaccaatcgatccaagcccatgcagaggaacatgctcctgggaattgtcgagggcagtgaggattgtttgcatttgaacgtttatgtcaaagccttgaagtcggaaaaaccgctgcccgtaattgtgtggatttacggaggtggtttccaaaagggtgaggcctccagggatatttacagtccggattacttcatgaagaagccagtggtattcgtcgctatcaactacaggttggcagcactaggatttctcagtctaaaggacccgaagctggatgttcctggcaatgcgggacttaaggaccaagtaatggctctgcgttggataagtcagaacatcgcccacttcaatggcgaccccaacaacatcacattgatgggagaaagtgcaggatcggcttctgtccacgtcatgatgaccacagagcaaacacgtggtctcttccataaggctatcatgcaatcgggatgtgccctcagcgaatgggtggagagtccggataacaattgggcattccggctggcccagaatctgggctacaagggcgacgagaaggatgcggatgtactaagctttcttagtaaggtttgcgcacgccagatagcggctattgatcaggacgttatcaatttggacgaggtgcgaagcttcctactattcgcatttggtcctgtgatagaaccctacgaaaccgaccactgtgtggtgcccaaaaggcacaaggatctgttgtccgaagcgtggggcaacgacattcccgttattgtcggtggaaattctttcgagggcttgttttcctaccaactagtaagaaaagatccttgggccttgaaaaactttcacaacatcctgccaagggaggttagagaaacgagcagtctggaagggcaggatctactggtgcggcgactaaagcaactctacttcaacaacgagatgcaggaatcgatggagatgttcgaggccctgaatatattttcgcatcgccagatttggcacgatacgcatcgctttattctcgcccgtcaatcttatgcccccaaaacgcccacctatctatatcgttttgacttcgactccccgcacttcaatcaatttcgccgactggtgtgcggcgatcggattcgcggagtagcccatgcggatgaactatcatacctgttctacaacatcatagcctccaaactggataagtcatcgatggaatacaaaaccattgagagaatggttggcatgtggacgtcgtttgcctccagtgggaatccaaattgcccagaactgggatctgccaaatgggaagccgtccagcttaaagaaaatgccgtggagaagtgcttcaacattagccacgatcttgagatgcgagatttgccggagtccgattgcctagccgtttgggatacattttatcccagggagtcgctcttctag

SEQ ID NO: 4275 - protein, 554 aa, DROSOPHILA
MGAQLVGHKVQQYRLSTGHTVILDTKYGQVRGLQRKTVYDKEPYFAFEGIPYAKPPVGDLRFRAPQPPEPWQGVLNCTTNRSKPMQRNMLLGIVEGSEDCLHLNVYVKALKSEKPLPVIVWIYGGGFQKGEASRDIYSPDYFMKKPVVFVAINYRLAALGFLSLKDPKLDVPGNAGLKDQVMALRWISQNIAHFNGDPNNITLMGESAGSASVHVMMTTEQTRGLFHKAIMQSGCALSEWVESPDNNWAFRLAQNLGYKGDEKDADVLSFLSKVCARQIAAIDQDVINLDEVRSFLLFAFGPVIEPYETDHCVVPKRHKDLLSEAWGNDIPVIVGGNSFEGLFSYQLVRKDPWALKNFHNILPREVRETSSLEGQDLLVRRLKQLYFNNEMQESMEMFEALNIFSHRQIWHDTHRFILARQSYAPKTPTYLYRFDFDSPHFNQFRRLVCGDRIRGVAHADELSYLFYNIIASKLDKSSMEYKTIERMVGMWTSFASSGNPNCPELGSAKWEAVQLKENAVEKCFNISHDLEMRDLPESDCLAVWDTFYPRESLF

SEQ ID NO: 4276 - DNA, 4099 bp, DROSOPHILA
aaatgatcaagaaaatattcggagtattttatatttcatccagattaaagtgggattaccttataagtaataattaatgtgatgtgcgcatcaggtaatgtaatcatcttgtctacaaatcgttgatatcatgtcagcccgccgacgctgggattgtgaagaacggcatgtcgtagaactgccagaccttggccttggacttgtccacctggtagcggatacagcgcttgcggaaggtgccctcctggtactgcttgcatccggtggtgggatgtccgttggcaaagcacctgctcctgctgccatagtagatacgacccagagttttggccgtgatgctgttcactgcctgcaggcaattgataaactgctgctcgcaggtgcacttgaggctaaattgaaaagtgtctgtcaatgtgcacaaaatcgataagggactttaggaggtttaccgcttacatgggaaaccagtctgtgttggtgggcagtccgtggagtgctccgtgggactcgataatctcgtcgcaatggtcgtgggcacgacagcacttgtccgtctcccgttcgcggcccaaatcctcgaagttcgccgccgtgttgcccggtccgcaccacttggttccgggcaccgtgatgcccgtatggggaactggtggcagtgcctggttgtagatgtcctcgtcctcaaagatagcctcgtcgccgaaggcccaagccatggccagtagcccaaaaaagaacgcttcgcgcagcagccacatgtctcagcttcggcagtcgcagcacaactaagtttgatttcgttgacttgagctgcctttgctcgagctgataaggcggcaaacaacaaatgaagcaagcaagatgtactttagtaactccaaaattaattcttgaggtctaataaacagcggatactcctagttaagaataattcgcatttccaactgacctctaacaatagtttagataaggtttattagtttaaacaatctatatactagctaagtatgtccttaaaagcttcgacagctgtcttggccgttttccgcttcgtctcctttgtctgctcggcgtccagatgcttggacaaactttcctgccattgcgtaggtgaaagcttgtacgtgtccaggcggtattttgtgtagatgatccgaccgtgtggtgagcccttcagcatattggccttggaaaacagttccttggccatgcgcagtttctgcgcatcttgggcggccttaaagcactgttcgaagacgcgggaaccatgtcgagtgatggccaagtctacgtagaagccatccaactggcggatcagacgctcgcgggacttctcgccgatgaacttgctctgcatgaaggcgtcaacgatgtgtgagccattgggtgtgttgaagacctgagccagttgggtggcgggcagatcgaggatacagttgaccagaaagattggcttgttgaactgcagcaggtgttgagtaataagcgaaccgtgcagatgaacaaaggccgactcgtcgccggtcaccacctcaaagggctttaacttaatcaaacatgtaaggaaaagcttcgatttctccttgtcgccactgacatggagggcactctgcaaagcggctatcatctgagactgcttggtggccagtcgcaagcaggcggcactgagggcggacacgacgccggtgtatcccattttcagcagctcctccacatgcggctggagttcggtgaaaacggactcgaaatcaggcacctctttgatgtgctgaaggagacgctggactgaaaagttcgttcctggctgccgagctaggtaacctattcggttgcagaagagcatcgcatacagctggatcatcaatttggctcccgctacgctcataatcgtttcgagcagaatgactgagctttgatgatggaaaactttgggtagttttggctcttcctgcttgttctcagtgtcggcatctgcttctttcgccttcttatcctccttttcatcattatcatcatcctcgtccttgatttcgattttggtgtccaattccattttctcctcgtcctcgtcgctcgacttcagcagaccgatcgtcaggattttcttggcaaaatgcttgagcatacttttgtccacgacactgagggccaaacagatgacgcccagcagacttgaagagtgatcctggtagggaaagtcgccgaactggggccacatctccaggcgctgggggaactccttcatgacctcctgccactcatccggcacagagtacatcttcctatgcttggctatctcagtcccacctttctcgaaggcgattttgggaacgtgcatgcccaccaggcacagaatggctgtgcgcatgatgtggctggcacaggcgtcccaaacgaagtcctccagattgttcaacatgaactttgatatgcgaagaacgaactgccggcacttctcgcggtgatcatctgtgaagtccgcctgcaggttgtactcctcctcctcttgagcggcatccggcttagcttttttgttggcgctagctgcatcgctggtatcctgggctgcagattttcccactccgcgcaaaaaggcgatttccagcattttctgcaggacgtgcgaggcaaaccgatcggagcacatgggccggaggttgtcgccaaacttgctaaaaaagcgctccaactgcacgtcgtccacgaagcccactaacgactccagagccttggacacgatctgattggaggccagatggatctcctgatcgtgggtctgctcgaacacattgttggccatgatgactacagggataaagggtgttggtaaggcaatctccaggtgatgttcgccaccactcacctcgctcctctacgtcctcgaatcccactttcatagcatccagaatgttgatgaagtagttgaactgctcgtcgtcgatgtgcgtaccccggccgaatatcccctgcttggcgaaccccttggcgttccgcataaagcggttgcccttcttcttgggccgctttcgccttgagtcgccttcggcctgcattcctcttcaatataataattaaaactaaattctacttccaacgtgcgccagaacacgctgtaaaaataaaataccaagccaaaggaaatataccatttttataaagagaaaggtcatactgctttcaagaatatcgatttatttggcgatgaatcgatcattttagatgttagcggtcgaatttaaatctgcattctttttaccttcgtgaaaagaaatgcaacaaaaggcgacttcaatatgcaaagaatcacaagttcctattaagttatggaaggtaaactgttatgtagaatgacgttatagaagctttacaaatcatcaaaatgtttaaaatataaatattattaaaagccatttcgattttatttgatatgcaattatttgctattgcttttgctatctttacatacatcaatatgtaagtatttacatacttcttaatttgaaagccattatgttgtttgaaaacttgaagttgctagaagcacttcttagtctgctcatctgccaggcttacaaatccttcatggtcattaaatctgtcaaaagggcattgacagcaaaggattaggaaatattaatgggagaacaaaaaaacgcacatttgtggttggcatagtgccctttgaaggcgtttcgcagattttctttgagcggaaggacagtgcatttgtatttcaaaaccgttcaagatgaatgccctttgaatttggattttcttagaaaaagagcacacattatttccacatgtcaagccaaagaaactcgaaataaaggtgggaattaacatgcccctcattaaactcacatgggctgaagaagcaacactttacagtcgttaattaaattatcggcaaaaagccgccgccggataaaagaagtcaaaatattttgtaaccagagacgtgccatcaatctcgcccagacacgtgtgcaacgtcctcctcctccgcctggcaaccccagaatccgcaggataatgggggtggtgacgtctgcggagtgtaactacagtatcaataaacaaatcaaagagcagc

SEQ ID NO: 4277 - DNA, 2041 bp, DROSOPHILA
cgttggaagtagaatttagttttaattattatattgaagaggaatgcaggccgaaggcgactcaaggcgaaagcggcccaagaagaagggcaaccgctttatgcggaacgccaaggggttcgccaagcaggggatattcggccggggtacgcacatcgacgacgagcagttcaactacttcatcaacattctggatgctatgaaagtgggattcgaggacgtagaggagcgagtcatcatggccaacaatgtgttcgagcagacccacgatcaggagatccatctggcctccaatcagatcgtgtccaaggctctggagtcgttagtgggcttcgtggacgacgtgcagttggagcgcttttttagcaagtttggcgacaacctccggcccatgtgctccgatcggtttgcctcgcacgtcctgcagaaaatgctggaaatcgcctttttgcgcggagtgggaaaatctgcagcccaggataccagcgatgcagctagcgccaacaaaaaagctaagccggatgccgctcaagaggaggaggagtacaacctgcaggcggacttcacagatgatcaccgcgagaagtgccggcagttcgttcttcgcatatcaaagttcatgttgaacaatctggaggacttcgtttgggacgcctgtgccagccacatcatgcgcacagccattctgtgcctggtgggcatgcacgttcccaaaatcgccttcgagaaaggtgggactgagatagccaagcataggaagatgtactctgtgccggatgagtggcaggaggtcatgaaggagttcccccagcgcctggagatgtggccccagttcggcgactttccctaccaggatcactcttcaagtctgctgggcgtcatctgtttggccctcagtgtcgtggacaaaagtatgctcaagcattttgccaagaaaatcctgacgatcggtctgctgaagtcgagcgacgaggacgaggagaaaatggaattggacaccaaaatcgaaatcaaggacgaggatgatgataatgatgaaaaggaggataagaaggcgaaagaagcagatgccgacactgagaacaagcaggaagagccaaaactacccaaagttttccatcatcaaagctcagtcattctgctcgaaacgattatgagcgtagcgggagccaaattgatgatccagctgtatgcgatgctcttctgcaaccgaataggttacctagctcggcagccaggaacgaacttttcagtccagcgtctccttcagcacatcaaagaggtgcctgatttcgagtccgttttcaccgaactccagccgcatgtggaggagctgctgaaaatgggatacaccggcgtcgtgtccgccctcagtgccgcctgcttgcgactggccaccaagcagtctcagatgatagccgctttgcagagtgccctccatgtcagtggcgacaaggagaaatcgaagcttttccttacatgtttgattaagttaaagccctttgaggtggtgaccggcgacgagtcggcctttgttcatctgcacggttcgcttattactcaacacctgctgcagttcaacaagccaatctttctggtcaactgtatcctcgatctgcccgccacccaactggctcaggtcttcaacacacccaatggctcacacatcgttgacgccttcatgcagagcaagttcatcggcgagaagtcccgcgagcgtctgatccgccagttggatggcttctacgtagacttggccatcactcgacatggttcccgcgtcttcgaacagtgctttaaggccgcccaagatgcgcagaaactgcgcatggccaaggaactgttttccaaggccaatatgctgaagggctcaccacacggtcggatcatctacacaaaataccgcctggacacgtacaagctttcacctacgcaatggcaggaaagtttgtccaagcatctggacgccgagcagacaaaggagacgaagcggaaaacggccaagacagctgtcgaagcttttaaggacatacttagctag

SEQ ID NO: 4278 - protein, 665 aa, DROSOPHILA
MQAEGDSRRKRPKKKGNRFMRNAKGFAKQGIFGRGTHIDDEQFNYFINILDAMKVGFEDVEERVIMANNVFEQTHDQEIHLASNQIVSKALESLVGFVDDVQLERFFSKFGDNLRPMCSDRFASHVLQKMLEIAFLRGVGKSAAQDTSDAASANKKAKPDAAQEEEEYNLQADFTDDHREKCRQFVLRISKFMLNNLEDFVWDACASHIMRTAILCLVGMHVPKIAFEKGGTEIAKHRKMYSVPDEWQEVMKEFPQRLEMWPQFGDFPYQDHSSSLLGVICLALSVVDKSMLKHFAKKILTIGLLKSSDEDEEKMELDTKIEIKDEDDDNDEKEDKKAKEADADTENKQEEPKLPKVFHHQSSVILLETIMSVAGAKLMIQLYAMLFCNRIGYLARQPGTNFSVQRLLQHIKEVPDFESVFTELQPHVEELLKMGYTGVVSALSAACLRLATKQSQMIAALQSALHVSGDKEKSKLFLTCLIKLKPFEVVTGDESAFVHLHGSLITQHLLQFNKPIFLVNCILDLPATQLAQVFNTPNGSHIVDAFMQSKFIGEKSRERLIRQLDGFYVDLAITRHGSRVFEQCFKAAQDAQKLRMAKELFSKANMLKGSPHGRIIYTKYRLDTYKLSPTQWQESLSKHLDAEQTKETKRKTAKTAVEAFKDILS

SEQ ID NO: 4279 - DNA, 3825 bp, DROSOPHILA
cattgcgatttgccctatttactttaaatgaaggagaggtataccttcttttccgggtcactccatgtctaaccttttcgtatttcggactcgtccacaggcaagtgtttccggcagcgagtctctttccttgtccacacgcgcatccacacgggagtgatgccctacaagtgcgagctctgccaaaagacgttcaggtacaaggtcagtcaaaggacccatcgatgtcccaccgaggaggcccagacaccggagcagctgataaaggcgttcctggagggcaacgactcgcatactcagccttcaccagcgagcgccgaaatagctgccatcaacagcagctccattgtggatcctgagcaggaggcactgctttcgcagtcaatcgacgacattgtcgttgagcagtgccaaaagctgggcatctgtggtgtggagccgcgggaggagggacagctcatatccctacagccggttgcggtggtacacttcagcgggaatggctctccgctgcagcaactccagaacttgagaatctactcaccgcaacaaacagagctacctagttccgatggcgaagtcttccagcgctttttgatggacgccacgtagttggaacgaagatgcatatatccacttaatttatacccttttatatcattttacattgtttgcacttccccaaaggcgatctaatcaattcctaagcaccccctaagaaaaacgtcttaattacatcttcttatgaggatattatttgaatcttagttgttttatctcagccaagtgtaaatcgactaggacccgacttgtttgcaatacaacaacaacatctaatataaattatgttaaactgccgattttatttaaaactattctgggcaacgaacccgagcgctgagttgaggcgaaaatgatattaaatcgagttagttcagttttcaaatgtacttggttgattataaacttatttattatgaacgccgttttttgtaattaatcattcatctgaggcgcttccagagctggatcctgaaccagaaggcgagccactgcgagaccggctgggcgatcgcgacccagagccagatctggagcccgaacgtgatcgggaaccggacttggatctcgacctagaacgcgaccgagagccggacttggaacgggatcgggaacgtgataccgatctcgatctggatccggatttctgggatcctgccggcgaatttgtgcgtgatctggagccgctaccagaccgagaaccagactttgagcggctgctggcccgagagccggagccagatccagatcctgaactggacccgctgcgagttcgactccgagaacgagactgtcgatcgcgggctacctgggcgggtgagtccgctccagatgctgcctgtgcgccaacagctgcgtcctcgctcgtcttctccgtctcgccaatgatttgcatttgctcctcttccctcacttcttccacgatctcctcctcctcgccaggaacttctagctggcgctcgcgatagcgctgcatacgatgctccatgctgtccaatggacgatgcttgacaacctggtagaaataatacaaagtaaagctcgctatagatgtatgcgcataaatatacttaccagcttggtgttgttgggttgctggccaaccttaacgcgacgcttgttaaggcgcacacgggtttctagctcgttgtagtagatgccgtcctgacgcatcacgaagaagtagttttcttcgtagcccttggaagctttggtcttcacgttccagttgtactctcgagcgatcttgtactcgtactcctcctcctccttgtacagctcgccattgatgaagtctgtacggcgtttctccagcgtctgctctgtgggcaggaagtaggcgacaaactgttcgccgctctcgtccatcacaccacgaatcatggcctgcgacatctcctccagctgggcgggcacgttcttgcccgcaggagcgggatcactgtcaaatatgacctgggcgcacgggaacttccagttggtgaagtcggggaagataggcagtacctccactggcaccacattgggcttggaatagtgcttggtaatttcgctcttggtgtcgctgaaggtcttctcgatggctttgatctgggcttcgcggtccaggtagagagtctcctcccgaagcgacttcttgacgttgtaaccgaccttggcctcgatgttctccaggttctggggctggaagcgcgtctgctcggtggagatgtactcggatttgcgcaaccatgacaccgtcctcgaatgctggcgcgaacgcacagagtctgtgggcgtcagagtctcctcctccagcagtttttcatcggcggggtccagcagcgtcatggagtcggcctgatagagctcccggttaatcaggtccaccgtgacacccaaatcgtgttccgtcagcacgtcatacttgaagttacgctctagcgacgttgggttgtactgcacgaagcggtggctgtcgaaggggtactgcagaaacttcagatcaaatggtatatccggcaggttgtttccatacttcacgcggcaaatgatctcggatctgcaaggtacacatcagtctgagtatctggcgtctgtttagggatctgttcacttacttgcgctccgtttgccgctggggtcgcttttcggcggcactgtttaccgccgaattgttgatcgtgggtggcattgtgtcttccaacaggtaattcaactcaagccccagttttggtagcgcttctagtccatcaagaggccaaatctagaaatcctcaaatctgcgcttggcagtgtgaccgtacttgaccggtacgataataccttcggtaaaaaaaatactatatttccggggactcaaatgcaacatcctcatcgtatataacacaacatctatttgaatttcatttccacaactaatattatggataatgctttattatcattttccaagttagcgataaatcaccccacaagctgaaaaatcaacgtttaaaaacgattgatattttttttaatactttttggttttactatttgaatttttgtatacttttagattttactattttaatttttcgtttcttctagctgactaacgggtaaaaaaggatccgatcctgattacgaacggctaccagaaatgattagtatataaatgatatatgtatataaagtactggataatagaaaagctcccacaatgctcccaaaaatgctctcagtgtttgttcgaatttatcgccccatcatccataagccatctaatttccaataagtcacagatcattatcgctgtttattttcattttctttcaataatatccaatctatatctgtctgtaacgaaacatgtctagtttccttttggttattttcattttattggcgcttagaacgtcagagtcttctgaaactggaaacccacttgcaaacgagcccgatccattatatatgaaactggtggatcccatggtagcaggagaatcacctaaaaggatgattaaggatcagaaagatgtaggccttaaatcaactagcagtagcgaagagctccgaaaattgccaaaaacgcgaggtcgacagaagagattcattcggaatccaaactatgtgaaagctaacgaattctatgataagatgttaagcagtgaatacgtaagtaagcggtataaggatcttccgccgcctcatccgggatttggagcggatcaaccgccagcatgaacagtgaataaccagtggaatctgtgaaattttcctgttggccattcacattatacg

SEQ ID NO: 4280 - DNA, 1708 bp, DROSOPHILA
cagatttgaggatttctagatttggcctcttgatggactagaagcgctaccaaaactggggcttgagttgaattacctgttggaagacacaatgccacccacgatcaacaattcggcggtaaacagtgccgccgaaaagcgaccccagcggcaaacggagcgcaaatccgagatcatttgccgcgtgaagtatggaaacaacctgccggatataccatttgatctgaagtttctgcagtaccccttcgacagccaccgcttcgtgcagtacaacccaacgtcgctagagcgtaacttcaagtatgacgtgctgacggaacacgatttgggtgtcacggtggacctgattaaccgggagctctatcaggccgactccatgacgctgctggaccccgccgatgaaaaactgctggaggaggagactctgacgcccacagactctgtgcgttcgcgccagcattcgaggacggtgtcatggttgcgcaaatccgagtacatctccaccgagcagacgcgcttccagccccagaacctggagaacatcgaggccaaggtcggttacaacgtcaagaagtcgcttcgggaggagactctctacctggaccgcgaagcccagatcaaagccatcgagaagaccttcagcgacaccaagagcgaaattaccaagcactattccaagcccaatgtggtgccagtggaggtactgcctatcttccccgacttcaccaactggaagttcccgtgcgcccaggtcatatttgacagtgatcccgctcctgcgggcaagaacgtgcccgcccagctggaggagatgtcgcaggccatgattcgtggtgtgatggacgagagcggcgaacagtttgtcgcctacttcctgcccacagagcagacgctggagaaacgccgtacagacttcatcaatggcgagctgtacaaggaggaggaggagtacgagtacaagatcgctcgagagtacaactggaacgtgaagaccaaagcttccaagggctacgaagaaaactacttcttcgtgatgcgtcaggacggcatctactacaacgagctagaaacccgtgtgcgccttaacaagcgtcgcgttaaggttggccagcaacccaacaacaccaagctggttgtcaagcatcgtccattggacagcatggagcatcgtatgcagcgctatcgcgagcgccagctagaagttcctggcgaggaggaggagatcgtggaagaagtgagggaagaggagcaaatgcaaatcattggcgagacggagaagacgagcgaggacgcagctgttggcgcacaggcagcatctggagcggactcacccgcccaggtagcccgcgatcgacagtctcgttctcggagtcgaactcgcagcgggtccagttcaggatctggatctggctccggctctcgggccagcagccgctcaaagtctggttctcggtctggtagcggctccagatcacgcacaaattcgccggcaggatcccagaaatccggatccagatcgagatcggtatcacgttcccgatcccgttccaagtccggctctcggtcgcgttctaggtcgagatccaagtccggttcccgatcacgttcgggctccagatctggctctgggtcgcgatcgcccagccggtctcgcagtggctcgccttctggttcaggatccagctctggaagcgcctcagatgaatga

SEQ ID NO: 4281 - protein, 538 aa, DROSOPHILA
MPPTINNSAVNSAAEKRPQRQTERKSEIICRVKYGNNLPDIPFDLKFLQYPFDSHRFVQYNPTSLERNFKYDVLTEHDLGVTVDLINRELYQADSMTLLDPADEKLLEEETLTPTDSVRSRQHSRTVSWLRKSEYISTEQTRFQPQNLENIEAKVGYNVKKSLREETLYLDREAQIKAIEKTFSDTKSEITKHYSKPNVVPVEVLPIFPDFTNWKFPCAQVIFDSDPAPAGKNVPAQLEEMSQAMIRGVMDESGEQFVAYFLPTEQTLEKRRTDFINGELYKEEEEYEYKIAREYNWNVKTKASKGYEENYFFVMRQDGIYYNELETRVRLNKRRVKVGQQPNNTKLVVKHRPLDSMEHRMQRYRERQLEVPGEEEEIVEEVREEEQMQIIGETEKTSEDAAVGAQAASGADSPAQVARDRQSRSRSRTRSGSSSGSGSGSGSRASSRSKSGSRSGSGSRSRTNSPAGSQKSGSRSRSVSRSRSRSKSGSRSRSRSRSKSGSRSRSGSRSGSGSRSPSRSRSGSPSGSGSSSGSASDE

SEQ ID NO: 4282 - DNA, 4204 bp, DROSOPHILA
attgccaccggagtgattcgactgatacccaccgctcaatacttcccattgcgattccactgtctgcagaccctaatttcactggccaaagagacaaacacatatgtgccggtgcttccactcattgtggaggtattaaagagcaatacctttaaccgcaagcactcggcggtatccatgaagccagtgcagtttacctgcgtccttaggcttaacaaagggcagttggcggaaaatggcttccgcgatgaggtgatcgagcaggtgtgtgggcttctgttggaatatctcgctcatgagtccacctcgctggcctttagtgatttggtggtgcccactgtcatggccatcaaaacgtaccttaaggaatgcaggaatgccaattatgctcgaaaacttaaacagctgctagagaagattcaggagagtgcccgcttcatagagcagcaacgtggcaagagcagtgtcacttttgacataaaggatgcgcaggcggtcgccgcctgggagcagcaactccgtcttaagcgcactccactagacgtctactatgccagctggctaaagacacacgagaccaagaagcgacgacaggcagcacatacagatgaaatcaatgcggactatgatgtgcccaagctaaagaaactaccggtcaaaaccggagtaccagtgagaaatgaaaacggcgaggtcgaactcttcccctcggactcggaagatgaaggcgatgatggcctgcatttgggatcagatgatgatgacgacgaggatgtacaggaggaggaggaggtggaagttgagcaccctaaagccaaaaaggcgaagaaagagaagcccgagaaacaaaaacctcggccagcaacagtggaagatgattacgacgaggcgggtggagccgtggatattgttaaggacttagatttgaacgaatggtaaaacatttaagatcaatttaactatatttacacattaaattaaaaggaaaaccaatatagagttacttctccggtggctccttgccaggaataaactcatactccttgtatttgggaaaggttccaatagttggtccgtccacctgcttgggcagtgccttgtcgtccttgcccttggcgtatgttgcttccaattcggcggcgttgcgtttcttcatgtccataatctgaagatttttcaccagctcttcgcgggtgggcggctcctcccggcgccctcgtagccacgcctcccattcggcagtcagctcctggtcgaaggcttccttatccgctggctcgaaccaccgggaaggcttcctctttccaatcgaaggatttgcaggaatttcgtagtacttattcccgaaatagtcctccccaatgtaatccccacgaaactgccgcggtcgtagggacttccaaaagttcttgaagatgatgccgatcacatcgcgcgtcggcttgttagccatgcttattttaacttaagagcgaggaacttaaatttattttagaatttgaggttaggtcttgcgtttgttatgacatgaacagctggtggcggtgttgcaaaatgccggcaggtttaaaagcgtaattcaaattcgtaaaattggtttcagtggcaatgcatagggactaaaccagtcccgcagaaaaattgccattaaatctgtacggagactattattgttgtattccatgtcctggagtactaatccaatgccagctgagtaagtaaaatgctctcccgaaaaactggaggtgcctataaaggcaaccctatcggtgactaagtacgagttgcagttaactctaccgccggaaatcctctccagttcatttgtggtgggtacaacaaaacgtcgctgcaagagcaaagaaattgttaataaaattgccaatacttataagctcattaccatttgtatatctactccttccgtaattttgtcgagcgcttgaagggacctcaagaagtgatcctcgctgggatccgaatacttccaccatgaaataagcaccttaatggccacaccgcgttccaaggcagctctacgcagggcattgtctatgaccggccagtactccaatttgttactccgtcttagccgaggagagtactccattaaggagaggtatataacgtctgtggccttgtcgatagcctctaaaatggcatctagctctcgggtccttccagtagcgatcaactctggtggtgatgtggataaataagctctcattgtatgttttttgttgatgtttagcaaaagcggtcttctttgattgatgtgcgtgtggtatatccacggccagctctttggcacttcattgctgcccaggtaccaatacgccttgaagatctttcccagatctagagcaagatggggacaatttctggccagcacacctagttccttgcgttgcgtcagtgatcgccagtccatgctagctgtgcccaagtagaagtgctccccgtccactaaccacagttttgagtgcagaaaattaatgcccacgacgtcggctgctccgtagttagccaagatacgggcatcagcatgccacaggctatcgtggctgcgattaaccacaatccgcacgcgcagcttgggtctgccggcatctccattcgacagtagctgctgaaagagttgatctccaggcccggtgctgctatcgttgacgtccaagccgcgcagtgtccagtgcggagaaacgatgtccaacgatgccttggccctgcctagtagtagctgccaggcatcaaaggtgctactcagttgggggtggctttgccattggctgtagttcaaccccaagggcaagctctccaccagttcgagttgacatggtaacggcttttccaccggaacggggctgtttccgttttcatttcgatggtaggtctcccaaggcaacagaagcacaatcatcaccagaacgaagagtataagcactggtatgatgtagccgtgcttgcaggaacagatatttcgctcatcctggagccctaggccgcaattgggacgccggcaacacgatgtggtcaaaggggttggctcttccggtgctctgggcactggctggtactctccgggtatctcatgcactacgcgacgctcggacatggcaaggggatcaggactaatgctgactggccattgtcaaacatttttcacagccgagcctatttattattcgcgcagttgtgggaaagtatcacccgcccacgcaaacaaatgggcagtgttggacagcacagcgcggtagtcgtctgcgctggctgctaaaaaaaagctaaaggataaattaatccaagtccctgctcagaaaaataagttgtcgtcagtgcattatttcagcatttacttcgatttaagttttaacgccatagagtccattaattctcttgaagttaataaatgtttatcgctttaattcaaaactgataaactttctatggtcctatttatttaacgacccaattttggcgggaaacaagccggcggaacattgctgacgcgtatgcgtgacgccagctaacactggtcgccgtggtaaagaatttagtctgtcttaaaatcttccggctgagagggctgaaaattttgacggcttcgaagcatttgctgcaatatcaatttcgtcgggtttatttcgagtatcgcttaatcaggacgcgaccatggctgcgagattgatgaacgcccaggcacaggtaggttctagagcggagcctgtgcctccagtcggccaatatataaccacggctatatatacgtttacgtatagaatctgtgaatggaaccccgaaattccaagctgcgataaagacaactggacagagcactgcgcgaaagtttacaaaaaatcattgcccatttcttacacacccagcaggatgtgggcagcgaaaaatagcaaatttttcgcacagcgttttctaacctaaaatcataaaattcgaagtggttaggtaaccgagttcgcagtgtttgtgattctacaggccctgcatcccaaacatgtatactgaatacgcagcagtgaaccatgcgaaatcgttagctctcaacaattaacagcgattcgtgggggttcgatggttggcatagttgcatttacataatcgccggggtccagttatttaaccaggaggcgaacaccctctagagcatatatcttgtggcggaggaccgtcttatctgtgacaggtt

SEQ ID NO: 4283 - DNA, 1814 bp, DROSOPHILA
ctttcccacaactgcgcgaataataaataggctcggctgtgaaaaatgtttgacaatggccagtcagcattagtcctgatccccttgccatgtccgagcgtcgcgtagtgcatgagatacccggagagtaccagccagtgcccagagcaccggaagagccaacccctttgaccacatcgtgttgccggcgtcccaattgcggcctagggctccaggatgagcgaaatatctgttcctgcaagcacggctacatcataccagtgcttatactcttcgttctggtgatgattgtgcttctgttgccttgggagacctaccatcgaaatgaaaacggaaacagccccgttccggtggaaaagccgttaccatgtcaactcgaactggtggagagcttgcccttggggttgaactacagccaatggcaaagccacccccaactgagtagcacctttgatgcctggcagctactactaggcagggccaaggcatcgttggacatcgtttctccgcactggacactgcgcggcttggacgtcaacgatagcagcaccgggcctggagatcaactctttcagcagctactgtcgaatggagatgccggcagacccaagctgcgcgtgcggattgtggttaatcgcagccacgatagcctgtggcatgctgatgcccgtatcttggctaactacggagcagccgacgtcgtgggcattaattttctgcactcaaaactgtggttagtggacggggagcacttctacttgggcacagctagcatggactggcgatcactgacgcaacgcaaggaactaggtgtgctggccagaaattgtccccatcttgctctagatctgggaaagatcttcaaggcgtattggtacctgggcagcaatgaagtgccaaagagctggccgtggatataccacacgcacatcaatcaaagaagaccgcttttgctaaacatcaacaaaaaacatacaatgagagcttatttatccacatcaccaccagagttgatcgctactggaaggacccgagagctagatgccattttagaggctatcgacaaggccacagacgttatatacctctccttaatggagtactctcctcggctaagacggagtaacaaattggagtactggccggtcatagacaatgccctgcgtagagctgccttggaacgcggtgtggccattaaggtgcttatttcatggtggaagtattcggatcccagcgaggatcacttcttgaggtcccttcaagcgctcgacaaaattacggaaggagtagatatacaaatgcgacgttttgttgtacccaccacaaatgaactggagaggatttccggcgttaaaataagcatggctaacaagccgacgcgcgatgtgatcggcatcatcttcaagaacttttggaagtccctacgaccgcggcagtttcgtggggattacattggggaggactatttcgggaataagtactacgaaattcctgcaaatccttcgattggaaagaggaagccttcccggtggttcgagccagcggataaggaagccttcgaccaggagctgactgccgaatgggaggcgtggctacgagggcgccgggaggagccgcccacccgcgaagagctggtgaaaaatcttcagattatggacatgaagaaacgcaacgccgccgaattggaagcaacatacgccaagggcaaggacgacaaggcactgcccaagcaggtggacggaccaactattggaacctttcccaaatacaaggagtatgagtttattcctggcaaggagccaccggagaagtaa

SEQ ID NO: 4284 - protein, 574 aa, DROSOPHILA
MSERRVVHEIPGEYQPVPRAPEEPTPLTTSCCRRPNCGLGLQDERNICSCKHGYIIPVLILFVLVMIVLLLPWETYHRNENGNSPVPVEKPLPCQLELVESLPLGLNYSQWQSHPQLSSTFDAWQLLLGRAKASLDIVSPHWTLRGLDVNDSSTGPGDQLFQQLLSNGDAGRPKLRVRIVVNRSHDSLWHADARILANYGAADVVGINFLHSKLWLVDGEHFYLGTASMDWRSLTQRKELGVLARNCPHLALDLGKIFKAYWYLGSNEVPKSWPWIYHTHINQRRPLLLNINKKHTMRAYLSTSPPELIATGRTRELDAILEAIDKATDVIYLSLMEYSPRLRRSNKLEYWPVIDNALRRAALERGVAIKVLISWWKYSDPSEDHFLRSLQALDKITEGVDIQMRRFVVPTTNELERISGVKISMANKPTRDVIGIIFKNFWKSLRPRQFRGDYIGEDYFGNKYYEIPANPSIGKRKPSRWFEPADKEAFDQELTAEWEAWLRGRREEPPTREELVKNLQIMDMKKRNAAELEATYAKGKDDKALPKQVDGPTIGTFPKYKEYEFIPGKEPPEK

SEQ ID NO: 4285 - DNA, 3370 bp, DROSOPHILA
catcaacaagcacttctacatgtcctgcattgtccagcgtctgtccaagtcgctgaaccgtgaaatgcccagcgagctgatctggcgccacctgggcaccatgtacaagctgaaggaactggacgatctggagtcgctgccctttcccaacgaggagcgcgagttcagcctgccggagcaggattacggaacgctacagaccaaaaagacggtggaagtgcatgccaacgaggaggctgcagaggcacagtcggcccctccaacagcagagaccaatggcaaaggtagttcgttagttatcatcaggattcattcacttgtaatgttgttttacagctccacctgcaaccaaaacgccggtaccgacgaattccaccaaggacggcgacaaaaagcccgtcgccaagccccaggagcagctgcccaagcgtccggccaagcgcacacgcggctccatgtccaacgagtccatcagcccctccactacgccgccgccggtgcagagcaacaagcgccgtcgcatataggtgacccccgcccgaaactgacgattgttgatccgttttagctcattagttttactgtactctaataaaaggatttattcttcgaaatcgttgtcctcctcgttggagccgttcccgttctcctgcgccagaacctcggtggcctgcatgttttccaggagcgatttgagaaggcgtcggttgagatggtcggtctgcgtcagttcccggactgcctggggcggagcattctcgtctgccggtgcagggctgttctcagctggagtcggagtctctgccatggctttgatgtgctccaaaacaggcatttttcccccgagaaatttcagcttttgctatgacacacagtccgctgggtgactcgtgcacttggaaacttggctaagtgtagggtacactcgataaagtatcgataagttggcgttttacgtcagccctagttccacccctaagtcgatcgacttccaattggacagattctcccgctcgaatttaatttaatcggcaaatataaacaaatacgctccaaatgtttgttcccgaaacggaggatatgctgcccagactagcgcccaggccgagtgcagcagtgcccatgggccacaccaatgagattatagggcccaccgtgccggaggtatccatattgtttggccagccgccgcaggatccgcagatgcagccgcagcagccaaatcatgcacatcaggagtcatcccctcgtgctgcacccaccttcgcgtcctggaagaagcaaatgctgcccagggtcaacttttcgcccattttggccacagaactgggtcctcgcaccgctcccagcagcaatagtccgtgctcctcgaaggaataccaagtaatgccccgggatcgcaactatgcaagcgatgcgcagcagactaccaatcatatgaactgcaatgctggtggctataatgccgagcccaagcaacaggcatatcaatctaggcgcttgtccagctcctccaacgcagatgtcctcaccatctgtgctggcacacagaccgatcccttcaacccatctcctccgcgaaaatcactgccccaggttgtctattccgacatcgacgtcagcaacttggccaataagagtgatctggcggctctggtatcccttgtggagtccgtgcgccatgagcagcaacagcttcggaatctctgcgagatgattttggagcaacagcagcgagcgaaacccgaagccatttcaaaagccagcagtaccactggcacccagtgcgatattctgaccaccaatcaaggtgcgtacgttgaatctgtatgaaaagaatccaataaaacatccttcctagcaggtagacgcttgtctcccattatgcaggattacatagcagaggaggaggaaccattgccgccgccacaagcacgagtgattcctcagtttccgtctcctcgaccacatccgccgatcgcccaatctacgggctaccgggccaatacgcctcaggcgaagcggatccctcaactggccaagcccaacaccgagaagagcatggtgatgaacgagctggcgctgaaatacttgcgccagccagtggatgagttgatgaaggatatgcgcctgggggcgtcgccgaagtcccctaatccagagccactgcgtccgatcgacaacataggccacgcgcagagtccaaacgacatatccaatgcttcgtacaagtatctcaaaaaataccgtctgctgcccgaggagcaactggagccggtgtgtccacaatctcccatggcggcgaccgccccttcgccacatattcaactggacttggagaatatcaggaaccagccgaagctgttgtgaaagcatgtacaatgttcgttttgttatttatgcatatgtctatttgcgatttaagtggaaatatatttcaatacacggaataacgttgacaatcttctggtgatcccagcctaaactaacgtagagaaccactctttgtatacaaaacattttgtgtttgacatcgatatctgaagacacaataagaatatacgtttagtgaacttggctgcgatccggcgacggggctctaacgcagaaccaactgtagctcggatgcggattgcagtaggaccttcagtccctgcataaagcccgcgcactgcgcaaagtccgttccgaaggcgatttgcgtgtggatttccatagcattggcatagtcggatatttgaatgtactgaactatttgattcagatattgcaccgtggtgggagtgagctggaattaaagtaaatgccatttgagaattgcaattgaatcgcgatctaaggcagcagctctcacctttccatctctcaggcagtcgtagagattttcgagcctcttgacaacatcgacaaactttcgttttgtgcgcttaaaatgtaagaaaatttataaacaaaagtaagttattccttttgtctatatggatcatttattaatagacttaccggatcattggttgcgcccaggcagcggttcttcagctcctccagcacagtctgcaagtagatgtactcctcggggagtggtggcttctccttgggcggcgccggttggcgctgttgctggatgggcgctggctgctcggtatagccaatggtttgctgttgtccctgccagtttggctgctgaatcccaggggctggctgctgaggctggagatatgattgctgatgctgctgctgctgctggggattgttgttgaaggcagccgggttgtagtacgtattgggcactcctccaagtggtgctgcgtgctggagaaaataaatacatttttgatctacttcctgaccaataatccgcttttaaatc

SEQ ID NO: 4286 - DNA, 1319 bp, DROSOPHILA
cagattctcccgctcgaatttaatttaatcggcaaatataaacaaatacgctccaaatgtttgttcccgaaacggaggatatgctgcccagactagcgcccaggccgagtgcagcagtgcccatgggccacaccaatgagattatagggcccaccgtgccggaggtatccatattgtttggccagccgccgcaggatccgcagatgcagccgcagcagccaaatcatgcacatcaggagtcatcccctcgtgctgcacccaccttcgcgtcctggaagaagcaaatgctgcccagggtcaacttttcgcccattttggccacagaactgggtcctcgcaccgctcccagcagcaatagtccgtgctcctcgaaggaataccaagtaatgccccgggatcgcaactatgcaagcgatgcgcagcagactaccaatcatatgaactgcaatgctggtggctataatgccgagcccaagcaacaggcatatcaatctaggcgcttgtccagctcctccaacgcagatgtcctcaccatctgtgctggcacacagaccgatcccttcaacccatctcctccgcgaaaatcactgccccaggttgtctattccgacatcgacgtcagcaacttggccaataagagtgatctggcggctctggtatcccttgtggagtccgtgcgccatgagcagcaacagcttcggaatctctgcgagatgattttggagcaacagcagcgagcgaaacccgaagccatttcaaaagccagcagtaccactggcacccagtgcgatattctgaccaccaatcaagcaggtagacgcttgtctcccattatgcaggattacatagcagaggaggaggaaccattgccgccgccacaagcacgagtgattcctcagtttccgtctcctcgaccacatccgccgatcgcccaatctacgggctaccgggccaatacgcctcaggcgaagcggatccctcaactggccaagcccaacaccgagaagagcatggtgatgaacgagctggcgctgaaatacttgcgccagccagtggatgagttgatgaaggatatgcgcctgggggcgtcgccgaagtcccctaatccagagccactgcgtccgatcgacaacataggccacgcgcagagtccaaacgacatatccaatgcttcgtacaagtatctcaaaaaataccgtctgctgcccgaggagcaactggagccggtgtgtccacaatctcccatggcggcgaccgccccttcgccacatattcaactggacttggagaatatcaggaaccagccgaagctgttgtga

SEQ ID NO: 4287 - protein, 420 aa, DROSOPHILA
MFVPETEDMLPRLAPRPSAAVPMGHTNEIIGPTVPEVSILFGQPPQDPQMQPQQPNHAHQESSPRAAPTFASWKKQMLPRVNFSPILATELGPRTAPSSNSPCSSKEYQVMPRDRNYASDAQQTTNHMNCNAGGYNAEPKQQAYQSRRLSSSSNADVLTICAGTQTDPFNPSPPRKSLPQVVYSDIDVSNLANKSDLAALVSLVESVRHEQQQLRNLCEMILEQQQRAKPEAISKASSTTGTQCDILTTNQAGRRLSPIMQDYIAEEEEPLPPPQARVIPQFPSPRPHPPIAQSTGYRANTPQAKRIPQLAKPNTEKSMVMNELALKYLRQPVDELMKDMRLGASPKSPNPEPLRPIDNIGHAQSPNDISNASYKYLKKYRLLPEEQLEPVCPQSPMAATAPSPHIQLDLENIRNQPKLL

SEQ ID NO: 4288 - DNA, 4340 bp, DROSOPHILA
aagctcgttcatctcgatctgcaggcgctggcacttctgcaccggcgtctccttctcgccctggccaaccagctcgtagtcgctggagccgcgcgtatcgtaaccccggcacatgcgtcgtccaatgcgatccgtgaagtccacactcccctcgaccgttgctccgctgaagcgcttgtgagcgacgctcggcgagatgtgcagtcgctcgatggcttcgttctccggctcctcttcgtagtagtcggatgtatcgagctccgggtcatctggagtttcgtacacgtccggctggtcataagcctaaaaacataaagtacatatatgtataaatgggcaaaaacgaaagcttaaacgtcactgccatggtgcggagttccgacttactattcccggtaggttctggaacttgggatcggccattattgtgggcacgtcgacggcggtgtttggaatcctttggcaacgaaataattataaaccttcaaaaatccttttttacaacaatcaattcgatctgatgtcataaaaaaagttaccgtgcgcggttaccaaacaaatgccaaagtgcagttgtcattggagtatttataaacagaggtatctaaaaagtcatttaaaaaagacagttattacttgtaacggctaataagctaagagtaaatagtattgcaaaatatatcatcgatataaataaattgtacttgcacattgtactttgttaactggattcatagatgcaaacatttataaaaataaattaaagctttttgtgctaatttaaacctattttgattttaggaaaaacgatatacatttaaaatcattcataagcaataggtaaataattccatgatcgacttccaattggtaaatcaatgaaggtacacttttcttctggtattttatagaccagtgaggatagaaaaaaggcacggtcctactgtacctagcacaggtactaagttagtcaacactgtagttttcgtgtagtttgcgggcgaagcgagtgggcggtgggagctgctagttggttgtactaatcttaatattttgcatccgaaaacaatagagtaatgtctggcttagagtacgggttgcatagatacgatgatctgccgctggaggtgagcatataatgtgaacggactgccgcggtcccgtgaccaatccatcatttcgagcgtatctatatctgcatattcatatacctgttagggcagtcagctgattttgtttttttctgttccgcccccagattgttttgaagattttcagctatctcggctactcggacttacaagcggcaggatccacctgccagcgatggcatgcggcgctggatcaggcggaatttaaccagcgcacgcgagtctgcttctccaaggtggtgctatcggatcaattgagtcctggagtggatctgatgcgctgcgagcggcgtttccagcacttcctgttcgaggacgtgacactgggacaagtaaaggaattgatgcgcttcatgggcaggaccgctcagtccctggctctggacaatgtggatttgaatgacaaacagttctacggcatgctgggcgtgctgccccatctccactcgctgtcgctgaagcgctgtctgccgctgttcatgtccggctctttcctggactcttacaacaactcctgtcctgacctaaacgacctggcaagcaatctggccggcatcaaggagctgacgctgtgcgagaaccaatacctcacggatgccattcttatgcgtctcacatcgttcatgcccagtctggaagcgattaacatgtccggctgtcacatagcctttcacaatgctattcatcgcagattttaccctgccaccagctcctcggatcacgttttgcccagcgagtctgtgctcacgttcaagttcatcctcaccattctgaacctgcagcgacgtacgttgcgcgtgttgaactttagccacaccctaattggccaggctttgttggccctttgcgacctcaatctccaactgcagcgcctctatttggccggatgcagacagcttaactgcaccacaatcctgaactttctagccacacagccccagttgtgtgccctcgatttgtcggccacaatgtgtgttaacgatgaaaatctggccgccttggtacaaactaatccgcagctggagcacttgaaggtgaacggctgcctgagcattacaaatgctggtgccatccacttggccaagctaaagtgtctcaaaagtctggacatctcaaactgcgataacttgacaagcagcggcatcatagaaggcatcgctagcgaggagaatccggtaatacaggagctgaacgtttcataccttcagatctgcgaggaatgcatcaaggcaattgccagtaacctacgatgtctgcgatcactgcacttgaatcactgcgtcaatggagccaccgatgaggctatccagtcggtcatcggccagctgcgatggctgcgcgagctctctttagagcactgcagtggggtaagactgaaagtcgcgataaatataagttctgccttgtaatttggttttatttaaatatagttaaccgatgcagccctcacaggtataaacatatccaagctggaaatgagtcgtaagcagtcgggttcgcaggtgtcgtcgatggacaacttctacccgccgtactcgaacacgctggcggaacgagacagcctggcgggttccctgcagtccattaagatatcgctcaggagcaaggccgaggatgagattgttcgggatgcccggcgaaagcaagccatgctggccgcctacgaaatgaacctgatacgagaggatgatttcgagggtcacaacattcagcagttgcggggattgcgatcgctaaacttgcgtggctgcaataagatcagtgatgtatccctgaaatatgggctgaagcacatcgagctgaggcggctaatgctctcgaattgccagcagatttccctgctgggcatggaggcgatggccagcagttgcccatcgattgaggagctcgacctatctgactgctacaacattacggacaagaccatccaggtggtaacgtctaagttgccccgcctgaaggctctgcacatcagcggttgcagccagctgacggagcacacgctggacgccattatcaccaactgcagctgcctgcaaacgctgtcaatctatcgatgtcggagtatgtacacagacttggaggagcgactatccggcgtgaagacgttgcgcaacctgaacatggacaatctgacgagcatcgacaacgccgagtttttccgcctgaaaaagcgactcgattactgatactttgccgccatcttcattgtcttgatgttgtactactttcagctgtacaacttccgctagtcaatcgccccagccgtcggaacaaccccccacatatatttatttttatctatcggcccccagcagctgggctatagttgtgaaagctttagtcaaatatacatacatatacatatatatgcagacatatatgtatttgcatatatgtgcacttaaatttacactaaccgcgcacgttagattagcaaaattacaagtctcgattgtaatgcaattaaattttcgtacgtaacgtttgtccgcattcaactgtgattttttgtaaggtacgaatcgtatgataagtgtacacgattgtaaattatgtgatcggttgccaaaattaaagttgtttgtttgattgttgagtatttaacttgatttgattcgttagtagttattaaatagttgaaaatttgttaattcagtttaggagaaaaacccaaaaatgaagtttttgaaaacacattgtggttataattacaacaagtcactgtcacttcttataagctttatacgattaaatcgttaactgaactcaactgacttaagtggttaatgtatttgtaaataaagatcaaaaattaaaataattactgagtaacttaatgagtgtctagtaaatcgtacagttagttaaatttatatttgaagaacaatatgcgaggtataaactaaatacatgttaatcaaatgactgtttttacattatggaaaggtattccgaaaatttacaagcttttgctctattcttgtaaataattcgactaaccagccttgatatttgagatgacaagtcttaatgttcgaaagtaattaaatatttacccaaaacaaaatttgttcttcttgacgatctaaacgggaataaataaaatatcgaagaccaaaggggttcgttcaaaatgaatagatttatttcaaaatgagttaagaacatttgttgttatacgtgcta

SEQ ID NO: 4289 - DNA, 2146 bp, DROSOPHILA
gcgaagcgagtgggcggtgggagctgctagttggttgtactaatcttaatattttgcatccgaaaacaatagagtaatgtctggcttagagtacgggttgcatagatacgatgatctgccgctggagattgttttgaagattttcagctatctcggctactcggacttacaagcggcaggatccacctgccagcgatggcatgcggcgctggatcaggcggaatttaaccagcgcacgcgagtctgcttctccaaggtggtgctatcggatcaattgagtcctggagtggatctgatgcgctgcgagcggcgtttccagcacttcctgttcgaggacgtgacactgggacaagtaaaggaattgatgcgcttcatgggcaggaccgctcagtccctggctctggacaatgtggatttgaatgacaaacagttctacggcatgctgggcgtgctgccccatctccactcgctgtcgctgaagcgctgtctgccgctgttcatgtccggctctttcctggactcttacaacaactcctgtcctgacctaaacgacctggcaagcaatctggccggcatcaaggagctgacgctgtgcgagaaccaatacctcacggatgccattcttatgcgtctcacatcgttcatgcccagtctggaagcgattaacatgtccggctgtcacatagcctttcacaatgctattcatcgcagattttaccctgccaccagctcctcggatcacgttttgcccagcgagtctgtgctcacgttcaagttcatcctcaccattctgaacctgcagcgacgtacgttgcgcgtgttgaactttagccacaccctaattggccaggctttgttggccctttgcgacctcaatctccaactgcagcgcctctatttggccggatgcagacagcttaactgcaccacaatcctgaactttctagccacacagccccagttgtgtgccctcgatttgtcggccacaatgtgtgttaacgatgaaaatctggccgccttggtacaaactaatccgcagctggagcacttgaaggtgaacggctgcctgagcattacaaatgctggtgccatccacttggccaagctaaagtgtctcaaaagtctggacatctcaaactgcgataacttgacaagcagcggcatcatagaaggcatcgctagcgaggagaatccggtaatacaggagctgaacgtttcataccttcagatctgcgaggaatgcatcaaggcaattgccagtaacctacgatgtctgcgatcactgcacttgaatcactgcgtcaatggagccaccgatgaggctatccagtcggtcatcggccagctgcgatggctgcgcgagctctctttagagcactgcagtgggttaaccgatgcagccctcacaggtataaacatatccaagctggaaatgagtcgtaagcagtcgggttcgcaggtgtcgtcgatggacaacttctacccgccgtactcgaacacgctggcggaacgagacagcctggcgggttccctgcagtccattaagatatcgctcaggagcaaggccgaggatgagattgttcgggatgcccggcgaaagcaagccatgctggccgcctacgaaatgaacctgatacgagaggatgatttcgagggtcacaacattcagcagttgcggggattgcgatcgctaaacttgcgtggctgcaataagatcagtgatgtatccctgaaatatgggctgaagcacatcgagctgaggcggctaatgctctcgaattgccagcagatttccctgctgggcatggaggcgatggccagcagttgcccatcgattgaggagctcgacctatctgactgctacaacattacggacaagaccatccaggtggtaacgtctaagttgccccgcctgaaggctctgcacatcagcggttgcagccagctgacggagcacacgctggacgccattatcaccaactgcagctgcctgcaaacgctgtcaatctatcgatgtcggagtatgtacacagacttggaggagcgactatccggcgtgaagacgttgcgcaacctgaacatggacaatctgacgagcatcgacaacgccgagtttttccgcctgaaaaagcgactcgattactga

SEQ ID NO: 4290 - protein, 689 aa, DROSOPHILA
MSGLEYGLHRYDDLPLEIVLKIFSYLGYSDLQAAGSTCQRWHAALDQAEFNQRTRVCFSKVVLSDQLSPGVDLMRCERRFQHFLFEDVTLGQVKELMRFMGRTAQSLALDNVDLNDKQFYGMLGVLPHLHSLSLKRCLPLFMSGSFLDSYNNSCPDLNDLASNLAGIKELTLCENQYLTDAILMRLTSFMPSLEAINMSGCHIAFHNAIHRRFYPATSSSDHVLPSESVLTFKFILTILNLQRRTLRVLNFSHTLIGQALLALCDLNLQLQRLYLAGCRQLNCTTILNFLATQPQLCALDLSATMCVNDENLAALVQTNPQLEHLKVNGCLSITNAGAIHLAKLKCLKSLDISNCDNLTSSGIIEGIASEENPVIQELNVSYLQICEECIKAIASNLRCLRSLHLNHCVNGATDEAIQSVIGQLRWLRELSLEHCSGLTDAALTGINISKLEMSRKQSGSQVSSMDNFYPPYSNTLAERDSLAGSLQSIKISLRSKAEDEIVRDARRKQAMLAAYEMNLIREDDFEGHNIQQLRGLRSLNLRGCNKISDVSLKYGLKHIELRRLMLSNCQQISLLGMEAMASSCPSIEELDLSDCYNITDKTIQVVTSKLPRLKALHISGCSQLTEHTLDAIITNCSCLQTLSIYRCRSMYTDLEERLSGVKTLRNLNMDNLTSIDNAEFFRLKKRLDY

SEQ ID NO: 4291 - DNA, 3987 bp, DROSOPHILA
cgtttttatccagcaggtagcaaggtcccaagagttttatgttttactttaattgacatttaattgacagacgacacgcactgccgtcagaacactgctaacgatacatgattgtaacctggcccacaggattttattaagtgcctggaaatttgcgaactaatgccaacggatttaaataaacgttttcacgcatatgtttctaaataaattgttttgtatacctaggtgaatcgatcttaccttggtaagatttcctttatcatttttaacaggaaatatgaaattgcatgtctttaggaattcggaattttaaattttgcttttatatccttatacctcttaaagaagaaataattattctcgctacacgtcgaaaaatctaaatcaaactctattgaggatataaatttgtcttcattaggatcactagcgagatctcaagaattattaaggctggaaatttatttctattggtttttttttttatgaatcttcgcttagtaaatagaaatgaatgaaaatatggatagatctctgttcaattttattggctgaattctatgcagcaaagaaaaactttatattatttggacaccctagatgattggagaatgatatggaaagctggatccatcgacttgcatacgtggatttctagttttagtttctagcctggtaaaaccttaccgtttagccaggtagagcgttctctaatcttactgtatacaggtgttgaaatcctagataagacacctttatgatgttcggtttcctgtggactgttaaattataaataacctatgttaatagaggacattaaccaaccaacaaaataaaaatgaagcaaattaataatatacagatgtaccccacgtgaacaactttttaatgcatgacttttggtcatatataaaattaaagttaattttaaagtactaactttctcgtgccttttactaaacgtggttaataaattggtgttttcttgggtttttattttcttctttgttcgctatacattatcgcagaaaatttatacatgcgagtgggagcgtatgaaaataagcaagattttgagggatgcacacctatccgctctagtactcctcagcaccctcgccctcaccgtcaccggaatccatgccgacctcctcgtagtccttctcgagggcagccagatcctcacgggcctcggagaactcgccctcctccatgccctcaccaacataccagtggacgaaggccctcttggcgtacatcagatcgaacttgtggtccagacgggcccaggcctcggcaatagccgtggtattggacaacatgcacacggcacgctgcaccttggccagatccccgcctgggacgacagtgggtggctggtagttgatgcccaccttgaagccggtggggcaccagtccacgaactgaatggtacgctttgtcttgatggtggcgatggcggcgttcacgtccttgggcaccacatcgccgcgatacagcatgcagcaggccatgtacttgccgtgacggggatccaccttgaccatctggttggctggctcgaagcaggcgttggtgatctcggccaccgacagctgctcgtggtaggccttctcggcggagatgacgggagcgtacgtcaccagcgggaagtggatgcgggggtaaggaaccaggttggtctggaactcggtgaggtccacatttagggctccatcgaatcgcagagaggcggtgatcgaggacactatttggccgattaaacgattcaggttagtgtaagtgggtcgttcgatgtccaggtttcggcgacagatgtcgtagatggcctcgttgtccaccataaaggcgcagtcggagtgctcgagggtggtgtgcgtggttaggatggagttgtagggctccaccacggcggtggacacctgcggagctgggtacacggcgaactccagcttggacttcttgccgtagtccacggagagacgctccatcagcagcgaggtgaagccggagccggtacctccaccgaacgagtggaagatgaggaagccctgcagaccggtgcattgatcggccagcttgcggatcctgtccagcaccaggtcgacgatctccttgccaatggtgtagtggccacgggcgtagttgttggccgcatcctccttaccggtgatcagttgctcggggtggaacagctgacggtaggttccagtacggacctcgtcgaccacagtgggctccagatccacgaacacggcgcgaggcacgtgcttgccagctccagtctcgctgaagaaggtgttaaacgagtcatcacctccgcctacggtcttgtcggagggcatctggccatcgggctggatgccgtgctccaggcaatagagctcccagcaggcatttccaatctggactccggcctggcccacgtggatagagatacattcgcgcatattgatttttaatggggtttccgattccgggtttcttgtttcgagtttcggtttctcacacgcgactacggaaaatcaacggaaaaagtgtaagcctacggattttggggtctgactctgcgggcgtatacgttggaatgcccgggaatggatttcgaacagacgtaaatcgccagtagctctgttttacgaaaaagggcttcacaacaactcagatattagattagatattagataactatctatattatacgaaacgcgtttcttttaccaatcgattttgctctgggggcacgaaaaaccctgtcaggccgctttttggtttgtttgtttgaattcggctttagtttcacgctgatttttacacaacattgctagctcttggccaataattgattaccatcggcaagagtgttcagatgcggctaaatggcggtatttacgagatttaaagatcagtaaaattatttagcacaagcacgcttgttcagtagattaagtgtgaccgccggtgggaaatttaaagataccaaacagttcaataataccaatgccttgtataagtgaactgcatattaacacaattaataatgcctatttcaagagagcgtcaaattactaatgttccgtttaagtaattttacatgtgtttagaacatctactattactatttaccaaaatgaacaaagtatgtaaaccgaatagtgcatttttgcattaagtcagtaggtcatagtgaacaaaataaattgaaatagagataaaagaagtaagtaatttttttatgttcatatatttttaaagaatggagcaacccgtccgtaaacacaacgaactcttttgacccgcttggtatatttttaaggcagtaatttccgagagcagtacagtactgcgcagttatcgatccattttgcgcacttatcgattaattgcgcgcgaaatgagtatgctttgaaataatccacagatgtatttctttatattgggaccagtctgtgctattcgtgtcaaaaggctaacattttttggaatctgctactattttgtgtattattcatattttcatacaattgaagattttctgaagatgcgtaagtaaaaactactatttaaacccgctagttagctaaaaaaaaaggatgaataatgtgcgcaaagcattcggtattagctaggtaaatgtagtaaaatttaaaaaaatattttttagaatatcttcgctttcttcattttgagaaatacaatgtcgagaaacttttcaaatttaactgtgaactgaattgaagcaagacacaaacattgtggtgaatcgaaatacattccgacctgacaatttgaaatcattttagtttgtctattcggttgacctttgaaatattagtcagctgtgaaaacttaaaacattatttgctctgatctcacaaccagcatccgaacgtgctctaaagacattcgaaaatatgagtaccgatactttgataaaggctaaggactccagccaaatatttatggatctgaagaacctgttgt

SEQ ID NO: 4292 - DNA, 1987 bp, DROSOPHILA
tttggtatctttaaatttcccaccggcggtcacacttaatctactgaacaagcgtgcttgtgctaaataattttactgatctttaaatctcgtaaataccgccatttagccgcatctgaacactcttgccgatggtaatcaattattggccaagagctagcaatgttgtgtaaaaatcagcgtgaaactaaagccgaattcaaacaaacaaaccaaaaagcggcctgacagggtttttcgtgcccccagagcaaaatcgattggtaaaagaaacgcgtttcgtataatatagatagttatctaatatctaatctaatatctgagttgttgtgaagccctttttcgtaaaacagagctactggcgatttacgtctgttcgaaatccattcccgggcattccaacgtatacgcccgcagagtcagaccccaaaatccgtaggcttacactttttccgttgattttccgtagtcgcgtgtgagaaaccgaaactcgaaacaagaaacccggaatcggaaaccccattaaaaatcaatatgcgcgaatgtatctctatccacgtgggccaggccggagtccagattggaaatgcctgctgggagctctattgcctggagcacggcatccagcccgatggccagatgccctccgacaagaccgtaggcggaggtgatgactcgtttaacaccttcttcagcgagactggagctggcaagcacgtgcctcgcgccgtgttcgtggatctggagcccactgtggtcgacgaggtccgtactggaacctaccgtcagctgttccaccccgagcaactgatcaccggtaaggaggatgcggccaacaactacgcccgtggccactacaccattggcaaggagatcgtcgacctggtgctggacaggatccgcaagctggccgatcaatgcaccggtctgcagggcttcctcatcttccactcgttcggtggaggtaccggctccggcttcacctcgctgctgatggagcgtctctccgtggactacggcaagaagtccaagctggagttcgccgtgtacccagctccgcaggtgtccaccgccgtggtggagccctacaactccatcctaaccacgcacaccaccctcgagcactccgactgcgcctttatggtggacaacgaggccatctacgacatctgtcgccgaaacctggacatcgaacgacccacttacactaacctgaatcgtttaatcggccaaatagtgtcctcgatcaccgcctctctgcgattcgatggagccctaaatgtggacctcaccgagttccagaccaacctggttccttacccccgcatccacttcccgctggtgacgtacgctcccgtcatctccgccgagaaggcctaccacgagcagctgtcggtggccgagatcaccaacgcctgcttcgagccagccaaccagatggtcaaggtggatccccgtcacggcaagtacatggcctgctgcatgctgtatcgcggcgatgtggtgcccaaggacgtgaacgccgccatcgccaccatcaagacaaagcgtaccattcagttcgtggactggtgccccaccggcttcaaggtgggcatcaactaccagccacccactgtcgtcccaggcggggatctggccaaggtgcagcgtgccgtgtgcatgttgtccaataccacggctattgccgaggcctgggcccgtctggaccacaagttcgatctgatgtacgccaagagggccttcgtccactggtatgttggtgagggcatggaggagggcgagttctccgaggcccgtgaggatctggctgccctcgagaaggactacgaggaggtcggcatggattccggtgacggtgagggcgagggtgctgaggagtactagagcggataggtgtgcatccctcaaaatcttgcttattttcatacgctcccactcgcatgtataaattttctgcgataatgtatagcgaacaaagaagaaa

SEQ ID NO: 4293 - protein, 450 aa, DROSOPHILA
MRECISIHVGQAGVQIGNACWELYCLEHGIQPDGQMPSDKTVGGGDDSFNTFFSETGAGKHVPRAVFVDLEPTVVDEVRTGTYRQLFHPEQLITGKEDAANNYARGHYTIGKEIVDLVLDRIRKLADQCTGLQGFLIFHSFGGGTGSGFTSLLMERLSVDYGKKSKLEFAVYPAPQVSTAVVEPYNSILTTHTTLEHSDCAFMVDNEAIYDICRRNLDIERPTYTNLNRLIGQIVSSITASLRFDGALNVDLTEFQTNLVPYPRIHFPLVTYAPVISAEKAYHEQLSVAEITNACFEPANQMVKVDPRHGKYMACCMLYRGDVVPKDVNAAIATIKTKRTIQFVDWCPTGFKVGINYQPPTVVPGGDLAKVQRAVCMLSNTTAIAEAWARLDHKFDLMYAKRAFVHWYVGEGMEEGEFSEAREDLAALEKDYEEVGMDSGDGEGEGAEEY

SEQ ID NO: 4294 - DNA, 5239 bp, DROSOPHILA
cggtgtggccagggagttcttggccggcagtttaacagtttgcaatctgggcagctccacgctgccgctgttgaaggatctggcacgtggtcgtggctgctgggaatcgccggaggggctgttgaccacgcccgtcggctcctggtgggtgctcgatagctcggcaattttgagcagggtctgcagagtctggatgaccgcattgtcccgggcatgctgttccccgtgctccgaccagttgtccgtggcatggctcaaaatgatggctcgcagcttgcgcaggtgcttctgcatcttctccactgtgaagaaagtgagataagccgcagattagtggtagatatgatctgatgacaagactgataaccggcgtctatcttctatcatccgcaaactggagcaagtcgtcagcgctggacgagcgccaaagcaaaagtgtcggctcttgtctggaatgtatctcgtttcggtgcctatctctgtatctgtttgtaaatgtatctctgtgcttttaagtgtatctgtctcagcgatgttgtaacttgtgtacccagaaattcaatcccagcgggcagagccttgtaaatgccgcgtattatactccagccgaccaaacgactgactaactgtctgcctagctggcttataattaactctcctagtccgcagccacaatcacaaccacaacgccccgttattagccagggtctagaatctacaatccggagctggattggaggtgaatgtgggtgccttgttcttgtcccacttctagggcttcccagagagtgctcggctgttgtgccttgtctattttctatcgcctattgcttattggcaacgcattagccgcggaatgccgtggaacccaccagatgggcggctaaccaggaggaacatggcaggcaagtaatgctctttctttttaaataccctactaaatgggttctcaatgattatcttattaaattaaaaccgaattaaggaactagctaagtaagctatcaaagttacagaatgctccacatgttcaatatacccacttccctcatctcaagaggtactcaaccgaacaatctttgacacttaccttcttcgttttggaaacccttgatgcagatggccatggtcgcctcgaagagtttgagcaagagtttcttgcattcgccgttgggttcgtataagcagaagaaatccgcatcaatattagcacgtgtcggtgagttggcacttccgccgcttcctggactgccgccgaacagggatcccacaatgctaaagagcttgttgatgatgccatcggctgttgccccttcctcctcgcttggcaggatcagggagttgctgggattgtccttactcgactgactgccacggatgtcgaagagcactgtactctcatccggttcgcaggcgaggagttgctgcaggaacgagggagtggccatgtcccgcgagtagctatcgtagttaccgatcacagatgcgtaatccaatgtcgagtccgcgtagtccgaactggcagccgttgtgaccgagactgaagtggagccagcgagtggcagctgcgagaccagggtttccaatgaacttgagccgcaaatgccggctgtgggcgtggttgcggtggaggatgtggttggccccattgtggctttcggcagcatgaggaaacagcccagcgcgttgtagttcagcttcaagatgtcaaagatgtttttgtccccatgtcgcagcttcttctcccctggaagcagctcgctcgttggagtctccacctcatcctcatcctcgtcgtctagcatttccacgggtatggagtagattttggcaaactcgttgtaaaacaactgactggtctttaggagctcgaagttcagggtccattgcagggcggttatgtagagtatgtccgcgggtttgtgaccctcgagcttggcaggagtggagctctcatccagccagaatttggcgcgggagtgcttggagcacttgtacagcagagcctggaagagctgcgatgccctgtcactactgttcagctgcagctggatgagtctcctgctcagagtgatctgctcctggctgttctcgcccagaaaagctatgttatcaatgcccaccttgatgagatcacatactccccgctgcagttcgggtatgattagaagatcctgcatatagcggatgttctcctcgttgtagaaagctttgaccaggcggatatcactcaggtacatgacgaagatactcaggcattcgtgtagagctctgtagttctccaacttgctgggcaactgtaggggagtgaccttgcttatctttctcttgctttcgccactttcaatcagttctttgtaacgcctaaaaatgggcaaagccacctccgccaagattccagaggctaaatcatagggcagcagataggcgatatgttttagatgcttgaggaagagcaacattgcaggtgtgttcagcagggccttgtagttatccttgtagatgttcagtaggtccatgtgaaatacaggcgactttagtttatcctcgcatcccgggcatccctggggattccgcttcacaaagatggtgtgcagcacattgtagtggaggaatttgtatgcacacttctgatagctgctggaaagttgggtggctagttgcaggcaagtggcgtagttcctgacgttgtagtggcagcaacagcttccggttcggagcagactcctcacgctatgctcctgcagctctgcctccagactgggcagcaagtgatacagttttccctggaagtagcagctcagggaagtggctcccagacaatgcaactgactgctcctttgtcttttgtggcgcggatgttgctgttgcttgggcatcgcggtggatgcactgctctccataagactctgcaggtgctgttcctggctggaaaggttgtccgtcaggcgtagcagcattttgtagatatgcaggaatatggcggtcgagaagttagtcgatttggccgcctcttgcaagacctcgaagcaggcatcaaagttcctcacatcgatctggttcaactcccgcacgccattatccaccaggttgtgaagggtgccaaacattatgtataatactccatgagccagaaggggactcctccgattggcggtcagtgcgtagaggagctgcccaaagttgctgttgaagtcatggacattcggctgctgttgctccagcacgtaaaagttgtttacacagtgtgctatcaattggagcagttcaaatttaatgagttcatcgttattccccgatgcatcctgctccgaacttgaacacaagtgtcccagagcaaagttatggaccgtaacgctcagctgggattcctgctccgcatccacgcacctggtgagcaattggatgagcagcaaggccagttcatcactgctccttgtcgtccctctaaagtcttcgaaactcgatttgattggattggatatgtgattgggtaattgactttttggttgctgttggcgtctcagctttttgctttgcgaattgaggtagaaacttccgatgaactgagcaatgctggtcatgggaatcagctgctcgttggatgcactccacttgcagttggggaacaggttaatgcacaggtggcacagactcttctgggatgcaatgagctgcaggcagaggtttaagaattgatttaatttaaatatttaatatgtaacaatttctgggattcaagaaaagcacgtgccttgatatccacgcgcagcagaaacgtcaatagatgatggcccagtttatcggtgaggaatgtccgcagagcgagaatcttgttgcaatcactgggagtgctgagtattagctgcaagaagagacatgagaaatggtgaactggatcagaaataggggaatatgcttcgatagaaacctgggccagattatgctgcttgcgcagctgcttgatgcacttgtcctgctgctccggttcatgcgtcggactgctttcctgagatctcttcgcctcgctgatgatttgatagacctgctccagcaaataggaacagagctcctcgggcatcagattgaagtggctgaaatatgaacaaatataatataatgtataactaactatacatgttaagtagagcgataatattacctatttagccaggcatcttgcaagttcttatcgtccagaaactgcaagttatacagcagcaaccagagccagtggtcctgcgagcatgagagggagaaaggccagcagcgataagagctgggaatatcaacggaatggacgaaggagagtcacacaaaccttgacactcgcgtcttcgagctccgaggcctggagatactgactccacagtccgatcagggtatccagcagcagctgctcctccttctccttcacctccattccggccatggagaatcacagatagtgttgttgccttccaacaggcacgtcaaagagtctgctccagctggtcagcagctcctcgggcatcggtcgacgttgtgtgcgcttggagcgatgagaccaaactgaatgcggcgatcgcaggagaacgccagctgtaattaaggagagtcagtaaatacagtcggacctctaaagcatgagaagtagtcaccaacgagttttacgttactatgtagattcaaatttttaaataacaaatcagaaaatgtggacaatcagaaaatttactggggtaaatgattaaagatgcctgaaaagttcgctctgtggaggtgccactgtaactcttttgtgcgtgcgattacgtgaagagatcagcacgaagaggacgtggagtgggcagaagaggccacgatgattgcttatttgcccagaggcagcagtcggccggtgatgttgataattcgctgcagagtggagtggaaactttggttgttgttgcggaaaactattgagattgctatttatagcgcatcggatcggatcggtggcattgcatctggatggatggctggcttgcggtgggttgccaagccggtaagacagtgatagttatcggggctgggatcggtggctcaggggcttcagtggtgcggtggttgcagtgatgctccattcgggtaaacagctggcaatggagcgtgtctgtaacggccagtggcagcgagataagctcgaaactatggaaatcaggaggaggagaccatcttcatttccaccttatcacgtcgagaatttcacatatacata

SEQ ID NO: 4295 - DNA, 3013 bp, DROSOPHILA
gaccactggctctggttgctgctgtataacttgcagtttctggacgataagaacttgcaagatgcctggctaaatagccacttcaatctgatgcccgaggagctctgttcctatttgctggagcaggtctatcaaatcatcagcgaggcgaagagatctcaggaaagcagtccgacgcatgaaccggagcagcaggacaagtgcatcaagcagctgcgcaagcagcataatctggcccagctaatactcagcactcccagtgattgcaacaagattctcgctctgcggacattcctcaccgataaactgggccatcatctattgacgtttctgctgcgcctcattgcatcccagaagagtctgtgccacctgtgcattaacctgttccccaactgcaagtggagtgcatccaacgagcagctgattcccatgaccagcattgctcagttcatcggaagtttctacctcaattcgcaaagcaaaaagctgagacgccaacagcaaccaaaaagtcaattacccaatcacatatccaatccaatcaaatcgagtttcgaagactttagagggacgacaaggagcagtgatgaactggccttgctgctcatccaattgctcaccaggtgcgtggatgcggagcaggaatcccagctgagcgttacggtccataactttgctctgggacacttgtgttcaagttcggagcaggatgcatcggggaataacgatgaactcattaaatttgaactgctccaattgatagcacactgtgtaaacaacttttacgtgctggagcaacagcagccgaatgtccatgacttcaacagcaactttgggcagctcctctacgcactgaccgccaatcggaggagtccccttctggctcatggagtattatacataatgtttggcacccttcacaacctggtggataatggcgtgcgggagttgaaccagatcgatgtgaggaactttgatgcctgcttcgaggtcttgcaagaggcggccaaatcgactaacttctcgaccgccatattcctgcatatctacaaaatgctgctacgcctgacggacaacctttccagccaggaacagcacctgcagagtcttatggagagcagtgcatccaccgcgatgcccaagcaacagcaacatccgcgccacaaaagacaaaggagcagtcagttgcattgtctgggagccacttccctgagctgctacttccagggaaaactgtatcacttgctgcccagtctggaggcagagctgcaggagcatagcgtgaggagtctgctccgaaccggaagctgttgctgccactacaacgtcaggaactacgccacttgcctgcaactagccacccaactttccagcagctatcagaagtgtgcatacaaattcctccactacaatgtgctgcacaccatctttgtgaagcggaatccccagggatgcccgggatgcgaggataaactaaagtcgcctgtatttcacatggacctactgaacatctacaaggataactacaaggccctgctgaacacacctgcaatgttgctcttcctcaagcatctaaaacatatcgcctatctgctgccctatgatttagcctctggaatcttggcggaggtggctttgcccatttttaggcgttacaaagaactgattgaaagtggcgaaagcaagagaaagataagcaaggtcactcccctacagttgcccagcaagttggagaactacagagctctacacgaatgcctgagtatcttcgtcatgtacctgagtgatatccgcctggtcaaagctttctacaacgaggagaacatccgctatatgcaggatcttctaatcatacccgaactgcagcggggagtatgtgatctcatcaaggtgggcattgataacatagcttttctgggcgagaacagccaggagcagatcactctgagcaggagactcatccagctgcagctgaacagtagtgacagggcatcgcagctcttccaggctctgctgtacaagtgctccaagcactcccgcgccaaattctggctggatgagagctccactcctgccaagctcgagggtcacaaacccgcggacatactctacataaccgccctgcaatggaccctgaacttcgagctcctaaagaccagtcagttgttttacaacgagtttgccaaaatctactccatacccgtggaaatgctagacgacgaggatgaggatgaggtggagactccaacgagcgagctgcttccaggggagaagaagctgcgacatggggacaaaaacatctttgacatcttgaagctgaactacaacgcgctgggctgtttcctcatgctgccgaaagccacaatggggccaaccacatcctccaccgcaaccacgcccacagccggcatttgcggctcaagttcattggaaaccctggtctcgcagctgccactcgctggctccacttcagtctcggtcacaacggctgccagttcggactacgcggactcgacattggattacgcatctgtgatcggtaactacgatagctactcgcgggacatggccactccctcgttcctgcagcaactcctcgcctgcgaaccggatgagagtacagtgctcttcgacatccgtggcagtcagtcgagtaaggacaatcccagcaactccctgatcctgccaagcgaggaggaaggggcaacagccgatggcatcatcaacaagctctttagcattgtgggatccctgttcggcggcagtccaggaagcggcggaagtgccaactcaccgacacgtgctaatattgatgcggatttcttctgcttatacgaacccaacggcgaatgcaagaaactcttgctcaaactcttcgaggcgaccatggccatctgcatcaagggtttccaaaacgaagaaggtaagtgtcaaagattgttcggttgagtacctcttgagatgagggaagtgggtatattgaacatgtggagcattctgtaactttgatagc

SEQ ID NO: 4296 - protein, 952 aa, DROSOPHILA
MPEELCSYLLEQVYQIISEAKRSQESSPTHEPEQQDKCIKQLRKQHNLAQLILSTPSDCNKILALRTFLTDKLGHHLLTFLLRLIASQKSLCHLCINLFPNCKWSASNEQLIPMTSIAQFIGSFYLNSQSKKLRRQQQPKSQLPNHISNPIKSSFEDFRGTTRSSDELALLLIQLLTRCVDAEQESQLSVTVHNFALGHLCSSSEQDASGNNDELIKFELLQLIAHCVNNFYVLEQQQPNVHDFNSNFGQLLYALTANRRSPLLAHGVLYIMFGTLHNLVDNGVRELNQIDVRNFDACFEVLQEAAKSTNFSTAIFLHIYKMLLRLTDNLSSQEQHLQSLMESSASTAMPKQQQHPRHKRQRSSQLHCLGATSLSCYFQGKLYHLLPSLEAELQEHSVRSLLRTGSCCCHYNVRNYATCLQLATQLSSSYQKCAYKFLHYNVLHTIFVKRNPQGCPGCEDKLKSPVFHMDLLNIYKDNYKALLNTPAMLLFLKHLKHIAYLLPYDLASGILAEVALPIFRRYKELIESGESKRKISKVTPLQLPSKLENYRALHECLSIFVMYLSDIRLVKAFYNEENIRYMQDLLIIPELQRGVCDLIKVGIDNIAFLGENSQEQITLSRRLIQLQLNSSDRASQLFQALLYKCSKHSRAKFWLDESSTPAKLEGHKPADILYITALQWTLNFELLKTSQLFYNEFAKIYSIPVEMLDDEDEDEVETPTSELLPGEKKLRHGDKNIFDILKLNYNALGCFLMLPKATMGPTTSSTATTPTAGICGSSSLETLVSQLPLAGSTSVSVTTAASSDYADSTLDYASVIGNYDSYSRDMATPSFLQQLLACEPDESTVLFDIRGSQSSKDNPSNSLILPSEEEGATADGIINKLFSIVGSLFGGSPGSGGSANSPTRANIDADFFCLYEPNGECKKLLLKLFEATMAICIKGFQNEEGKCQRLFG

SEQ ID NO: 4297 - DNA, 13766 bp, DROSOPHILA
ggagttgatgaaagttttggaagtcaattaatttgtttgattttggcaattaattccagtgcagcgcaaaataaaaaaaaaataaaaatattttatataatttatataaattttatttaaacatagctcagcttgccgcgctgtaggaaaacttctacatacacgttttatgctttatatacacattcttgaaatgaactatgtacgtatatgatgtcagttttgtatcgaatactagaagcaattaaataaatttctaacacaacgtacgcactaaagtataacacatattaaataaacgttgcggttttttctagaatttaaacatattatcaacacattttacatatgcgttgcttgaatttgttgttaaataatacttaataattacaaatgttttcgccttctcaaattaaatttggacaaaattgaagctagtttggaatgcatttacaaatatttgccgtacagcaaatcatagcttgcttaacaacactttaaaacgtataatatatatttagtcacaagaaatgactaaaaataacaaaaaaacattgatagacggattaaaatattgcaaatgattacgttaaggtgtgcaagcacttggacttcgtttgaaaatatctattctgaatcggtttcatgtttgctcgatcatctgctttgagacagttaacatagttccactacataattcaacgtgtgtgtttttagtgattggtgaggacacaactacaggttttataaggacttttcttaaagttcataggtatatttcacataggctaccttcctttagctattgatggaaattggttcgtttttgcttttactttcccttcatttgttttagcatagtatataaattggtgtatacatataaatagtcaaacttatttgttttcatttaaatagtaataatataaatatatatatatatatatatatgtatatatgtatgtatatagcatttttcgtgttttgctcaatgttcaacattataatataattttcttatctgcttccgtttcatttgtgtttgctattgctgccgtttttttcataaactttatatatgatttctgtagcatcgtgtaaacagtttcaagatcttaatattcacttgcacgtttatataatatatagagctattggtatatttaatttttcattacgcatttgtgtctgtgagtgtgttttctgttttccgtctatgaggttagagcgcttagactgagtgagtgagtgagtggtgagtgggttgcacgtatgagcttcttctggaccgcttataacgcaccaaatgggtcgagtgggacgcctttattgctgccattctgcgttggctggatgggttgcatgatgcccgttgcattactgtgcggcgccgccatcatcgtcggttgcaccccagtcaaaggggctgctgcctgcccccccatcatacttggctgtcccatcaccggcattccctacaagagtcgttaaaaaaggcgttaagagcgaacataaaatgtttgttcaattgaaattcatgcactggaggagggaatacttattaactgctatgacagacgcaatgctacaaaatcagtggcaggaaaagattagtcgtttgggcttaaaaggagggggcccgccgtgagcttggaaaacagttgctacatggaatcatacggaaggtggttagctctacagacaagtgaaatagtaactccattaagaactgaatgtctactaaacttaaatatgtagatttaaataataatttaacagatacgaatgcaagattgtaatgcactatagttcagagacggagaccatagagggaggagaggcatgttaaacgcttgttactggtcaccaagtgggaattgttggcatgttttttttttttttttttgcaagttagaaggaagtggcgtagaggtcacatttatacgttatagtgctgtgatgatagaagttcgattgttaaacgaaatgataggaaataaaactgaaagaatttcttgatttaaggaaaacggcaactcagggcaaaaccaaaattatatttatttataatctttcattctgtttgagtaattgtaatggtttcttgtaatgtttcatttcgttcgttttggcatcatcttacctgcatataatttggcattacaggataactagcatgtatatacggatgattgattgtgattggcgcaggacttacagtcatgccatgtgcctacgtattgcatattggtatatatatatataggcatattgatagaatatatattgatatatcacaaacacacatacacacacacagacagcattggcacaggcgcagcgtgagtggtcatacgtgattcgtttgttgttgtttgtttgattggattcaatatatatttagttgtgattcaatttgattcggttcggttaacgattttcgattttcgatttcgatttcgatttcgattttgcggtatgcgttgggatagttgagatataaagcaaacataaaataaagaaaagaaagaagttgatagtttatatatactccgttaaaatgcaaattaaaaattaaaataaaagaaattaaaactataaaatggaaatatgtgtcttgacgtatttggcctgcgtgttttgtgtgtgtggaggcataaaacccaccgtcgttgcccttctctccaggatgccctaatgcttatgatctagtgctgtttgctgtgattctgtagtttacggtggggtgtgtggaaactagggccaagaatatgtgtggacaaaataaagtcaaacttacaacccgcagacttgatttgcgatttgattttggtcatccaatttacaattatgatatacgaaatttaaaaacacttagaattttaaaggggattctcacgacgaagacatattaattataaaaatttactttaaatcttatcaagacaatttatgcaagctaaaaaatagttcatacagatcaaaaatgtcatgaaaaccaaggaaaccaagtagctcaagttgtaaatttatacggattgtgcaattggtaaataaacattaattttgataatatcgttcacattaaatcaggtaaaaaaaagtgtacttcgcatgaagtgtagcctaaagtgttgggtgacacaaaattgttagaaaatgataggaaaaaacaatgcattaacaaaaataaagaaatgtgtcgtttgttttcttctctggcattgttatagttcttattattttttgtctctgcttcggcacaaattctagtgtattcgaatcttttgttttagtcactttttaaatttgaacaaattcgaggcaacgtagattctttcgagtagtattcattgtttctgagtagagtagttcggtagacagaagagttagagtaggcaaaactcaccattggacgatagccagcaccagtagtagccgccattggttggggtgtccaattagcacctggtttcgctgtatttttaggtgaattccattgcacgggtctatgagaataatggggtaagagagtaatgatatatagacgacgtcaatgaacacggcatttgaattttgggtttttttttttgggtatctaaatagatttctgcgtgatttcgaaccatttttttgatggattttatgtacacgtatggaacatgaatatgggagggtcagttcggaatggtattggataaatggtaagggatcatcaaaggatctgtttcttcggatgtggaacataatcttcagtcgatcaaaatcgacacgattcagccatctacagcgaatgaactggaagggatgtgacaacatggattctgatcaacattctggtttggtttggcttcgctttcgaacgcacgcacacacaatcgtcagtttactggctcgatttactcactttgcacttgccgttttgttaatatttaagttatcaacgagtgacattagtgaactatccaagtcgccggtaattatctttccagtgccagccggtggctgctgctgttgctgctggttcagttgatgctggtgttgctgctggtgctgctggtgctgctgctgttgtaacgctaggatcgaactgctattgctggagtaacctgcggcgacaacgttcatttgattgctgttgttgctggccgaggccggcttgaggacgtcgcccaaggcatcgaagccttgataggtttttacaattcagacaacatggttgtttggggatagccatagccaatgcaccgtttttagcagacatttatacacagagacaaacacattggtatatatatatatatggtagatatgcattaacaatgaagccgatgagcccagaggattggttttgatgtttgtcgagttagcgttgagttcgattgacgtagatattcgatatttcggttttaattcgtttttaagtttttttttttttcattttgccagcgtaatcataaaacacacaaatatgttttagcgttttgttgagattttaagtgttcaatatgtatttgtgccaccaacattaacatgatacaatgtgaaattgtttttagttttgatattttgattggatttttacgttcagtacataagaacataagagagagaaaaagagaaaaaataacatttacaaaataaataatatgaaattgcattttatatataaagatttgggatatatcgatctctaatgatttttgatatatgtaggattaataataggttgttatttacaaacacatgacagacgtaagattatttacaaaagctaccaaagcagaatagttttttgttaatgaaataagtgcgtttttttttagtgtaatttaagcattatatcatcgtaaatacaatacgtcctgatagttatgtgaaaagttcaggttcaaatagcaaatagggaatctgacactagaattagttgacctgaactcaaaaacgtaaatcaaaagaatagttatcacacagttatcacatgaaacacacattaaatacttttttccaaaaaataaattaaaactatttagacaacaacacagctttcttgtcaattacgagacgagtttatagtcgattgcagacaaaatagctacaaaacacgagcagacaacagagggaaaagcgtgttctgtttggtgtggatgagcatctgatgcactgggcgcaaggctcaggagattttggatgctgagatagaaaagtcagtgtccgctgcagcactacaagccagtgatggatcaagctttgtacaaaaacaaagcacgcggaggaacatatgcttgtgtttaatgggtttgttttcgtattcgttttgcggcgagggtctgcaaatcttcacctggtggaaactgagctgctgacatggaaggtgtcaatatcgcttgctgttgcggcagttgcggccggtgttgctgctgctgtagttgcagctgctgttgctgctgctgttgcacatataaagccgcttgctgttgttgctgcagctgctgatccatgaaatttatattgttgccaaagggtgcagcaacagattcagcagggagtgggatttggggcaaagacatatcatcgaaaaatggatttggcaacgacgtcgaagctgtgtaaaatttaacgcaaacattcagaggataaccattaaaataaatactaaaaaataaaaagaaattattaaaagtccgaatatgattcaaaaactagcattgaggaatacaggtaagggattaggttcctaacataatcacgcatatttctaatccagttttagaatttcaaagacctatatatacgtaaaatggaattttcttaactttttgttgaacttgtttaatacatgaaatcaatcaggcatattaaattacatgctacatttatatcagtataattcaaacacatcaaagttggatgatattgctagcattgttattgcctttgccaattagtaaacttaaacgaaccactccgatttttactcaatttggaatagttagtaaatcataagcattttgttagtgactgcatattaagtattcaaatatgtattcttaggattagattgtagcttgcagttaggaatgaatgaagactgtagaccattgagtgacttacctgccggttccgtattaccaaatacggatgagaaattactatcggaaacgaatgcatttgtagcagcagcggaggaaactgatgcgccattgaaacctatttttgtttgttttattttgaaatttgttggtggttttgtctcagtttagttgggtgtagtgtgggcggtggacagtgggcgatggtcgtttggaagatttgcgattggtttggttttcgtaaccgaggagttgttttcggtatcgttgttgaagatgttgtcattacagtttcagtttggaaaaaaacagtgatgaaaaaatgaagagtaacaatacattagacaagaatttaaaaaaaaatcaaaacttacaaaaataattatcgtaaataattaaatggatacaaaatataccattatgatttcaactatggataatgatgcatgaaaacttgtgcaaatagacgtctaagctgaagtgataggaagacagacaaagggtgaggggcgtctagagcgcctaaaaagtgcgctcctcattgctctgatttttagagtacgacaacataaatacgtaagatcactacacttacacaacgaatgttacctatgtacagcacaaaataaatttaactcatatcgtaatcgctaaacaagaacttaggacgaaataataagaaaattataacatgctaccattattatgcatccacaaattattggcattgagtgcagcacctgtggctcctacagcagctgctcccccaccgctggcgtcaaacatgtccgcgaaaggattgcccaactgcagcagatcgtcagaggccttggtggctgctgcagcagcagcgggctgcgccgacgcggcaccgaacagatcaactatcggctggccagcctgcgcggctggcggcgacgatagaaatggatttgttagtgcagcgctagcgccagcagcaccgctgctagtgggcgacgacaccttggactaacaggcagataaatggaccaattagtttgtgatttatacgtatactgctcacaatgaactcaccttgtattggttcatagcggcttcctcttcggccaaaacctgggccttaagctgctcgtcaatgccgttggtggtatcaaatttgctggacgcagctgcagtaccaaatgccgagctggtagaagacagggcagatacagcggattttacattacgctgattactaatgtttcccagccatcaaaaacaggtgcaacgcaaaaaccaaggaaaatcatagaaaaacaaaagaaaagaatgttaaaaatatatcgcaaataatacattgatacattaatgataacagttcagtaaataaagtatttatacaagaactaaaataatttgtaaactatccataattcattgccaaattttacataatttatcttattattttatgttgcattataaaatttgaataaaatgtacaaaatacaagtggttgttagtaggaacccaatgtttaaattatgttagcatataacaaataaaagtaatatctaaaagatagattttggagcttagaaatagattaacaaaccttgatgactgcgtaggagtattagcagcggatacttttcgaccctcaagcgtggccaagtgctgctccaaggcatctaacaacgaactgggcgccttggtcaaatcgggtatgtcacccttgtctatgcccacattctggaagcagagaataaagcaaatgaaaatgatttattacatatgataaataggataactcttacctcagccacttttaaaaactctccaacacgatccatgcgcactaagaactttttgtaaagatccaacgcatcgcgggcatgtttcttgttcatatcgaaatatttttcaagcaaatttatgatgccatcattgtagcaagcaaacaatcgtatgagatcgcggaacaagagcataaagctcatattgatgacgcctgaaaaatattaaagtcgttatagttttacaatataatttggaaatatattcataccattagacaagtcgttggattggcagtcgaactccaaaagtgcatccaattgtgcctgcaaaactggcaaagtctttagaagtttttccgcgttcatgctgcgtagcgagccttcctctttgctaaaatgatagattgcgaaacaaatcaatcagatgacaattaaatgtgagctggcgttacttacccccgtttgactttgcaaaagtcaaaggccatggctcgataggagagcgatttctcattcaaatacttggcgtagcgccgaataaagggagacatatcgtaacctgttgatttaacaaattatagtattggtctccaacaatataggtcacacaaattttggacaatgccaaatacgaaacttaagaagaatggtcttttggttagttaatttcgctctaaatcataagtaaaacaaattttagtaacaaccagtaaggaattcaacgcctatagccaaataaggaaagttgtatccaattgctaatagcttctgtataatactcacccattctgccaccaggaacgcccatgccaccatctgtatataaggtttatattgtttgattttgaatatttagtttggataattgcatttttcagttgttgttagccagcatgtagtgtgcggtatgtaggtcagtaagcagcgcatttcggtattaatatttttgttttagagatttttgttaagtaaacaaaattacaaatgatcaagccaaacgttcgcgcgcattcgcatgagttgaaagagagaatgagagaggaatgatcaaaatgtaggtattagttaataatttgaaataggtaaatcgattgaatagtcgatgggtttgaaacaaatttgggaggcttaaaagggaggcttcgttataccttgtacagttcctttgtccagaaaggagctgagattgaatgtagaattgctagaggcaagatattgcataaatcgctgaaaagatttaggaaaaacaataggaatgctgttaaatattatttagataattataaatcgcaattaaatggagggaactataaaagttgatgtgttaaaaatttaacatttatttatttatttttcagagaagacaactttttatgtcaccaaaaaaattactaagaaataaaactgaacgaacaaaaactgaaagtaaaataccacacaacgatatacttggtcagaggtcatcccaaaagagtaattctgcagtaataagttgccattaaaggtacaagaaggaaaataataagaatctcatgatgtacgtgacctattcatctgtatattaaatcaaacaaaatagattacctcatttcgaacgcttaaatgaaagtaaaaatgtatttgaaatacgcccctaagcttcgcacaaacactagattccgataaatacacaaatacaaacctcattgccatatgccatcagatgatgtgtggttatcagcgacttgtagacgacgacccagttggcattctgtgaacgctcgataagtaaattggccagatgaggtatcgacacattcggctcgtttgtgcagtgcaccaaatctgcaattaaataaaggtatgaaacttatattaacacaaagcaaccacaaactaatttaacattttacattgatttaaaataataaatgaaaatcattttattaagcatagctttatattagtttcttaacgcatatccatacagtagattagaaaacaataaagaacgttttttttttttgtaattttcggttagtgaaccatttgctcttttccttaattttgtacgtccaactcaactttacttttggttgcgattaactttgacttgatatttattttcccaagcatttattggaaaaatcaatcagattcgatataaccgccgacaactattagttattatcctctagatttattcaacagtatattttttttacgaaaacttagttcatatgagcaaaacaacaaatgtttacatgtttaagaagcaacataaaactttaaaagtcaatttatctgttccagaaacaaacaacgtttctgtaaagattattattattataataaccgaacctcccataaatttaatcatcttgttttttgcgtcccgttatcggtcgcgactcttagtcgttgtttgcttatctgcgctttaagcttgcagccgccattcaagctaaatactgacggaaaagtgtcgatgataagagctgaatcccattgtgtctactatcatgcgcttccatttgaatcaattcccatttcggttggaaagtgtttgtcgccgagcaagaaaaaattgcatgggattcgaggggcgttgcacatttcacaagccatcgcagatgttcgccgtccttttgcttcattttgtttggctgacgggcgccaggccagtgattcatttatacataaataagaacaaatttcaataaacagtaaatgtggaaaattgatcggtccttgtaaacgaaactggtgagtttcttaacgagcacagtggcctgggggtgtcactttatgacaaaacgttgaaatcgctgagtagttaagacattttgaatgagttatttagttaaaattcgtatccgccctttttgaaatcttcactgattcacatatatttcgaaaatatttacagtgctcggataccaaaagcgattggcgacttctgtagcgtagttatcgctggggtcaattcgcatgcttatgctcttaaatacataaataaataaatgtgtcgggtatcgagactccactgtagtgggggaccattgatacttaattttaattattattgcccacttgtgtagctggttgaaatattctgggatcttttcaatcggtgtaaagctcattaagtgctgttgtttccgtgaacacacaactggttttatcataggacaaaagttgttaacaaaagaaaatagagaaaataggtagaagaaatatatttcatgctacctgctgacgtcttgtaaaatgtacggactgacttttaactcaggtttaatttatttagacttttggtaactgaattgagcataacgttttggataaagtaatcaacttgaataaacagcacatgtggccaaattttgggttatattggaaattggtttgcggcaactgcaatacaatgtttatgtgacaagtaacgccccacaatattgccctcttttattcccatttactcgtagccatatctgatgagtcatctgaaaagtgccaacaagctaaataaaagggggtcaaaatgcgagcaaaactagccaaaaaaacagattccaacgggaatgaatgtcgttaggatatggagctctttagaagtatttgcaaaattcaaacgtgtaagcaaatccagcaaattagggaagactcttgcataaatttaacaagcaatgacaccgtgacaaacacaatccctgctttcgtaggcgttttaagccattcaaagcccctacaaacacacgtgcacccgtgggaaagtgacgtaacattagagagagagagagagtgtgttggtagaaagagaggggagtccaatcaatgacgaacggagtccacaaacaccagcagctgagccacagatgcaatttgagggtggtggtttgtgtttgtgggactttgtggaccgtaatcagtggtttcgttttcagaaaactttgtgatttatcgcacaaaaacaaaaggcacgtgaaaatggagcgaggaagccaagaaacccgaactggttgcatctgaatgttgttgctaaattacttttgcagcgtactaactgtgccgatggtttttatatttaggctacatttaaattttttattttctttgctaatttgttaggcactccttactttagtatattattcattccaatttttattattattaaaatttaagttaatttctaaacagattttattgcgacttatgtttgcaaataaaaataaattaattttaaagcgttacaaagtaacaataatattttcgtgtgtttgatgggtacatttccactagtagcacaaggctgtgcctcttttctctctgtgttataacaaggaaatgtaacggtgatttacgcaatgaaagaccaagagagtgggcaagggaaagagatagacagggcaactcacagtccaagtgcttcttcttcgggccaatgcattcctccgtggtggccttgcaaacggacttggcgagtccttggcccgcaaggctgtgacgggcggccagcagcctgtcgttgatcgtttgccctgccatggtcatgatgaagctgttgctgttgttgtttctgctgccgctcgctggtttttatttacttgattaatttaattatgcaccaaaggagctgaccacaccgacacacacacacactcgaaagcagatacagagagagggagagagagacacacacacacacgcgtatggggcgagcgagagacagagaggtattgattgattgagaatatttcgaacgggaaaactctgctatgcgagcctcacgattaaactaacagtaaagatttagtggttcctacgtcacaatcactacacaatttatcgccgcggtttatgcgctctctaaccggtgcctaacgctgaaacgcgattttttaattctctatttttcctctgccacaaatcgataatggcgactggcaaatggagcgagcgtatgagcaatgtcctaaagcgtccacaaagtggagctaacgcgtgcaatcgacttgagtttacggcgttaggtgggaaaatatcgattgccataacgtaagcgaatacgaaatagctgaacttagcttttacgatgtgttcatataagttctgaaaataaaaaaaaataatgataaataaataaataaaaatataaaatattaagatactataaataaatctttttttataacttagcacttaaaattccccaacagcagttaaaaagtagctagatttgtcggaagtgtagccaaacgtaacgtaagctaaggggctgtcaacaggaatttttagtttcgagtaggcggtcatactggtcattaaaataaataaaattatactaaaaaacagtagttagcacaatcaacagtctcgtaataaaattgtaagatgttgaatggacagattgcacacagttatttggagaactcgtgcacgctgatcataccccgcccgcctgtcctgaatcagtcctcaaagtcggcccagccagcagcagctgctgctgcttcttcttccgctggtgaggagtttggtcaggaagcggggtcggggttggcggaagcggaggcgttgcatgtggatcgcataagaaactgcgatatattcgttgacgcgcacgatctttatttctacgcagatgttaagctgtacaagtgagtcacatccggcaatctgtcgtgcccatggtgggccatggtggcgaaattccagcgatatcattgcgtacttgtactcccttttcggacagattccacagccgtcgcaccttcgacttgcgagagctgaagacgctgttgataaagttcaacacgacagagaatcactaccaaatttgcctgcgctgtctgcccctaacagcgggtgcccaggaaggacccggtggagaaagaggcggaggcggtggtacgggggatgcagccaa

SEQ ID NO: 4298 - DNA, 2159 bp, DROSOPHILA
ttgtggcagaggaaaaatagagaattaaaaaatcgcgtttcagcgttaggcaccggttagagagcgcataaaccgcggcgataaattgtgtagtgattgtgacgtaggaaccactaaatctttactgttagtttaatcgtgaggctcgcatagcagagttttcccgttcgaaatattctcaatcaatcaatacctctctgtctctcgctcgccccatacgcgtgtgtgtgtgtgtctctctctccctctctctgtatctgctttcgagtgtgtgtgtgtgtcggtgtggtcagctcctttggtgcataattaaattaatcaagtaaataaaaaccagcgagcggcagcagaaacaacaacagcaacagcttcatcatgaccatggcagggcaaacgatcaacgacaggctgctggccgcccgtcacagccttgcgggccaaggactcgccaagtccgtttgcaaggccaccacggaggaatgcattggcccgaagaagaagcacttggactatttggtgcactgcacaaacgagccgaatgtgtcgatacctcatctggccaatttacttatcgagcgttcacagaatgccaactgggtcgtcgtctacaagtcgctgataaccacacatcatctgatggcatatggcaatgagcgatttatgcaatatcttgcctctagcaattctacattcaatctcagctcctttctggacaaaggaactgtacaagatggtggcatgggcgttcctggtggcagaatgggttacgatatgtctccctttattcggcgctacgccaagtatttgaatgagaaatcgctctcctatcgagccatggcctttgacttttgcaaagtcaaacggggcaaagaggaaggctcgctacgcagcatgaacgcggaaaaacttctaaagactttgccagttttgcaggcacaattggatgcacttttggagttcgactgccaatccaacgacttgtctaatggcgtcatcaatatgagctttatgctcttgttccgcgatctcatacgattgtttgcttgctacaatgatggcatcataaatttgcttgaaaaatatttcgatatgaacaagaaacatgcccgcgatgcgttggatctttacaaaaagttcttagtgcgcatggatcgtgttggagagtttttaaaagtggctgagaatgtgggcatagacaagggtgacatacccgatttgaccaaggcgcccagttcgttgttagatgccttggagcagcacttggccacgcttgagggtcgaaaagtatccgctgctaatactcctacgcagtcatcaagctcggcatttggtactgcagctgcgtccagcaaatttgataccaccaacggcattgacgagcagcttaaggcccaggttttggccgaagaggaagccgctatgaaccaatacaagtccaaggtgtcgtcgcccactagcagcggtgctgctggcgctagcgctgcactaacaaatccatttctatcgtcgccgccagccgcgcaggctggccagccgatagttgatctgttcggtgccgcgtcggcgcagcccgctgctgctgcagcagccaccaaggcctctgacgatctgctgcagttgggcaatcctttcgcggacatgtttgacgccagcggtgggggagcagctgctgtaggagccacagggaatgccggtgatgggacagccaagtatgatgggggggcaggcagcagcccctttgactggggtgcaaccgacgatgatggcggcgccgcacagtaatgcaacgggcatcatgcaacccatccagccaacgcagaatggcagcaataaaggcgtcccactcgacccatttggtgcgttataagcggtccagaagaagctcatacgtgcaacccactcaccactcactcactcactcagtctaagcgctctaacctcatagacggaaaacagaaaacacactcacagacacaaatgcgtaatgaaaaattaaatataccaatagctctatatattatataaacgtgcaagtgaatattaagatcttgaaactgtttacacgatgctacagaaatcatatataaagtttatgaaaaaaacggcagcaatagcaaacacaaatgaaacggaagcagataagaaaattatattataat

SEQ ID NO: 4299 - protein, 468 aa, DROSOPHILA
MTMAGQTINDRLLAARHSLAGQGLAKSVCKATTEECIGPKKKHLDYLVHCTNEPNVSIPHLANLLIERSQNANWVVVYKSLITTHHLMAYGNERFMQYLASSNSTFNLSSFLDKGTVQDGGMGVPGGRMGYDMSPFIRRYAKYLNEKSLSYRAMAFDFCKVKRGKEEGSLRSMNAEKLLKTLPVLQAQLDALLEFDCQSNDLSNGVINMSFMLLFRDLIRLFACYNDGIINLLEKYFDMNKKHARDALDLYKKFLVRMDRVGEFLKVAENVGIDKGDIPDLTKAPSSLLDALEQHLATLEGRKVSAANTPTQSSSSAFGTAAASSKFDTTNGIDEQLKAQVLAEEEAAMNQYKSKVSSPTSSGAAGASAALTNPFLSSPPAAQAGQPIVDLFGAASAQPAAAAAATKASDDLLQLGNPFADMFDASGGGAAAVGATGNAGDGTAKYDGGAGSSPFDWGATDDDGGAAQ

SEQ ID NO: 4300 - DNA, 8307 bp, DROSOPHILA
tgattttgattcagatcgaattagcgtaaaattgagcgttcgtcaacttttgggagcggggtcgcgaccactcactgatccctgccagcgccaagggggggtggcaggcatccagtcggatgaagattcaggttgggatttagattcgaactcgcaggcggaacgtgggctcattgacaaagtcggagttcagatcatcagatggcgcaggccgcgtgcggggcattaaagaggcgtggaaatcaagacccaccggatgatttgcattcgcagtggcttctgctgcactggaaacaattatcacttcgattttgaacttttaaatgagaaataaacagagtgcgttagaatttgtacaggtattcttgcgcattgcccatctaagcatttttcaatcaaatttgatggatattatgcagctgctgtaaaattaatttttaatgttttacctgcatttcgagcagtgtagctctcggcgtaattgaccaagttattctgcgcttgcttggcccggctccttggggcaaattgattttgcttcgtgcctcatcagcagcgacaattgcccttgccctgatcgccatgatgattgggcttcctgcgcttcttgggcacttcttcgtgcgctcacgtagcagctacccctctcgcccctctttccagcgcttacccttttccctgaccctgaccccccttgacatcctggcccgccgcctctggtggctgctgctgttgtccctcgaccggctaccgatgttttttgcggtttcacactttggttaaggttcctgcccttcgcactcggacttccactcgcggtcagccgccagtcattgggtcacagcccgcagaaggaagatggcccaaagtgcctattcgtcaaataaagtcgacctcaatacgaattgctaaataatatgagtgtatgagtaggttcttatttggatttttaaccaaacacaaagtatacaaagcaataaaccaatcgcctatggaactattctggctagcattccatttaattattccaaaaattaattacataagaaagatcttatacatactaaaaaatatgtttctcgtttaaagaaatttatcattcactgttcaaaagaaaactgaaaaacttaaaaagcaaatgccttacaaaatggtcagtttgctacgtacgaaaccaatcggtatttagcttagaaagattgtttatgattattggatatcagagttatcttacaaaatacgaaatttaatgaacagcttgtggggggaggggtgaaaggacaaagagggttgacaattgttttacttaaactattacaaaaaaagagcgcggctgaaacttgagagcgagtcccagatgctgcctacttaatgtacttgtccatgaacttcttgtggaaatcggagcgcagggcgtcattgacgaagtgcgtcttcttatcgggcgcagatctggcgcaattcttaaagaccacatcatcgtcccagcggcgctttatctttagatcaccgcccagtccagaggcacgtcccgctgccgaggcggcggtgccgggctcatagttcatcagtggattgccggacaggatgttctccatgcgtatgcgttcgtcctcctgcttcttttccgactcgcgacgcgccgtctcctgcagacgttcctgcttgatcttctgcagctcggccagcagggcggcatcatcgtcatcggaatcgctgtccgaatcggagctatcgttgtccagcggctcatcggcgtccatattggcggcctgctgctgagccgcctgctgcgcttgctgctgccctgcgtccggcttggaacgctttgcggcactgctgccaccgccggcgttgttcgcctcaatcgccttgcgtacaatggagggcagtgccttgcccgacgacgacgaagtggctcccgttccggagcgcgcctcacgttcgcgctcctccagctccttgcggaagtcacggttgcggttctcatcgctggtgccctggccagtctccctgcgcaaacacaagttctcgttagacaaggaaattgttatgtgggctactattaatccttacctgtatttcagtttcgtgtggcctggcaaatcgcgactggagtactgcttgctcagtgcactcagatccttttcgccgcgaccggatcctccgcgggctggatcgaaggtcggacgcgctgctgtggtcattttcaactagctagttatgcgtttaattgttaaattgatgaaaagtgaaatgaatttccgaactgcgtgctttgtttgatgtatcaacagtaccaataatcgagccgtaccacggtcacactgaccgataggcctttcgatacacgcttagtgcggactttaaccgtgataagggcggctattgctgggcatcactggaacatcagctgtgcgcaccaatgggcagcattgttacggtaaacacgcgcggagcaccgccgttttatccgacaaacaaaaaaacgctgaaaaacaaaacttttcggcaacttgaagcgattttaagtttagtttagccaaccccctgctatccatcccccaccgacggccatgctggccaatttgcgcgcctgcagcggccacctgttgcatcacagcctccgaaatgcaagaattccacgacgaagctgggcgagcacgactgctggcaaggatcagccggaggaggacagcctgaccatcggcgatgtgagcgtgcggctgcgcaagcccaaggatccgcaactggtgccgcagcaatacggtgagcagggggatgccgggaagtgggaagccaagatctctggacagtgcaaaggtcaacataaagatcttggtgccgcagaattatttcatcattatcattatatcatgtcattatatcatctttgagtagcagacacatcaaggattaaagagaccacggatctaaagcgaaggaatgaatgtaaaactcatggtcatcgagaaaagaccactataatctcaagaaaattcctatgtgaaaacaagctacatgctatatttcataattggccaaatcgacaaattatatgaggcacaagctatccgaactcgagacttaataaactctgtatttggaggaccaaatgatttatgttttaacacgaacctttcgttcttgtatccatccaatccgatagtgaaatacgcatcggatggcacccttcagctgtcgcaatcagcactgcaccacctgcgctggatgctgcagaaggatgcactgcgtcaggacatgtttctactggggcaaccgggtccgctgcgccgccagctggccatgcagttcctggagctgacgcagcgcgaggtggagtacgtggccctcagcagagacaccaccgagagcgatctgaagcagcgacgtgaaatcaacgacagggcggccatcttccacgatcagggagccgtacgagcggcgctcaatggccgagttcttgtcctcgatggagtggagcacgcggaacgcaatgtcctgcccatactaaacaatctgctggagaatcgcgagatgcacctggagagcggcaagttcctgatgtcgccggagcgttacgataaacttctagaggtatgttagctgtttcctgtgtgcacgttcctagtcctctgaagcttgctaatcctcattctcatttgttttagaaacactcgcgggagcagctggacgaatggggtctgctacgcgtatcggagcaattccgggtggtagccttgggtctgcccacccacaagtacaagggcacgccactggatccaccgctgcgctcccgcttccagtcccgcaacgtgaccacatattcgtacggcgagctgtacgaggaactgcagcaggaggcgccttctgtgcccggcgagcagctgaagcagttgctcaccttcgccttgaccctgcagcaggcggatcctgtgctccaactgcccgactttcccatccacaatctagcattgggtgtcaagatgctggtaggtgtaccccttcacatttccgtataaaatacttacttttccttctgcttcttcaggcggctaatccctctctgagtctgcacgacgtcatcagtcgcatttatccatatcaaaccatgctgaagcccgaccagaagaagcgtgtcgaggagctactcaagaagctggatattcaactggtgcccagcccgagcatcaaaaaaatcgaagcacagtcgcaggaaaactccctgatccacataaaactggacgaattgcagctaaatttgcctgaaggccagattcctacggcttctacctactttgtcgatctaccgcatcagaggcaagctctcgccagtctactgcaagcgtatgctgtcggggatgtgtgtctcgtgggcgagaagggtgtgggcaagctgacgctgacccaggagttgctccgcctcctgcagcaaacctcagagcccatgatgctgtacgaggacatgaccagcagggatatcgtccagcagcgtatcacaagtccccaaggagacaccgtatggagggactcaccactggtgcgagctgccaaatcgggatctgtggcggttctaaatggactgcatcggctacacaagagcacggccagcgttctgcagcggtgagttagaaatagaaatagcttcattaaagtgatatattctatgaaaaatgtcccatttcaggctcatccacgatcgggaactgcagctgtgtgatggcaccactcttctgggcgcaaatcgctaccaggcactgctacagcagggattctccaaggaagagctaggtaaacttggttttctacccatccatgagtctttccgcgtggtggccttggcggagccaccgcgtctgggcggcggacaacccagctggctgacacccgagctgctcagcctgtttctctaccaagaactgcgtcccttgcgtcagagcgaagaggcggaattgctggcgcagctgtgtggtggagatttacctgctggtatggatcaactgctgaaactggcccaactgctgagatcttcacaggatccgctgctccagggactggcgggcaccctctccactcggcaactactcaagctggcccgccgtttggcggcctatccagagagtgagctcagcgatgtgcacgaaatgctgcagaacactttcctggccagatttatgccggccctgtcgaggggtgccttggaacaggccatccaacaggtgggcataaagccgcgagagattaagctgaaaagcaaaaaaaatcaaattgctgtggaggataactcgctgcggatcggctccacccgttggccactgggcaatccgactcaggcgcagctatccaaggtgccgcacaccttgttctacgagatgccgcagcatgtccagctgctggagcgtctgctgcaggactacctcatcggcgagcacctccttctggttggcaatcagggagttggcaagaacaagcttgtagatcgccttctggaactaatgcagcgtccgcgcgagtacatccagctgcatcgggacaccacggtgcacagtctgacgctccaggcgactctaaaggatggccaggtgtcgtacgaggacagcgccctggtccaagctgtacgaactggtcatgttcttgtggtggacgaggcggataaggcgccagtgaatgtcacctgtatactgcgaactctggtggagagtggcgagatggtgctggccgatggccggaggattgtgccaccgggtgaaggcggtagggtgcccaactcgattgaaacccatcccgatttccggcttatagtcctggccaatcgtccgggtttccccttcctgggcaacgacttctttgctgcgcttggtgatgtcttcagctgccacgctattagcaatcccgatccggaatccgagatcttcctactgcaacaatatggaccgaaggtgcccatcaaaacgctacgcaccctggttaatgcctttggtgaactgcgaactctagctgacgagggaatgctcaactatccgtactccacccgcgaagtggtgagcatagtgaagcatctggaacgctatccggaggagaacatgtccgaggtggtgggcaatgtgctcgacttcgatcgctatcaaccggaggcactgcagcaggtcacccaagtgctggccaagcacggcatcgaatcctacgccgaggaagagatccaggccataaggaagcaaaggatcctgcaggcatccgtgaatcggcatagtggactgggcgtctccggtccaaagttcggcaagttagatcccaagaacgaaccgcatgtcggtggcaacacgtgggctggtggcagtggtggtcgtgacaccgccggactgggcggcaagggtggcccattccgactggacaagggccacaaggtccatcagctgagcgacgaggagaaggccgatgtgcccgaggagatcaagcgggcagcacgtgaaatgaatcgcaaggcgttcgaggacaagctcaaagagatcaagatgtccgcccacgaccacaagctgtatgcccagttcagcgaacccaatcgcaagcaggttcagcaactgaaggccgtcctggaggccatgcaaacgaagagcaaggagcgccagtggcagaagtaccaaacgcacggcgatctggatgacacgcgcctggtggagggcatcaccggcgagaagaacatctataggcgacgggcggaggccaatccctgggcggatcatgtccaggagaaacccaataggcttaagctggtcgtagatgtatcaggatcgatgtacaggtaagcgtgatggcgatatccttggaacacccatttaaccgcacatctttcaggttcaatggttacgatggacgactggaccgtcagctggaggccgtggtcatggtgatggaagcctttgagggcttcgagaagaagatcgtctacgacatcatcggccacagcggcgagggttgggagattccgttcgtgaccgcgggcagtccgcccaagaacgacaaggagcgtttcgaggccattcgcatgatgcacgcccactcgcagttctgctggtccggtgactccacggtgaaggcggcacgggaggcctgctcgacgctgggcgcagagcaggactacgacaatgccatcgttgtggtcctcagcgatgccaatctgcagcgctatggcatcgcacccaaggatctggctatggcgctcaaacggggcgagccgaaggtcaagggctatgccatcttcattggcagtctggccgaggaggcggatgagtaagtttgatttgtaagctttctatctttactatcgctatatctaatcctttccagaatcaatgcggaaatgccggctggtcagagcttcgtgtgcatggacctcaccaagctacctcacatcctgcagcagatcttcacctcctcgctgctttagtgcaatttctaggattaggatttatgttgaacactgtgttgataattccaattattgttaagcctaaattgagtctataataaatctatatttttgtctagcactttcggtttttgaaagtagttgagtgtagaagaaaacatcgattgggttttgcatttttatttgtattgtttattaattgccttgctgtttatgcttgctatttgattacttgtcatataatttacaaattacataagtattcaatacaaaaaaaaaaaaaaaaaacaatttcgaactcgaggatttctctggcagggatttctcgcattctgacggggattacggggtatacaaaaaaataaacaattcgtggttttacattaattaaatttggtataaaaatctaaaacaatttcattcccttctcattcacattacattttacattacacttttgttttttaatgatttttcttcacttttttttttttgtttcgtttgtatatgcatttctgtatttatattaaatattgttgcaaattcatgaattaatgtgttagcaaaaaacgcttaaatatacgtgtgtataatatatactcttgatccgttaaataaggtgtgcgaaattcgtgacgggaacagcctcgtataactcgtataagttagccaccaagatccttgcaactggaagtgttaatgttcgataaaaaaataaaataaaaaaaaaaacggaagaaactgcctgctccagacacttatgtcgcgcaccttactgcatagtctatacaagttttgatccttgcacaattctcatgatctatgtggccaggaagagggtcggattcggattagggattgatcgccttacacatgtataa

SEQ ID NO: 4301 - DNA, 4735 bp, DROSOPHILA
ttctggctagcattccatttaattattccaaaaattaattacataagaaagatcttatacatactaaaaaatatgtttctcgtttaaagaaatttatcattcactgttcaaaagaaaactgaaaaacttaaaaagcaaatgccttacaaaatggtcagtttgctacgtacgaaaccaatcggtatttagcttagaaagattgtttatgattattggatatcagagttatcttacaaaatacgaaatttaatgaacagcttgtggggggaggggtgaaaggacaaagagggttgacaattgttttacttaaactattacaaaaaaagagcgcggctgaaacttgagagcgagtcccagatgctgcctacttaatgtacttgtccatgaacttcttgtggaaatcggagcgcagggcgtcattgacgaagtgcgtcttcttatcgggcgcagatctggcgcaattcttaaagaccacatcatcgtcccagcggcgctttatctttagatcaccgcccagtccagaggcacgtcccgctgccgaggcggcggtgccgggctcatagttcatcagtggattgccggacaggatgttctccatgcatgctggccaatttgcgcgcctgcagcggccacctgttgcatcacagcctccgaaatgcaagaattccacgacgaagctgggcgagcacgactgctggcaaggatcagccggaggaggacagcctgaccatcggcgatgtgagcgtgcggctgcgcaagcccaaggatccgcaactggtgccgcagcaatacggtgagcagggggatgccgggaagtgggaagccaagatctctggacagtgcaaagtgaaatacgcatcggatggcacccttcagctgtcgcaatcagcactgcaccacctgcgctggatgctgcagaaggatgcactgcgtcaggacatgtttctactggggcaaccgggtccgctgcgccgccagctggccatgcagttcctggagctgacgcagcgcgaggtggagtacgtggccctcagcagagacaccaccgagagcgatctgaagcagcgacgtgaaatcaacgacagggcggccatcttccacgatcagggagccgtacgagcggcgctcaatggccgagttcttgtcctcgatggagtggagcacgcggaacgcaatgtcctgcccatactaaacaatctgctggagaatcgcgagatgcacctggagagcggcaagttcctgatgtcgccggagcgttacgataaacttctagagaaacactcgcgggagcagctggacgaatggggtctgctacgcgtatcggagcaattccgggtggtagccttgggtctgcccacccacaagtacaagggcacgccactggatccaccgctgcgctcccgcttccagtcccgcaacgtgaccacatattcgtacggcgagctgtacgaggaactgcagcaggaggcgccttctgtgcccggcgagcagctgaagcagttgctcaccttcgccttgaccctgcagcaggcggatcctgtgctccaactgcccgactttcccatccacaatctagcattgggtgtcaagatgctggcggctaatccctctctgagtctgcacgacgtcatcagtcgcatttatccatatcaaaccatgctgaagcccgaccagaagaagcgtgtcgaggagctactcaagaagctggatattcaactggtgcccagcccgagcatcaaaaaaatcgaagcacagtcgcaggaaaactccctgatccacataaaactggacgaattgcagctaaatttgcctgaaggccagattcctacggcttctacctactttgtcgatctaccgcatcagaggcaagctctcgccagtctactgcaagcgtatgctgtcggggatgtgtgtctcgtgggcgagaagggtgtgggcaagctgacgctgacccaggagttgctccgcctcctgcagcaaacctcagagcccatgatgctgtacgaggacatgaccagcagggatatcgtccagcagcgtatcacaagtccccaaggagacaccgtatggagggactcaccactggtgcgagctgccaaatcgggatctgtggcggttctaaatggactgcatcggctacacaagagcacggccagcgttctgcagcggctcatccacgatcgggaactgcagctgtgtgatggcaccactcttctgggcgcaaatcgctaccaggcactgctacagcagggattctccaaggaagagctaggtaaacttggttttctacccatccatgagtctttccgcgtggtggccttggcggagccaccgcgtctgggcggcggacaacccagctggctgacacccgagctgctcagcctgtttctctaccaagaactgcgtcccttgcgtcagagcgaagaggcggaattgctggcgcagctgtgtggtggagatttacctgctggtatggatcaactgctgaaactggcccaactgctgagatcttcacaggatccgctgctccagggactggcgggcaccctctccactcggcaactactcaagctggcccgccgtttggcggcctatccagagagtgagctcagcgatgtgcacgaaatgctgcagaacactttcctggccagatttatgccggccctgtcgaggggtgccttggaacaggccatccaacaggtgggcataaagccgcgagagattaagctgaaaagcaaaaaaaatcaaattgctgtggaggataactcgctgcggatcggctccacccgttggccactgggcaatccgactcaggcgcagctatccaaggtgccgcacaccttgttctacgagatgccgcagcatgtccagctgctggagcgtctgctgcaggactacctcatcggcgagcacctccttctggttggcaatcagggagttggcaagaacaagcttgtagatcgccttctggaactaatgcagcgtccgcgcgagtacatccagctgcatcgggacaccacggtgcacagtctgacgctccaggcgactctaaaggatggccaggtgtcgtacgaggacagcgccctggtccaagctgtacgaactggtcatgttcttgtggtggacgaggcggataaggcgccagtgaatgtcacctgtatactgcgaactctggtggagagtggcgagatggtgctggccgatggccggaggattgtgccaccgggtgaaggcggtagggtgcccaactcgattgaaacccatcccgatttccggcttatagtcctggccaatcgtccgggtttccccttcctgggcaacgacttctttgctgcgcttggtgatgtcttcagctgccacgctattagcaatcccgatccggaatccgagatcttcctactgcaacaatatggaccgaaggtgcccatcaaaacgctacgcaccctggttaatgcctttggtgaactgcgaactctagctgacgagggaatgctcaactatccgtactccacccgcgaagtggtgagcatagtgaagcatctggaacgctatccggaggagaacatgtccgaggtggtgggcaatgtgctcgacttcgatcgctatcaaccggaggcactgcagcaggtcacccaagtgctggccaagcacggcatcgaatcctacgccgaggaagagatccaggccataaggaagcaaaggatcctgcaggcatccgtgaatcggcatagtggactgggcgtctccggtccaaagttcggcaagttagatcccaagaacgaaccgcatgtcggtggcaacacgtgggctggtggcagtggtggtcgtgacaccgccggactgggcggcaagggtggcccattccgactggacaagggccacaaggtccatcagctgagcgacgaggagaaggccgatgtgcccgaggagatcaagcgggcagcacgtgaaatgaatcgcaaggcgttcgaggacaagctcaaagagatcaagatgtccgcccacgaccacaagctgtatgcccagttcagcgaacccaatcgcaagcaggttcagcaactgaaggccgtcctggaggccatgcaaacgaagagcaaggagcgccagtggcagaagtaccaaacgcacggcgatctggatgacacgcgcctggtggagggcatcaccggcgagaagaacatctataggcgacgggcggaggccaatccctgggcggatcatgtccaggagaaacccaataggcttaagctggtcgtagatgtatcaggatcgatgtacaggttcaatggttacgatggacgactggaccgtcagctggaggccgtggtcatggtgatggaagcctttgagggcttcgagaagaagatcgtctacgacatcatcggccacagcggcgagggttgggagattccgttcgtgaccgcgggcagtccgcccaagaacgacaaggagcgtttcgaggccattcgcatgatgcacgcccactcgcagttctgctggtccggtgactccacggtgaaggcggcacgggaggcctgctcgacgctgggcgcagagcaggactacgacaatgccatcgttgtggtcctcagcgatgccaatctgcagcgctatggcatcgcacccaaggatctggctatggcgctcaaacggggcgagccgaaggtcaagggctatgccatcttcattggcagtctggccgaggaggcggatgagtaagtttgatttgtaagct

SEQ ID NO: 4302 - protein, 1372 aa, DROSOPHILA
MLANLRACSGHLLHHSLRNARIPRRSWASTTAGKDQPEEDSLTIGDVSVRLRKPKDPQLVPQQYGEQGDAGKWEAKISGQCKVKYASDGTLQLSQSALHHLRWMLQKDALRQDMFLLGQPGPLRRQLAMQFLELTQREVEYVALSRDTTESDLKQRREINDRAAIFHDQGAVRAALNGRVLVLDGVEHAERNVLPILNNLLENREMHLESGKFLMSPERYDKLLEKHSREQLDEWGLLRVSEQFRVVALGLPTHKYKGTPLDPPLRSRFQSRNVTTYSYGELYEELQQEAPSVPGEQLKQLLTFALTLQQADPVLQLPDFPIHNLALGVKMLAANPSLSLHDVISRIYPYQTMLKPDQKKRVEELLKKLDIQLVPSPSIKKIEAQSQENSLIHIKLDELQLNLPEGQIPTASTYFVDLPHQRQALASLLQAYAVGDVCLVGEKGVGKLTLTQELLRLLQQTSEPMMLYEDMTSRDIVQQRITSPQGDTVWRDSPLVRAAKSGSVAVLNGLHRLHKSTASVLQRLIHDRELQLCDGTTLLGANRYQALLQQGFSKEELGKLGFLPIHESFRVVALAEPPRLGGGQPSWLTPELLSLFLYQELRPLRQSEEAELLAQLCGGDLPAGMDQLLKLAQLLRSSQDPLLQGLAGTLSTRQLLKLARRLAAYPESELSDVHEMLQNTFLARFMPALSRGALEQAIQQVGIKPREIKLKSKKNQIAVEDNSLRIGSTRWPLGNPTQAQLSKVPHTLFYEMPQHVQLLERLLQDYLIGEHLLLVGNQGVGKNKLVDRLLELMQRPREYIQLHRDTTVHSLTLQATLKDGQVSYEDSALVQAVRTGHVLVVDEADKAPVNVTCILRTLVESGEMVLADGRRIVPPGEGGRVPNSIETHPDFRLIVLANRPGFPFLGNDFFAALGDVFSCHAISNPDPESEIFLLQQYGPKVPIKTLRTLVNAFGELRTLADEGMLNYPYSTREVVSIVKHLERYPEENMSEVVGNVLDFDRYQPEALQQVTQVLAKHGIESYAEEEIQAIRKQRILQASVNRHSGLGVSGPKFGKLDPKNEPHVGGNTWAGGSGGRDTAGLGGKGGPFRLDKGHKVHQLSDEEKADVPEEIKRAAREMNRKAFEDKLKEIKMSAHDHKLYAQFSEPNRKQVQQLKAVLEAMQTKSKERQWQKYQTHGDLDDTRLVEGITGEKNIYRRRAEANPWADHVQEKPNRLKLVVDVSGSMYRFNGYDGRLDRQLEAVVMVMEAFEGFEKKIVYDIIGHSGEGWEIPFVTAGSPPKNDKERFEAIRMMHAHSQFCWSGDSTVKAAREACSTLGAEQDYDNAIVVVLSDANLQRYGIAPKDLAMALKRGEPKVKGYAIFIGSLAEEADE

SEQ ID NO: 4303 - DNA, 8726 bp, DROSOPHILA
ttgttgctctggggatggagtcaaattggaatttagcatgtaagcccggttggaaaatgttcgatacaaaggcatcaacagttgtgttttacgattatgtgatctaaatatgcatatataaatgtaaaaatgttttattcttggcctattatatgtttttataagttctttacgctgacattttttaatgttgttatctatgctttcgatgcaatactattgcattgttctactcacttttattaatattttgagattcgtatttcggaagaagtcgagaaaacattattagcctgacagtttgcgtgtatatgaataaattagttattaatcaacaatatttgtttaactgctcatggtacacttcgtggaatttttataatataaagtttatccttaaatgtgttaaacttaaatgtttgttgttggttaggtacaaagaaaaatctcatggcttatgttgtatacctaatcaataattatgtttctttattggcttttagaacggatatcgcaataaactaaactcggatgtaaaactgtcatgaagctttgattagaatatgcctatagattgcatacgaaaacgaattagattgctgcataaaatttgcttgcgactagattgaagtttttacttttcgatttttcgcctatgcggtgtagattaccgaatcatatatgtatatcatatactgtaaatatagttagataaatttgctcttattacactttagctagctgccttggatttcatattgagaagggaagaaaatttgaagtatttacgattgttccctggtctgtaattttgtttttctaattgagattcggactcttgtgtgaacaatcggattcctttttaaaacatcgctttaataacacaatattcgagatttcattcgatagaacggatttttttcaacagcgagcagccacgagaaatctatatgagttgataggttaatatattcttgtgtgcccaaaccaataaagcattttagacagttgtgccgtacgcgttgttgaaaacggcacgcgaactatccgtatccaaggatatatcttcgggactggccaagtccacgcgcacattagagttggttcgacgtcgtgccgtttgcgctgcgccccagttgcttagagtccaatggaaaccagaggagctggcagccggctcggtgtccaccttaacctgggtgcagacctgcggatttaattaattcaaagcaatatttaatcgttgtggattactacggtaaacaaatgctttaagaaggttttgaatcaaaattacctctcgattgccgcatggaagggtttctgtaccgttgcccagtgccgagcccgacacagaacctgatcccgagtcacgagtactgccaatgctgctgctgctggccagcgagtcattgctcgattcaatgaccgctccccgataacgcgccacagcctggacagcctgagcataatggaaatgttgcgtgaatcataatcgttttaccagcaaacataaacataccatggcatcgccgccttggcagtcctctatcgatttaagaatttcccagaccagctccgagtccaaggggatgggctgttcggtgtcgcgattgtaaatggcaatagcaatgtgaacgggatggggcactggcaatgggatgagcagcttttccgtaacgctcttctctccgctttgctgcttccacggtcgccaggacttctggccttcttgtaaagtcttcggcacatgctgggcacggtgggcacgcaccctcggtgtggtcaatcccacagacatatccctgttaagaatttgactagcatcagttgctcaattatgttttctatatacattaccttttctcgggcttgcggaaggtgagcgttatgcgggagcgtggattgaatgcagtcacttcgaggaagggcagatgcacttgaacgttgccacgcggggcgtacacattgccgagcagatccaggcccttggagccaatcacatcgtttgcattcttcaccatctccgtataacgcataaggtcgagcgaggcatgtggttctagtttaaaatgtgtatcgtgttcagtcaatggcgttagaaaatctagactaaatatgtcggtgtatataagaccagccagtcccggccagtcgtttaccgtgagaccctggaaattaacaatcgaatttatcagtgttgggtgtttgatagtttttggtaagttcttcatactttattatcccaaaattcttcttcgctaatggacagtctgccgatgacatgagacggataatatttctctaaaatatgggcggccagttgtatagcaatcttaaagaagaacaattaatttaacgaacaatcgaaatttttagcacaaacctttaattctttggtatttaactttatgcgagatttgacttgggtggtcagcgccgtctgcaactcccttcgtcgcttctctaacttctcgtgtagcgtactcatcagatcctgcgcctcccggtccagcgataagtacggtccagttttactgatttgggctgaaaacggcccaaagcaagcctcgacaaactggaggaaatcctgctgtggctgcaacaccactcgctccgtggcatgctggtaggcctgcaactcgtccagttccattttagcctccagtgcagccaatgcctgctccggtctgattatgaaataatagtctaatgccagtccaggtccagcaattcgttttacagcaatgctatccgaagccggtacacgtccacacttcttgataaacaaatggtaggtaagagagtcccacaccagccgtagggaataccggatgaccccaactaaaagtgattatgaaagcatttagattctattagattctacatgtagagtctacgcacctataaacacgactcctgctgccaatggacagaccagcgtggccattagaatcgccgccaccggctggagcaatccctgtatgagaagattccaaactatggcttccaataggatgcagtatcgattcttcgtattatcaggtgcatccaaatcatatatgaggatcatgtagatgtggagtagtagcacgaacacgggaatccataggggcgcagtcacagccagacaaatgcttagcaagctagcggccaaacagataagggggaaggcgaataaaatgacgatcgtacctaggaatcctttcacaaaatagttccaagttcgattcagattgcgtgtcagtccctttccaataaagcctttaaagagttatattacaaaaattaggttttttgaagtttgatcctagcatttaaagtgaaagcatacccgtatctggttctgtctcaaagtgcgtacgtgacttcgatatatgtcgccacaactcgattagacgtgacgccagagtctgagttatgctcgtcttccttgggaacagtgtgccattgatttgcgatagctcaaggtcgggcataaaaggcttcacacagcagagggcgcgcagtccgaggggactgcaccacggaactagtatgccaagcaggaacatcatgttccaggaccagcaccagattcgctggatcatgtttagcaggcgccagaaaggccagcgcgtgcttgttgtgcgcagtatctccttttccaccagaaaaaccggctggctgggatccgaccgtggagtgactatgctagtggcatgttggctaatcacagtgggaattacgtcagactgaccctggaagttgcgacggatgatccacgactgtggcgaccagatgcgacacgcccattgaaagctgcgcgtgggagtcttggcgttcttcagctccttaaggagcactggctcgcgctccttcatgaaggtcaggtcacgagacaggaagtatgctgtttgatgcaggttatgttgggtgcacatttttagcgcttcctcgtgggccgaccaggcgctcttgtggagccgattctcttcggcgtggcgcagcttggagcgcagccagggggcaacccgcgacaacacggaatggtcattggccagacacttctgatggtcctcgcgagtccgcttgatattctgctccaccttgtcaacagccttgtacataattaccaccgactgggcctgctgcaccaggagttccggcactccggcgccaagctcccccagctttgcattggagatgattgagctgtagacgcgttgcagatactccttcatgacagcttcgttcacctcctcctcgatctccttgtcgttcagctttttggcacgcagctcggcaatcaaacgctcgcggaaatgcagaaaccagcctcgcgtctcccgctccagaatgccaattagaattggaagtgctttgcgcatgatgtcgcggcagaagagccgcaagtcgatctcctgtcctttgggcgtgaggaatagatagggtacgggctggctgacctcgcagctgttgaagtcgaatttttccatcgtagcgcgacgcagcatcttccggacataggaacacaggccgtgtaaacaatcctcgtattcgggctaaacaaaaacatattttaatagaatatgcatttatttattgatttaaaacaaatttaagtagagaatacgtataagacagacgaatataaggatgtatttaaatcaaatcaatagtattggtatataatggccaatgtgaaatatgaattctaggtaaatatttcttacccgacaaaccaactcggctatgagaaatcggcagcgctcctccttaatcttatagtccaggttgtgggccaaaagagccggcacaccgatgaccatatcagcaagtctggtgaacgcttccagcaagccgtgcatcgcctgcacgaccgaaaagaagtgggagaagatgcgagctcgggcagtgaccaccacgaaccgggcagccaaggccagatcgctcagaaaggagtcctgcgcccgcagcttgcccttttggagtacttgggacagacgccacttgtgcacctggccaggaaaataaagactgggcacatcgaactcgctgtggatgagtggggaaacgaattagctattcgacacgactggtagatcagagcaacataaaacacttaaatgatctagattttagattaatgacaaattgtcggcatgcacaagcgtgtaccagattcagaattatggtttgcccgattataggtgaattatattatatgttttaatgtttgtgtgagattgtgagtgtgcgttggggtatggatgtttgttcttgcaaagaactcgtttcgtagaatggctatagtcgtcagcacgtcggagatttttaagtaaaattttggtgagattacaaaccaaatgtgcaacaatgacatttttctcggattgtcttcttttcccccaagtattttgtgcggtccacagtttcggaacatgcacattcttttttgggctttattttcagtttaacgagcatgcaaatttatcagagcgactttggagataatgacttaacatctaaacaatcaacatcgattataaaatgaaaaagtatttacaaacggaagaacaccgactaaacagatttgaatgcagtggcagaagtttgcctcggcttttgtatatgccttcttgatagtgtttatttacccatttttacgtattgtttccaattgttccaaagttaatttcttcggctttccatatttatccttttgcaagctttacagaaatatgtcacacaaattttcgtttaccgtttcatgattcattggcaagtgatacacagaaataaaaacataattgtagtgggacatgcatttagtttagttagaaaacaaatagcaataaacagaccacgaaagctggtatcgtattcattttgagatagatttggatcatgccttaatttgattcttgcgcttgctgtgtgcaaagtgtcgcggaatgattggcaatggttagggaactcaaaataacgaaagaaatcactatcaggtgtgggggatgtggccaaagcgcggttaatcagcaagttggtaactgctagctgcacaattgccccttttgcatatttagccagcaactgcgcgtctctccatccatcatccgtcatccatcaatctatccatcattgcaatgaacgacgctgtctcgtgaccgcaaactcacccagtttcccgcagagtcttcagctgggcgctcgtcagccggcggggctctccgctcccgtcagatgccacggcgtccagctcgtcaaagggaggcgctataaagaggtcgcgcagattaatgggacgtgttttacggctgctcacgctattggtcgcgtttctcgccgtcaaattcagaccactgttagccagcgcctgaggcaaaactgaaatagagctcggttagtgtcgtggatcaccgcaatgtgcatgtcaactcaccaatgggaaagctcttccagtggtagaggaattgctcggccacgctcttgatctgctccaccagctgctccacctcgggaggagctcccaccaggttgatgttgaactcgataggctcccgctcggggccggccagagtctgagggcgcagcatctgagtgccggaagcgctgaccgacaaagtggctggcacagcagccggcgctggaaccgacggcatggtagttgggcgccgcctttcactctagtattgtgtccatttctaattttaatgtaaatctgaaaaaaacaggaactgcttaagtattcttgtgatcaattgtattttatatgtatcacattttaataaaaaaaaaaaaaaaaacactttctagatgctgaaactcaatatcaatccccttttttaagaaatgtaatccttttccagaagactattaattaattcaattaataccatttatttgcaccctttcaacaatgtattaattccaagtctggtgttaagaaacacactcttacgctgattcctttttgacttttgaagagtacagagtattgctagaatcagctagatccaagcaattgactagagttacttttttggtggctggccaagctaattgaaaacgcacaagcgcgcaatattaaaattaatgatctaattgaaagatcgctggcgcatgtgtaatggtgggaatagtttagattccatgcgactcagagaggagagtccagatgcaaacaaaagtttcgagtaaccaattaccaattagttgtaggtgtagctgcagctacagagggtccaaacgagtttcgcctggaatctcgagtttcacctgctggagacacgcctgcccatctcaaccccctcatcaacctaccacaacctgcgcccaatttcgcgcttcgcttgcgttgatggggtccctgagtgtgcttttccacgcccatgagtacactgtactggagtgcccccgccagttagccagcccctctcgacaatgcccaaaagattcttattgtttaattgccgcacacacacacacactcgcacggacgtcgagacgcacacgcacacctatgtataagcactgcgcactcaaggcgttctgtgtcgtcgttgtcggttttgagttacaactgccttttacctcgctactgatatcaaatttctggagcctcgctcgctgcaggcatcgtagaggcgattcgcgagatcgcagagctgcgtttttccgcttttccgtttctcgtctttattgaacgagcagacaaaatatacacatacgctcttttgcacccctggggcacacttttgctggggatggcaaggcaagtggccgtgactatcgatggcccgccagtatcgatggcacggttgaccagggctgcactagcaagttaaaaaaaagataacatacaattttagcttctaacttttttaacctaaaccactaaaaaatgtctaataccgttaatatttttcttcaccaatatttgtaccaattccaccaaacatatatcatgaacgctatcatgatcatttgattacatagttacctaataatttttgttttcaatgacttcaaatattttattaatttttataaaatatatattatatattctttcgttgcacatgtgaatatatttatttatgtatattaaaaaaatacagcaaattatttttaatttaaatcaaacatttaaagattttaactattgactccaacatacaaaatactgatatccacttctgtgtgtccattcggaatgcgctcaatttgttcttataactagttttaaagcaatattggtgaggttttgacctgtcttccaatggctgcaaagcaaacctttgcggaagattgtaatataaaaagtgtattattttattttttaattatttcatacagagataggttattgaattaagtaattattggacaatctgccgttattgcttgacgtaggaacaaagccatttttgaaggatggtcgttgttaggtttcaaatgtatcacgttcctggccggcgaactggatcgctgggaattggacgggattaagccgtttttgaattgattaaccactaattgaggaaccacaaagtccgatggtttggaaaataaatccttcttttgatgctgaagcattgtattgcaaagatttggcgtcgaaattttgacggtctgtccattcacagaaattgaatagacagatttgggtgcttggcttgtgggacgaataccattcttgggcagctgggtgccagagacaagatcgttggagccgacggatc

SEQ ID NO: 4304 - DNA, 3954 bp, DROSOPHILA
gggtgcaaaagagcgtatgtgtatattttgtctgctcgttcaataaagacgagaaacggaaaagcggaaaaacgcagctctgcgatctcgcgaatcgcctctacgatgcctgcagcgagcgaggctccagaaatttgatatcagtagcgagatttacattaaaattagaaatggacacaatactagagtgaaaggcggcgcccaactaccatgccgtcggttccagcgccggctgctgtgccagccactttgtcggtcagcgcttccggcactcagatgctgcgccctcagactctggccggccccgagcgggagcctatcgagttcaacatcaacctggtgggagctcctcccgaggtggagcagctggtggagcagatcaagagcgtggccgagcaattcctctaccactggaagagctttcccattgttttgcctcaggcgctggctaacagtggtctgaatttgacggcgagaaacgcgaccaatagcgtgagcagccgtaaaacacgtcccattaatctgcgcgacctctttatagcgcctccctttgacgagctggacgccgtggcatctgacgggagcggagagccccgccggctgacgagcgcccagctgaagactctgcgggaaactggcgagttcgatgtgcccagtctttattttcctggccaggtgcacaagtggcgtctgtcccaagtactccaaaagggcaagctgcgggcgcaggactcctttctgagcgatctggccttggctgcccggttcgtggtggtcactgcccgagctcgcatcttctcccacttcttttcggtcgtgcaggcgatgcacggcttgctggaagcgttcaccagacttgctgatatggtcatcggtgtgccggctcttttggcccacaacctggactataagattaaggaggagcgctgccgatttctcatagccgagttggtttgtcggcccgaatacgaggattgtttacacggcctgtgttcctatgtccggaagatgctgcgtcgcgctacgatggaaaaattcgacttcaacagctgcgaggtcagccagcccgtaccctatctattcctcacgcccaaaggacaggagatcgacttgcggctcttctgccgcgacatcatgcgcaaagcacttccaattctaattggcattctggagcgggagacgcgaggctggtttctgcatttccgcgagcgtttgattgccgagctgcgtgccaaaaagctgaacgacaaggagatcgaggaggaggtgaacgaagctgtcatgaaggagtatctgcaacgcgtctacagctcaatcatctccaatgcaaagctgggggagcttggcgccggagtgccggaactcctggtgcagcaggcccagtcggtggtaattatgtacaaggctgttgacaaggtggagcagaatatcaagcggactcgcgaggaccatcagaagtgtctggccaatgaccattccgtgttgtcgcgggttgccccctggctgcgctccaagctgcgccacgccgaagagaatcggctccacaagagcgcctggtcggcccacgaggaagcgctaaaaatgtgcacccaacataacctgcatcaaacagcatacttcctgtctcgtgacctgaccttcatgaaggagcgcgagccagtgctccttaaggagctgaagaacgccaagactcccacgcgcagctttcaatgggcgtgtcgcatctggtcgccacagtcgtggatcatccgtcgcaacttccagggtcagtctgacgtaattcccactgtgattagccaacatgccactagcatagtcactccacggtcggatcccagccagccggtttttctggtggaaaaggagatactgcgcacaacaagcacgcgctggcctttctggcgcctgctaaacatgatccagcgaatctggtgctggtcctggaacatgatgttcctgcttggcatactagttccgtggtgcagtcccctcggactgcgcgccctctgctgtgtgaagccttttatgcccgaccttgagctatcgcaaatcaatggcacactgttcccaaggaagacgagcataactcagactctggcgtcacgtctaatcgagttgtggcgacatatatcgaagtcacgtacgcactttgagacagaaccagatacgggctttattggaaagggactgacacgcaatctgaatcgaacttggaactattttgtgaaaggattcctaggtacgatcgtcattttattcgccttcccccttatctgtttggccgctagcttgctaagcatttgtctggctgtgactgcgcccctatggattcccgtgttcgtgctactactccacatctacatgatcctcatatatgatttggatgcacctgataatacgaagaatcgatactgcatcctattggaagccatagtttggaatcttctcatacagggattgctccagccggtggcggcgattctaatggccacgctggtctgtccattggcagcaggagtcgtgtttatagttggggtcatccggtattccctacggctggtgtgggactctcttacctaccatttgtttatcaagaagtgtggacgtgtaccggcttcggatagcattgctgtaaaacgaattgctggacctggactggcattagactattatttcataatcagaccggagcaggcattggctgcactggaggctaaaatggaactggacgagttgcaggcctaccagcatgccacggagcgagtggtgttgcagccacagcaggatttcctccagtttgtcgaggcttgctttgggccgttttcagcccaaatcagtaaaactggaccgtacttatcgctggaccgggaggcgcaggatctgatgagtacgctacacgagaagttagagaagcgacgaagggagttgcagacggcgctgaccacccaagtcaaatctcgcataaagttaaataccaaagaattaaagggtctcacggtaaacgactggccgggactggctggtcttatatacaccgacatatttagtctagattttctaacgccattgactgaacacgatacacattttaaactagaaccacatgcctcgctcgaccttatgcgttatacggagatggtgaagaatgcaaacgatgtgattggctccaagggcctggatctgctcggcaatgtgtacgccccgcgtggcaacgttcaagtgcatctgcccttcctcgaagtgactgcattcaatccacgctcccgcataacgctcaccttccgcaagcccgagaaaagggatatgtctgtgggattgaccacaccgagggtgcgtgcccaccgtgcccagcatgtgccgaagactttacaagaaggccagaagtcctggcgaccgtggaagcagcaaagcggagagaagagcgttacggaaaagctgctcatcccattgccagtgccccatcccgttcacattgctattgccatttacaatcgcgacaccgaacagcccatccccttggactcggagctggtctgggaaattcttaaatcgatagaggactgccaaggcggcgatgccatggctgtccaggctgtggcgcgttatcggggagcggtcattgaatcgagcaatgactcgctggccagcagcagcagcattggcagtactcgtgactcgggatcaggttctgtgtcgggctcggcactgggcaacggtacagaaacccttccatgcggcaatcgagaggtctgcacccaggttaaggtggacaccgagccggctgccagctcctctggtttccattggactctaagcaactggggcgcagcgcaaacggcacgacgtcgaaccaactctaatgtgcgcgtggacttggccagtcccgaagatatatccttggatacggatagttcgcgtgccgttttcaacaacgcgtacggcacaactgtctaa

SEQ ID NO: 4305 - protein, 1247 aa, DROSOPHILA
MPSVPAPAAVPATLSVSASGTQMLRPQTLAGPEREPIEFNINLVGAPPEVEQLVEQIKSVAEQFLYHWKSFPIVLPQALANSGLNLTARNATNSVSSRKTRPINLRDLFIAPPFDELDAVASDGSGEPRRLTSAQLKTLRETGEFDVPSLYFPGQVHKWRLSQVLQKGKLRAQDSFLSDLALAARFVVVTARARIFSHFFSVVQAMHGLLEAFTRLADMVIGVPALLAHNLDYKIKEERCRFLIAELVCRPEYEDCLHGLCSYVRKMLRRATMEKFDFNSCEVSQPVPYLFLTPKGQEIDLRLFCRDIMRKALPILIGILERETRGWFLHFRERLIAELRAKKLNDKEIEEEVNEAVMKEYLQRVYSSIISNAKLGELGAGVPELLVQQAQSVVIMYKAVDKVEQNIKRTREDHQKCLANDHSVLSRVAPWLRSKLRHAEENRLHKSAWSAHEEALKMCTQHNLHQTAYFLSRDLTFMKEREPVLLKELKNAKTPTRSFQWACRIWSPQSWIIRRNFQGQSDVIPTVISQHATSIVTPRSDPSQPVFLVEKEILRTTSTRWPFWRLLNMIQRIWCWSWNMMFLLGILVPWCSPLGLRALCCVKPFMPDLELSQINGTLFPRKTSITQTLASRLIELWRHISKSRTHFETEPDTGFIGKGLTRNLNRTWNYFVKGFLGTIVILFAFPLICLAASLLSICLAVTAPLWIPVFVLLLHIYMILIYDLDAPDNTKNRYCILLEAIVWNLLIQGLLQPVAAILMATLVCPLAAGVVFIVGVIRYSLRLVWDSLTYHLFIKKCGRVPASDSIAVKRIAGPGLALDYYFIIRPEQALAALEAKMELDELQAYQHATERVVLQPQQDFLQFVEACFGPFSAQISKTGPYLSLDREAQDLMSTLHEKLEKRRRELQTALTTQVKSRIKLNTKELKGLTVNDWPGLAGLIYTDIFSLDFLTPLTEHDTHFKLEPHASLDLMRYTEMVKNANDVIGSKGLDLLGNVYAPRGNVQVHLPFLEVTAFNPRSRITLTFRKPEKRDMSVGLTTPRVRAHRAQHVPKTLQEGQKSWRPWKQQSGEKSVTEKLLIPLPVPHPVHIAIAIYNRDTEQPIPLDSELVWEILKSIEDCQGGDAMAVQAVARYRGAVIESSNDSLASSSSIGSTRDSGSGSVSGSALGNGTETLPCGNREVCTQVKVDTEPAASSSGFHWTLSNWGAAQTARRRTNSNVRVDLASPEDISLDTDSSRAVFNNAYGTTV

SEQ ID NO: 4306 - DNA, 2945 bp, DROSOPHILA
tgcatataatgtaatggctatcatttggctatcattatccttgtgtgcctgttaaatttcctatccgcgttttccgaggtatctcctcgtcgacctccttgtttcttatcgaatcccttatgttcggggggaatttcgcaatgctgcattgggatttccagcagcagcaccatagccatgccatagcctcgcatcgcctgatttggcctggcttttagcctggcttcctctcttttcgagctgagtggaccagttttggggagcactcattttgagctccactcgaagtgagtggaactcagagtgcgagtgaaacgggttctggtcgcttcggcattcggctggcaagtgggtgccaagtgtggagctgaatgccctaggccgtggcacgtccctctctcccacaccaagtgggccaaaatgaaaaacagcaaaacaaaacgcacgaattctggttaaaacggcgatgagtcatccgcactgcgaggtgatgtatgtgtgtgtgtgtgtgtgtgtagaatcggttgtagcccgtccattcataatcgcgtttgctgaatgaacgaacatctatatgggcacacacgaatcggcgtctttataaacaaatatatagtacagctgcggtcgcgatagtagaaaagcaattacggaatttcacaatagctgaatgcataataagttaatactagtgttacctgttgtacgccgtaattagccgtttaaatagttaatttttaattattttgtttaatattacgatgatatcacgacttctgattagggggaatattaaggctaaacttaaaggcaacactgcgtatgcttaatatgctaataaaaatgccaaaatgagaatttgtcactggaggtttctataaatatgccagtttatgtatgtatttcaaaacctatatctgtataaacaaagtatatttgggtttctatcgccaactgctgatggacacggactaatatttgccgcagacacccgacatgactaggcatttggcacctcgacgctggacaggattagggtgatgtcatcgggtttcccgccgccggagtatgaaacattgtgttgcctggccttgatggcgaatggtgattggaaactggcattcatggacagttccctggccttctccaccacccggctggcgcccacaagtagatcgtgctctccacgctcctttaggccattcaatatactgagcaacatgctctcgggcatgttatcgaacaagccatcggtggccaggagcaccaggtcaccgggtagtagggagtgcctcgtggacacggccatttccggcttgtcgcagtagtagctctccttccgatcctccggcggcactgtcagctgatagggcgtgttgaagtcgtgggtttgctccactgagcggtgcagcacccgtccatttcgcaccaccaagaagccgctgtcccccaaattggcggtgtacagggtgcagtccttccgatgcatcgtcgccaggcaggcagtgctgctacccacaacaggatgctcccggtgggacaactcctggaagccggcgatgagcatgttccggggactgcgtccatcgaaatccgatagctgcgtctgcccggaacagcagctcatcagctccttggcgaaacgacccgcatccacgcccaagtcccgccaaccgcccacgccgtcggccacgcccatcacctcggccagcggcgtggagctgacgaaccagctatcctcgccgaaacgctgattggaccgctctcccggaaatcgcggcttcttcgatcttccctgcaccaccgtgacgagatagggatcccgcgaggatttaccggattgaggcggacgctcgaagcggccggacagttgggtgaactggtggatctggtggaccgagaagcgtttcagcaggagcggccagtttctcaaacaggtgatcatttctcttcgctcttaggcactggaatttgaaaaaaactaagttttgggaaatttacttcaacgagttgggtttgaatattcactttacttatgtatgaaagttccaaaaatgtaacagctacagttaaacagcctgcttacatgtatattatatttcaataaatattttgctatagccacccatcgactagaataataccatgaaatcgtacactttccacgtaattggagcaaaagggcactttgtagttataaaaattattaatcacaacgcaattgccaacttgggtttctgtttacaccataaacattggttaatcgtaaggcccagatacgaaaaccatacactctagatgggctggcacggtctgtttttcctggcatttgtcataggtagatttgatttctttgttcaatcttatctggatggagcctacgacactctggactccgaatggaaatcggaatcgaacccccatcatcaccggaagttttgatcacgctacggaactgcaaatgttatcgccgtggattttcttatcggcccaaaggaaaacaatacgcaatgataactttattttaaacccctgatgtaaacgcctttcagatacggcgtcttatcatgttatacccaaacgcattcgttggaatcgctcattattcattatttgatttgtttttttttttcttcgttcgttgtgtttgccaaattgttaaattgtcggtaactctaaggtccgacttcctgtccaatgctcgatacgtgattctggccagcaagagctgatcagactactctatcagctctagcttccgagctggaagagctcggaattcgtatctgaaactggaagcggagacgtcagaaggtcttatcaccttagttcctttttttttgtgacgttatgaaaaaaaaaaatgcgaaaagtatttcctgcagcggctactgttccggaatatgttttatcgtggttaaaatgatattactagcaacaattat

SEQ ID NO: 4307 - DNA, 945 bp, DROSOPHILA
atgatcacctgtttgagaaactggccgctcctgctgaaacgcttctcggtccaccagatccaccagttcacccaactgtccggccgcttcgagcgtccgcctcaatccggtaaatcctcgcgggatccctatctcgtcacggtggtgcagggaagatcgaagaagccgcgatttccgggagagcggtccaatcagcgtttcggcgaggatagctggttcgtcagctccacgccgctggccgaggtgatgggcgtggccgacggcgtgggcggttggcgggacttgggcgtggatgcgggtcgtttcgccaaggagctgatgagctgctgttccgggcagacgcagctatcggatttcgatggacgcagtccccggaacatgctcatcgccggcttccaggagttgtcccaccgggagcatcctgttgtgggtagcagcactgcctgcctggcgacgatgcatcggaaggactgcaccctgtacaccgccaatttgggggacagcggcttcttggtggtgcgaaatggacgggtgctgcaccgctcagtggagcaaacccacgacttcaacacgccctatcagctgacagtgccgccggaggatcggaaggagagctactactgcgacaagccggaaatggccgtgtccacgaggcactccctactacccggtgacctggtgctcctggccaccgatggcttgttcgataacatgcccgagagcatgttgctcagtatattgaatggcctaaaggagcgtggagagcacgatctacttgtgggcgccagccgggtggtggagaaggccagggaactgtccatgaatgccagtttccaatcaccattcgccatcaaggccaggcaacacaatgtttcatactccggcggcgggaaacccgatgacatcaccctaatcctgtccagcgtcgaggtgccaaatgcctag

SEQ ID NO: 4308 - protein, 314 aa, DROSOPHILA
MITCLRNWPLLLKRFSVHQIHQFTQLSGRFERPPQSGKSSRDPYLVTVVQGRSKKPRFPGERSNQRFGEDSWFVSSTPLAEVMGVADGVGGWRDLGVDAGRFAKELMSCCSGQTQLSDFDGRSPRNMLIAGFQELSHREHPVVGSSTACLATMHRKDCTLYTANLGDSGFLVVRNGRVLHRSVEQTHDFNTPYQLTVPPEDRKESYYCDKPEMAVSTRHSLLPGDLVLLATDGLFDNMPESMLLSILNGLKERGEHDLLVGASRVVEKARELSMNASFQSPFAIKARQHNVSYSGGGKPDDITLILSSVEVPNA

SEQ ID NO: 4309 - DNA, 2289 bp, DROSOPHILA
ctgctagttgatggcgctaaaaatacaaataaaccagcaaaattgtgtcagattagctctggcttttgcaaaatgaaaactgacactttgtccggcctaattcgtattagtgcatttaacatttagaatcaaattagtggcgaattatttggttcacttttgtttgttaagtttgacatataccaccctttgatttccgaatctcacgatgcttgaacgtaaaaatatataaacgaatgatgacagatagttaatacaatttaatattggtatcaaccgcaaacgaatcctaaacaaattattcattaattaatcagtgattgccttacaattaaagacagcaataaatgttgtatcatgatttattttatttcagggtcaaatttaagtttacacctacccacatattaactaaattttattttaacacttgtatttaccgacttaatggaagctacatgtcttatgacgaatgaatgctgataaatagaaaggtaaattatgcaacgattgctgtaggaaactccttaatacatatctcatatcgtgatatacctgtacatataaacacgattttcccagtaataagaaccaaagcaatagtctggcagaccattagatgttctacgccaaatttctccaagactttaaaacgcctcgcaaagtaatactgcgctttctatatacagtaactatctaaagattttcatagttaagctcgttagatccaactaaagacatcagaataattataaagtatttgatccaaccttaagtatgtatatcagtaaatctattaatcccaattaagaggtatacttttaaaaaagtatggtacaccgcagctgcaactttggacgcacgcttgtcagctgtttccgtagtgtagcggttatcacgtgtgcttcacacgcacaaggtccccggttcgaacccgggcgggaacaattccagttttttttgtcaaatttatgtttggcccttcataaccaagtttgttttttattgtattcctattgtcttggcgaagccttgccttttgagtcgtctcagaggtttagcggggatgagacgtcttgcaagaagactgctatggctcaataatctgtcaccaaagacactagaatattctagggtctttgctgtcactatatcgacttgtatttctcccaatttgtgtctcaactgtgtgaatattgaggtctttatggagtgtagagttacgtacatgcgcgattttgcatcacctggatacgtttataattcgatttggtcgcaattccccaaatcatttatgttcctacttcacttattttatttttatagtgttcgatgtacggattcttcacttaataaataataatttaaaaaaaaaattctattcatattattttaactaatttaaaaattacatctttttctgaacacatattacaaagggtacaaatctataaatgcatttgattttcttgtttgtttacctaccgctgtatggcacacatataaaaatatgtatcagcaaactcatgctgtcattccactttgaagaatctttcgtttgctcgagcccagccgagggcaattcaggaatatatacttcctattgttatttttttaccattctgcatttctcagtcattatgaaacaatttaaatttcttacatagaaactatacttttgatttcacaggcttttaaagcaacgttcatacacgggtatgcataagcaatggcaaaacccaccccgatttggtttgccatacagcacgtttgcccgactgccagcttgtaattcccaagtgcttatttggtcaaatactcgtataaatacgatatctgcttcccgttacttcggaagtgtattctgtgattgttctgtacattgatcgatattcaggtaactgcatctgcttatcagatctgttcagagccgaccctccgtcacacctttgtgtttcccagtaattctgcctggcgttgccgtggctcctcgttcggatcggctttccgctgccttccactggatgacgacgggttatccggcggtcgacgcacggtcatgcacccccgatccgtcgcccccaccaccccgcggattctggtctcgaccggaagccgtattgggcggggacgggcggcggtccggtgctgaagccggcgacagttgcccgagtcagccactttcaaaatttgttggttaagtaacttagtagcttagcttcggattttcgtaacaaatttgctgttcagaacacttccatgtacgcggcattgccgagcaatttgccc

SEQ ID NO: 4310 - DNA, 289 bp, DROSOPHILA
atttggggaattgcgaccaaatcgaattataaacgtatccaggtgatgcaaaatcgcgcatgtacgtaactctacactccataaagacctcaatattcacacagttgagacacaaattgggagaaatacaagtcgatatagtgacagcaaagaccctagaatattctagtgtctttggtgacagattattgagccatagcagtcttcttgcaagacgtctcatccccgctaaacctctgagacgactcaaaaggcaaggcttcgccaagacaataggaatacaataaaa

SEQ ID NO: 4311 - protein, 75 aa, DROSOPHILA
MYVTLHSIKTSIFTQLRHKLGEIQVDIVTAKTLEYSSVFGDRLLSHSSLLARRLIPAKPLRRLKRQGFAKTIGIQ

SEQ ID NO: 4312 - DNA, 5103 bp, DROSOPHILA
tggtaagtgaagaagatgagaaaaggatccatgatttagcttaacttatgattcattcttcagcgtggccgtctagaggatgtggtggtcaatgacacgtatcgcgggaagcaactgggaaaactgtaagcgttgtatatcattttcccaacaagaaacattaatccgcggacttactattcaggatcgtggtcaccgtatcgctgctggccgaggaactgggctgctacaaaatgtcgctggactgcaaggacaagctgatcaagttctatgagtcgctgggctatgtggccattcccggaaactccaactccatgacgattcgctacgatgaggggccaacgctcaagcggaatgctacctcagccggctccagtggaacagtgggcgactcctgccaaactgtgagcctcgattttgcctcttgacaattagccgccaacgctgctccaaagtccaagctttgagtgggagcaccccatctcaaagttacaaatgcgcgaagcgcaatgcaacaaaactaaaattggattctaagaaaacattaaatgcatataggcattgccaaaattccattgcgctgagggcatgatggatttttggacagcgctggctggcggtggtgtccttgtggacggacgtgcttgtccacccacccgcgaggacatacaattagatatttagttaaagacaaccgcaacatatgttgctctctgtttttaatccctacagaactctcaattttataattttttctcccctttctgctactgaatgtgcggctcgacctctcaactccaaggtggttgtaatattaccttttaagagcaccttcatcaagtagccctaagattgaaacactcgcataactgttaaactgttattaacactaatcaacaatagcgattaaaacccaatacgaatctttcaaaaacctttaatgattgaagaaattcaataaagtggacacttttttcaaaagcccagaatgtttataaacttacttgcatcaacagacaacagttttattttccaatatttcaaaaaaagttaagtaacaaacatttgtgctatttaaagttgcagaagatcgattaaacctgtctgttaatttacttcacaaacgttgagcttattttacaagtttacatcttcgagctacatttatataaaaatctgtttagtgtctagtgcaaggtacttattgggcttaagtcttctctatttacaaggctctcaaatggggggcaaaagctgggcaaacccagcctcctccgcgtctcatgagtacgcgcaaaggtgtccgcacttggggcacttggagtgtttggcaaagtacttctgcaggtgctctatgtgaccgccgtgggagcatccttggcaccaggcgtagactccccggacgatcagaccgcagacgcagcacttggcggactgcatggacttgcacttgtcgcagtaccatcccaccttgccgcccattggacgtccacactctccacagttcgtgtgcatggcggtcgagtgctggttgagctgctgcaccgatctcagccaggagcggttgataacctcgcaggcctcgttccacagctcatagcgatgcagctggtccacgtaggtgtaaaaccagtgctcctgaaaaggaagaaaaccggatgaataactccgttctgatcccaactttgtctttgaactcaccaccaatgcatcgtcaatgggcaggagcttccgagcttctcccagcgctataaggactgtcagagctgtttgcacatcgcccacatcgttcattagcatgagggcatcggagacgaacttatgcggttcccacatgggtatgggcgggacatggctgacttttaggacagtgggaacatgcggtggctaaaaagaggatgaataagttagttaagctgtaaatacatcgagttctcaataatctcaactaacaggtgacttttcgtgatcggacgccttgagatccagttgtggtcgtgcagcctgcacatcgtgatgaagggcggggaaggccaaagctttcgggcattctgtgggacccacgtagataaacccattgcgcaagagctcaaagttgtcaaaggtaatctcgctgatgatttgcgtttcggacagaatcactgagctcgtaggcggatgctccacaccactgctgccgagcgtatcatcgtccacattcgccacatcaatttcgtgggctgtttccggcgtgtttccattgagatcctggcctagttcagttcgctgctgtggccaatcgctggctacttgcgtggcacgtcgtgagttcattggattcttttgattcgagaaggaggagcggtgctcgaagggaggctcaaagtgattgctgccgtagaacaatttgataaagttccacaatgtggtggcctgaaaaatgtagatgctaagttttggcaaattttgggaataatctcaagcgcttacattatgtttgccgtatttcttggaaacctctgcattgtgctcgcataactccgatagttttttcccactgataacaagttccctggcacagccaataaaactttcgtgttcttgggtgggtcttgaaacagattcgcttaggggatagccggaaaactgaaatatatcaattagtatcagatttggcaaagaaatccctaatagtgtcatactaaccgtgtcgtttaccatgaatttgtacattttggaatggtccaaatggaactgaatgctgccagccacattcgtcttacggcgacttctaaaatacacatacatataaacatacaagttgatacaacaaatacgacatacatgaagctagaagacttggtattggatgcaccgctggtcttgggttcatactccttgatcttgttggcaaaggagatgtccccaaatctgcccaggctagctccctgggcatttgccttcagcgctggcctcgtggcatccttaaaagcatgtttgtaaatggtggagtccttgctgatggacagaagacagtgcgagtcgctgccctgccacgcaattccagtagtcacattggtgtgctcgttgaaggaggcaaaggggatgtagggtctgcggatgtcccacacatgaacgctgtagtccaccacaagggcacaactagcgatgtgataactggaaaggattaaacagatttaatataaataagactgttaaacctggctagaaaaacctacgttctttctggtcgccacttaacccgtcccactacggcgattgtgtgaatggtgtgctccaatcccggcctgccatccatgttccacaccttgatctgcttgtcccgacttccggtggccagccaattccttgtgggatgccagtcgcatgtgtagactggcccgtagtgcgccgtaaactgcaccatgcacttgtcccacttccgcatgtcccacaactggacagttccattctcggagacggcggagaatatgttttgtgtgtgtggactgaacttgacatcccgcactgattccgagttgcagaagtaggtgttgattgacttatccgatcggatgtcgaaacacttgatggtgccatcctgagaaccggagatcaggatgttgggctcgctgctgtgaaaggtcacggtatgagcggtgcgctcatgttcgttgtagacaagcagctgcttctgcctgccgaacttggagagatcccacacggaaaccactccgttcgtggccgccgtagccaaaagattgctatccaaggtggaccaggccacatcgttggcggagtagctaagattctggttctttccgcgcatattacacgattccgtgaagccattgctgtttatggagtacaccttaagcactgttcggaagcaaattatgtgtatttatagaaagaccttgggcaattctaatcttacagcttcttccggccaaagcaatctggttgttgtccttattcagggccagggcgttcgcgtgtccttccaggcatatccgcagcgagattgtggaggtgtcctccacggaatcgggcatcctgcagcagttgcaagttcgcccgcagaaagcaaaacagtgatttgataagacaagacgctatcttttattttcctttcggttcagtatgaccgtttctcgagcggcaaaccattggcgcgagtgttcccaaatgcagatgttgaatattgtttgaacaaaagacttattgtactaaagttgtattattcacatataattaatgtattctatacatatacagacagaaacattaatttcaattaagctattaaattctttgaaacttcttggaacactccaataagatctgccagttggagcgcgtcgttgccggaccatccacaccgacggagtggcaacgccattcgtgcggccttgctgtttacaaaaatcacggtcgactttttcgacaatttcatttaccagcgcaacaagtggccgcaagaaagcaggagagtggagccgggtgatcctgatcccttccagaaatgccggacatcaagataacgcccttgggcgccggccaggatgtgggccgcagctgtctgctgctctcgatgggcgggaagaacataatgctcgactgcgggatgcatatgggctacaacgacgagcgccgcttcccggacttctcctacatagtgccggagggtccgatcaccagccacattgactgtgtgatcatctcgcacttccacctgggtgagtctcggcctcccaaaggcgctcttatctggtcaactggctctaatcgtttctttatcgattgcatgcattccagatcactgcggggccttgccctacatgtcagagattgtgggctacacggggcccatctacatgacgcatccgaccaaggccatagcacccatcctcctggaggacatgcggaaggtggccgtagagcggaaaggcgagtcgaacttctttaccacccagatgatcaaggactgcatgaagaaggtgattcccgtcacacttcaccagagtatgatggtggacacggaccttgagatcaaagcctactatgcaggccatgtcctgggcgccgccatgttctggatcaaggtgggctcccagagcgttg

SEQ ID NO: 4313 - DNA, 2681 bp, DROSOPHILA
aaaagatagcgtcttgtcttatcaaatcactgttttgctttctgcgggcgaacttgcaactgctgcaggatgcccgattccgtggaggacacctccacaatctcgctgcggatatgcctggaaggacacgcgaacgccctggccctgaataaggacaacaaccagattgctttggccggaagaagcttgcttaaggtgtactccataaacagcaatggcttcacggaatcgtgtaatatgcgcggaaagaaccagaatcttagctactccgccaacgatgtggcctggtccaccttggatagcaatcttttggctacggcggccacgaacggagtggtttccgtgtgggatctctccaagttcggcaggcagaagcagctgcttgtctacaacgaacatgagcgcaccgctcataccgtgacctttcacagcagcgagcccaacatcctgatctccggttctcaggatggcaccatcaagtgtttcgacatccgatcggataagtcaatcaacacctacttctgcaactcggaatcagtgcgggatgtcaagttcagtccacacacacaaaacatattctccgccgtctccgagaatggaactgtccagttgtgggacatgcggaagtgggacaagtgcatggtgcagtttacggcgcactacgggccagtctacacatgcgactggcatcccacaaggaattggctggccaccggaagtcgggacaagcagatcaaggtgtggaacatggatggcaggccgggattggagcacaccattcacacaatcgccgtagtgggacgggttaagtggcgaccagaaagaacttatcacatcgctagttgtgcccttgtggtggactacagcgttcatgtgtgggacatccgcagaccctacatcccctttgcctccttcaacgagcacaccaatgtgactactggaattgcgtggcagggcagcgactcgcactgtcttctgtccatcagcaaggactccaccatttacaaacatgcttttaaggatgccacgaggccagcgctgaaggcaaatgcccagggagctagcctgggcagatttggggacatctcctttgccaacaagatcaaggagtatgaacccaagaccagcggtgcatccaataccaagtcttctagcttcattcgccgtaagacgaatgtggctggcagcattcagttccatttggaccattccaaaatgtacaaattcatggtaaacgacacgttttccggctatcccctaagcgaatctgtttcaagacccacccaagaacacgaaagttttattggctgtgccagggaacttgttatcagtgggaaaaaactatcggagttatgcgagcacaatgcagaggtttccaagaaatacggcaaacataatgccaccacattgtggaactttatcaaattgttctacggcagcaatcactttgagcctcccttcgagcaccgctcctccttctcgaatcaaaagaatccaatgaactcacgacgtgccacgcaagtagccagcgattggccacagcagcgaactgaactaggccaggatctcaatggaaacacgccggaaacagcccacgaaattgatgtggcgaatgtggacgatgatacgctcggcagcagtggtgtggagcatccgcctacgagctcagtgattctgtccgaaacgcaaatcatcagcgagattacctttgacaactttgagctcttgcgcaatgggtttatctacgtgggtcccacagaatgcccgaaagctttggccttccccgcccttcatcacgatgtgcaggctgcacgaccacaactggatctcaaggcgtccgatcacgaaaagtcacctccaccgcatgttcccactgtcctaaaagtcagccatgtcccgcccatacccatgtgggaaccgcataagttcgtctccgatgccctcatgctaatgaacgatgtgggcgatgtgcaaacagctctgacagtccttatagcgctgggagaagctcggaagctcctgcccattgacgatgcattggtggagcactggttttacacctacgtggaccagctgcatcgctatgagctgtggaacgaggcctgcgaggttatcaaccgctcctggctgagatcggtgcagcagctcaaccagcactcgaccgccatgcacacgaactgtggagagtgtggacgtccaatgggcggcaaggtgggatggtactgcgacaagtgcaagtccatgcagtccgccaagtgctgcgtctgcggtctgatcgtccggggagtctacgcctggtgccaaggatgctcccacggcggtcacatagagcacctgcagaagtactttgccaaacactccaagtgccccaagtgcggacacctttgcgcgtactcatgagacgcggaggaggctgggtttgcccagcttttgccccccatttgagagccttgtaaatagagaagacttaagcccaataagtaccttgcactagacactaaacagatttttatataaatgtagctcgaagatgtaaacttgtaaaataagctcaacgtttgtgaagtaaattaacagacaggtttaatcgatcttctgcaactttaaatagcacaaatgtttgttacttaactttttttgaaatattggaaaataaaactgttgtctgttgatgcaagtaa

SEQ ID NO: 4314 - protein, 776 aa, DROSOPHILA
MPDSVEDTSTISLRICLEGHANALALNKDNNQIALAGRSLLKVYSINSNGFTESCNMRGKNQNLSYSANDVAWSTLDSNLLATAATNGVVSVWDLSKFGRQKQLLVYNEHERTAHTVTFHSSEPNILISGSQDGTIKCFDIRSDKSINTYFCNSESVRDVKFSPHTQNIFSAVSENGTVQLWDMRKWDKCMVQFTAHYGPVYTCDWHPTRNWLATGSRDKQIKVWNMDGRPGLEHTIHTIAVVGRVKWRPERTYHIASCALVVDYSVHVWDIRRPYIPFASFNEHTNVTTGIAWQGSDSHCLLSISKDSTIYKHAFKDATRPALKANAQGASLGRFGDISFANKIKEYEPKTSGASNTKSSSFIRRKTNVAGSIQFHLDHSKMYKFMVNDTFSGYPLSESVSRPTQEHESFIGCARELVISGKKLSELCEHNAEVSKKYGKHNATTLWNFIKLFYGSNHFEPPFEHRSSFSNQKNPMNSRRATQVASDWPQQRTELGQDLNGNTPETAHEIDVANVDDDTLGSSGVEHPPTSSVILSETQIISEITFDNFELLRNGFIYVGPTECPKALAFPALHHDVQAARPQLDLKASDHEKSPPPHVPTVLKVSHVPPIPMWEPHKFVSDALMLMNDVGDVQTALTVLIALGEARKLLPIDDALVEHWFYTYVDQLHRYELWNEACEVINRSWLRSVQQLNQHSTAMHTNCGECGRPMGGKVGWYCDKCKSMQSAKCCVCGLIVRGVYAWCQGCSHGGHIEHLQKYFAKHSKCPKCGHLCAYS

SEQ ID NO: 4315 - DNA, 3125 bp, DROSOPHILA
agggaagatgaagttcctgcgctcgaagatcaaagacgaattcaacctggaaacctacatgccggccaacggcgaaacctgtgtgatttctacgcctgtgaagataccagtagatgcgtccgtttccctgcttaaagcagaggcccggtcctacaacgcccagccaccggatcccaagaggcggcgactaatccatggcgtcctcgtaatgaaggacaatcgaataatgctgcaaaacctaaccgatgccctgaaggaaatcggaattaatcgacatgttatgcgatttacatccaaggtcaaaatggacgactccggaccggtcattcgcacaagcgaaagactgaagactctgctcgaagaaaagctagccggctggacggtgacgatgcaggagaacggctccatagccatcgaatccgttgaggtgaaggtggaggaggacgagaaggatcccaagcagaagaacattttgatatcgtggaccaaccaggacgaggacattggagcctacatactgaatgtgctgcagaatatgtgctaggcaacgaagaagcatcccattgaaatcccacgccttaattccatagataagcacaaagtgtagataccaccaatttctgaaagtttaaagagtatcaaaatatacataaacgttccaatagttttttggtcattagtcattgccacttgaaatttgagactttatgcacattaagttatatcaatgggtctttgcataagaatgcaatcgaatcccatgatatcaatgtgtaaaaaccaaacagacctgtgcaagtgctttcaaattccttgcctcccactccaattaggtaaggactccatggttaaagttattttcgttcgttccacgctatttattctggggtttttctgaaagagtaacattactagggctccaggcgtagctccaggtgcctggcaccatatgcaattagctgtatgaatcgttagagctgttcgaacacattccattcgcttatgtgagggcggcggcaccggagatgatttcaatcagctcgcgagtgatgaccgcctgtcgggtacggttgaaggtgagggtcagcttgtcgatcatctcaccggcgttcttggaagcgttgtccatggcagtcatacgggaggactgctccgagcaggcgccctccttcatggtgtagaagatgagcgaggccagcgagaactccagatagctcttgaccacgtcgctgtcgagcgagtcgtagacggccagcttctccgacttctccacggtggatccgctgaagatggggagggtggagcactggtaggacaccaccgacttgaaacggttgtacacgatcttgccctcggtgtaatcgtaaccggtctgcagaacctcgttggcaatcttcgaggcgtccaggaaagtggggggcagtcggcccacctcgttggccaccatcaggatgttcttgccgtacagacgggacagaatcgcgcgcgacttgtcgcccacgcagaacaccttagtgttggcctcgtcctgggccagttcgccgcgaatgagacgggccacaccagtgtggacggcaccgcaaagaccacggtccgaagtcactgcgatgagcagcttcttgggctccgccttctcgtccggctggatctccgtcttctcgaagaactgctgggcgccgatgccgtaaggacgagccgccttcaagtctcgctcggcacgagcgtacttggcagcggacaccatcttcatcgattgcgtaattttctgaatgttcttcaccgacttcaggcggatggaaatcatcttcagggtggccatgccacgctgctgctgggccagcatggtggcctccatggccaggggcagcaggagctgggtgcgttgcatcatcatcctgtgagttgtcgaagattccctgtcgcgaaaattagctcgattcactcggcaaaaattgagaaaattcacctaccttgcgttaagttggctgcgccacaacgagtgttataacaccgagcagagttgccacccagttcgggttaacgcggtggcgattcgtggtgaacggtaaaatattatattaaataatttattttaattatggaaatttcggataatggatttgtgctacatataactattaatattggataaaatacaaaacttctttggaaagcttcagaatgcacaataaagcttgaaattaatttgaatttatgtaactcataattatgacaatagagttaaaaacagaataataattgataaggattaagaggtttgccaaagatgccagcttgttttctaccctcgaccagagttttccttctccttgccagctctgttttggaatcagctgctcacgcacgagccacgaagttccgtcactaacgcctcacgcaaaaaaaagctgacgtactcgggaaaaagattaggataattcgacggagacgagcgcccgatccgatctactgactcccccgacccgcagcagagccacatagacacgatcgccctgtccaggacacccgggatcccagggatgagacctctggggacgaaaaacagcggataagttagctgtgtgcgtgtgtgtgtgcgtaagcaaagctggaaaattgttgctgcgcatcggaggaaaataaaggacatcaggcggctggattggcatgaggaggatagggctcaagccaaggctaaagacagaggcatagtgcttgaggataaaccgagaatcggggctccaccgatttcagtgcctttgtgtggcagcaacaaggtgtgcgtgtgtgtgagtgcgtgcgtgcgtgtgtgcgtgcgtgtgttgcctgcgcagtgcgttgttgttgcagttgcaatcgccagttgttgctgttgttgttgctgttgctgtgtgacacaacagtaacaaaatattgagccgccgagcaaaacacataatgtggtcgttcttctcgcgcgactcctcgaaagacttcccctacgacattggcgaaccggtgggcggctttgaccaatactccatatggacgctgcacaaggccaagcgcaagacgacgctggaggaggtgtctgtgttcgtctacgacatccgtagcggatccgacaccaagtgcgagctggccaa

SEQ ID NO: 4316 - DNA, 1071 bp, DROSOPHILA
cacaaatccattatccgaaatttccataattaaaataaattatttaatataatattttaccgttcaccacgaatcgccaccgcgttaacccgaactgggtggcaactctgctcggtgttataacactcgttgtggcgcagccaacttaacgcaagggaatcttcgacaactcacaggatgatgatgcaacgcacccagctcctgctgcccctggccatggaggccaccatgctggcccagcagcagcgtggcatggccaccctgaagatgatttccatccgcctgaagtcggtgaagaacattcagaaaattacgcaatcgatgaagatggtgtccgctgccaagtacgctcgtgccgagcgagacttgaaggcggctcgtccttacggcatcggcgcccagcagttcttcgagaagacggagatccagccggacgagaaggcggagcccaagaagctgctcatcgcagtgacttcggaccgtggtctttgcggtgccgtccacactggtgtggcccgtctcattcgcggcgaactggcccaggacgaggccaacactaaggtgttctgcgtgggcgacaagtcgcgcgcgattctgtcccgtctgtacggcaagaacatcctgatggtggccaacgaggtgggccgactgccccccactttcctggacgcctcgaagattgccaacgaggttctgcagaccggttacgattacaccgagggcaagatcgtgtacaaccgtttcaagtcggtggtgtcctaccagtgctccaccctccccatcttcagcggatccaccgtggagaagtcggagaagctggccgtctacgactcgctcgacagcgacgtggtcaagagctatctggagttctcgctggcctcgctcatcttctacaccatgaaggagggcgcctgctcggagcagtcctcccgtatgactgccatggacaacgcttccaagaacgccggtgagatgatcgacaagctgaccctcaccttcaaccgtacccgacaggcggtcatcactcgcgagctgattgaaatcatctccggtgccgccgccctcacataa

SEQ ID NO: 4317 - protein, 297 aa, DROSOPHILA
MMMQRTQLLLPLAMEATMLAQQQRGMATLKMISIRLKSVKNIQKITQSMKMVSAAKYARAERDLKAARPYGIGAQQFFEKTEIQPDEKAEPKKLLIAVTSDRGLCGAVHTGVARLIRGELAQDEANTKVFCVGDKSRAILSRLYGKNILMVANEVGRLPPTFLDASKIANEVLQTGYDYTEGKIVYNRFKSVVSYQCSTLPIFSGSTVEKSEKLAVYDSLDSDVVKSYLEFSLASLIFYTMKEGACSEQSSRMTAMDNASKNAGEMIDKLTLTFNRTRQAVITRELIEIISGAAALT

SEQ ID NO: 4318 - DNA, 3787 bp, DROSOPHILA
tccagttagagcaatgaaagcaaacaataaggagacacccaacacctatcgatattcataacgcgtaggatatagagtcacattccgcagttagacaccaacacccagcaataaggatcttaggctaagaggacatcaattgatatttgtagctatatgaacgtgtaggaaatcaaaggcgtatcaagagtatatacatacatccatgtggggcgtgcaatagccattgcaactgtacgagcatttgggtatatttttgtggaatatacaaacaagatacaagatacaagatagcagccaaaagctcagctcaagcgaaccaggaccccgacccatgacccaaaaaaaaaccgacccagagtatcgtatatagacaaacagacagacagttaacgcgttggccagtgaagaaaccggaaacggaaatagttaaaacgagtacgcgacaatcgctttgaaatgcttaacataatgagaaatactgataaacccaaagtcgaagagacgtctagtttctaccttgtcttgacaacatatttcaatacgaaactatacaaaatatggcaggcaaaagattgaaactaaccaaaaagataaacactaggaaacacaaaatgcaccggagcgggaatatgttgcaccttgagatacttgagctcaaactgaaaggatcaaacgtaaggaacacgtactcccatcctgggcatttccaaaggacacattttattatccagtgtattgaagagacgaattttgccaatgtttgtgtgtactgtatatacttaaatgcaaatgattattgtctaagcgaatggagcggagtattttgagcgtgacaaaaagactatttagcgcgaaaagaacaatttttgtgtattgtacataagaaaccgattgattttaatctaaatatacataaatattaatgtaattgtaaaactgcaaccgatttttaaatctgtatgtgtattgtgtacctcaattgtaattaatttttatacttttcacgagatggattaatgctatttttataatttagctaaatgaattataaacacgtatgtacgtctcccgactccccacgaaaccatcgtctacccctagttaatggccagttttaaatgttgcccaagaccgcatcacccatccaagaacctaaatgaataatatgtaattttgtcaattaagaaaagaacgcgtaaatgtctttaagaaatcgaatgaaacacaaacgaaattaagtgtatcgaacaaaacaaaaaccgaagagcaaagaagtgaatactagaattttacgattaacatttttaaagacgagcgaacaacaagcacatgtgtgacaattcagttgtactttatgttacgattactacaatacattatttattaatcttatcgttaggcaataacacgagtgtaactaatttttaacccaaacacacacatatgcgatactttataatttcctcattttaagcgaaattcaattaacaataaaaatgaaactaatacttaaggacgtgtgacttaacatactctaagctcaagtggactttttctcagcattctccagtttgacggcgcgcttggccatgatccaaaagtagagactcgggcaaagatgacgaagatagtaggcgatcttggcctggacatcgctgacaataatgtccggttctttgcgaagaatgcactgcagaatgcgttctgcaagtttatccggtgacatgcccttggccgtggtttcatccacttctgcagacatggagatagaaattagctttcatatgaatataaagggtaaatcacttactgccgtaactgcttcccgatcctgtcaatgcattcaaggacagctgggtgcgtatgtagccaggactcacgcaggacacgtttatgttcttatttgccacctcggctcgcagggaatcggcaaaagcctgcatggcatgtttcgaggcggaataggcagccctttggggaatggcaaactttccctgaacagagctaatgaagcatatgtgaccactaccacgtttcaccatcgaaggaagtagagctaagaatgcgtacaagagtaagttgactttccgggataaagggtttattagttacctttggtcagggcaacgctgccaaagtagttaaccaccatcaccttgagatccacatccactgccgtggatgccacatcggctcgcacactgatccctccgttgttgatgagtatgtccacttggttgtacacggccagcacccgggtgacaaattctggaatggagttcagttcagccagatccaggggaagcactgtcggcggataagcgggatcctgaaatggttagtgcattataatgcgaaccacataacctacgggtcccgaacttaccacatccaatgcgaggaggtccttcttaacccgctccaattcctgagtgcgacgtgccgccaaaataaccctgcatccagcgcggtagaagacgtgggccagagattcgcccaggcccgaactggcccccgtgatgagcaccacctgcaaatggtttacataattaccgggctaatcagtcattaagttaaactcgtcaccttgccgggcaattgattgcggaatttctgggcctggaatcgctgccaaatgttgatgatggccagtggaagtgccaccggcatcaggaccgtgcccagcacccagtaaagaacgttccagtcgctgctgggagcacatttgtccatgtcctgcaccttcattttcccaaaccgacgcgattcgatgatcaaacctttgaactccaagccgaatgcaaaatgattagcaatgacaacaaaaccgggattgtcattcactgcgaataaggcacaggggagcttagttaagaggaaagaaaatgaattctaagtgtaaggaagaatacaaaagtgagccacatgggaagtaataattattgtaacatcaagtgggcaaagtatgtaagtttgactttcattattacatttcaactgtgcttatcttctatcgaatatctactgtgcactgctgtttcgctgagaatggcaactgggccagctgattattgttacgttgttttgctgcacaggctgctagagaaataagatttacttcaacctaaaccaatgccacgatgaatagtctcctgcgacaaggactccgcctgggctgctgccttccggctgtccagcagcaaatccacaccaccgccgtgcacaggacattctgggagcgcgagaaaaagtccggctacaagaccaagctgccggaaccctcgaagaagcagatgatcatggacggcttgagggacctcaaggaggagatgaagctgtggcgccaggaagtcaaggagcagttcgaaagtgatcccatcctggtcttccggccgggtgaaacggatgtggtgttcgatttcaaggcgccggatgtgctggacaagtggacggtgaccaccgatgcggatcacggcgagggcaagagtactgcgactctggaactaagtgcagccggtgctggactcttccatggccaagtcaactcggatcacaccaaggatggcattatcaaaaggacgggatatgcgaacattcgcacgaagagagtgcgggtgagtttattgttgatttcaaattggatgtaacgatactaagcctcattatcctcagaaatcctttaagcgcgagaccacctatgactggacgcagtacaacatgctggtcatgaaggtgcgaggcgatggacgcagctacctgatcaacctgcataccgaaggctact

SEQ ID NO: 4319 - DNA, 1560 bp, DROSOPHILA
aaaggtttgatcatcgaatcgcgtcggtttgggaaaatgaaggtgcaggacatggacaaatgtgctcccagcagcgactggaacgttctttactgggtgctgggcacggtcctgatgccggtggcacttccactggccatcatcaacatttggcagcgattccaggcccagaaattccgcaatcaattgcccggcaaggtggtgctcatcacgggggccagttcgggcctgggcgaatctctggcccacgtcttctaccgcgctggatgcagggttattttggcggcacgtcgcactcaggaattggagcgggttaagaaggacctcctcgcattggatgtggatcccgcttatccgccgacagtgcttcccctggatctggctgaactgaactccattccagaatttgtcacccgggtgctggccgtgtacaaccaagtggacatactcatcaacaacggagggatcagtgtgcgagccgatgtggcatccacggcagtggatgtggatctcaaggtgatggtggttaactactttggcagcgttgccctgaccaaagctctacttccttcgatggtgaaacgtggtagtggtcacatatgcttcattagctctgttcagggaaagtttgccattccccaaagggctgcctattccgcctcgaaacatgccatgcaggcttttgccgattccctgcgagccgaggtggcaaataagaacataaacgtgtcctgcgtgagtcctggctacatacgcacccagctgtccttgaatgcattgacaggatcgggaagcagttacggcaaagtggatgaaaccacggccaagggcatgtcaccggataaacttgcagaacgcattctgcagtgcattcttcgcaaagaaccggacattattgtcagcgatgtccaggccaagatcgcctactatcttcgtcatctttgcccgagtctctacttttggatcatggccaagcgcgccgtcaaactggagaatgctgagaaaaagtccacttgagcttagagtatgttaagtcacacgtccttaagtattagtttcatttttattgttaattgaatttcgcttaaaatgaggaaattataaagtatcgcatatgtgtgtgtttgggttaaaaattagttacactcgtgttattgcctaacgataagattaataaataatgtattgtagtaatcgtaacataaagtacaactgaattgtcacacatgtgcttgttgttcgctcgtctttaaaaatgttaatcgtaaaattctagtattcacttctttgctcttcggtttttgttttgttcgatacacttaatttcgtttgtgtttcattcgatttcttaaagacatttacgcgttcttttcttaattgacaaaattacatattattcatttaggttcttggatgggtgatgcggtcttgggcaacatttaaaactggccattaactaggggtagacgatggtttcgtggggagtcgggagacgtacatacgtgtttataattcatttagctaaattataaaaatagcattaatccatctcgtgaaaag

SEQ ID NO: 4320 - protein, 326 aa, DROSOPHILA
MKVQDMDKCAPSSDWNVLYWVLGTVLMPVALPLAIINIWQRFQAQKFRNQLPGKVVLITGASSGLGESLAHVFYRAGCRVILAARRTQELERVKKDLLALDVDPAYPPTVLPLDLAELNSIPEFVTRVLAVYNQVDILINNGGISVRADVASTAVDVDLKVMVVNYFGSVALTKALLPSMVKRGSGHICFISSVQGKFAIPQRAAYSASKHAMQAFADSLRAEVANKNINVSCVSPGYIRTQLSLNALTGSGSSYGKVDETTAKGMSPDKLAERILQCILRKEPDIIVSDVQAKIAYYLRHLCPSLYFWIMAKRAVKLENAEKKST

SEQ ID NO: 4321 - DNA, 2833 bp, DROSOPHILA
cagctccatgttaactcaatgttagctaacatacgacacaagtcagctgttccgcgccgacagcaacagcaacaaaaacagcagctaagaacaaacgagttttggatcgaaaatgttgttaacaattaaatgcgctcagaatgtgattaagccgaactgccagaaagtggccaatctgcttgccagcagccgcagagctggtttattccccacaactgcaacaacagcaacgagtagaaggtattcaaaaggtggaatgtgcggaaggggagggaggggcaaaaataccaaacttaaatctgagctttatttttcgcgcagcctgtcgcaaatctcagttctgtattcgccagcagcgagagaagcagcacgggcagcaactggtggcagtgcgaatctccggagaatccacaacaccccaaccacagaagcaacagcaaccgcaatcacagcgaaaaagcgcaaaatggtggtaagtacgagccgaaagtgagtttgagatcaaggtgaacggagtctcagcgaaatcgagtggttcccttatcgcctccaactgaaatcaatcgaccacccaaggacaggtttggactttcggaaagtgctttatgccctaacaaatagaatcactgtgattttggccagaaatggaggtttttcgctcacaaattattttgtatatatatcgtatgaatcaataacactcacatacttgttgctcgctgccctttaggtacgactaaacgaacaggaacgcgccgagaagctgcagcccctcctggacgccggctggactttggtggaggggcgcgacgccatcttcaagcagttcgtgctgaaggacttcaaccaggccttcagcttcatgacgggcgtggcattgctggccgagaagatcaaccaccatcccgagtggttcaactgctacaacaaggtggacgtgaccctgtccacgcacgacgtgggcggtctcagttcgcaggacattcgcatggccacgcacttggagaccacggccaatttgttgaaataaacgcattgttatactagttgctaaatatctataatcttcggtgtccaataaatactcagcttagcatcgatttgctaaagatttggtagtcggcttgttccaggacatctggcgagatctcgtccttgacgtagcccagttgcttgaagaaggaaatggaggcttcgttgttgttgagaacggtcagcatgaccttttccagatgccacaggcgagcgcagtcctccaaagtgctcatgatgaactttcccaggccttttctacgatactctgcagccacttgcatttcgtaactgaaaggaagttctacgtaattaatgcataagggctttacttatggaatacccaccaatacaggacacagtccccgtgatccatgtcgaagcggaacattgcgtaggccacgttctccttcttttcgttctgggccaccaagtagcgagcccagttcttgttcagctcggcggctttgatcttgggctgccagcccatcttgagttgcttgtaatagggtcccacgttcgtctcggccagcttaaaggcccatttcagcagtttggagtccgcatccgacttcgctcggcagatgagtttgaattcctctccgctgggggctttgtagctttggtagctcagagattcgaggggattcttggccctggcagccgtctccacaaatctctgtttggcgccctgacttagatcgtcctgattccgcattgtttgcttaaaattttgtaaaaatggcaattcgactaaaaatatgccgcgcaaattagggatggcacacagtggtaaacaaactattattgcttatatagagactgctatcgattacacagattaactttaattggtatttttgaaataataattactggccacttcattatttaccactgttttgtaaacaattgcagaaaatttattgaattccattttacggcttatatacgggttttagactaaattgttagtacgataattaaccttaatatcactaagactacgagactcgatacatcaggtaaccccacatattgaatccccaattcaacaagtgctgacgtttccagttctctaaattgtagtttcaaggaaacagacgatgtttaggaagtccaggcccaaagtagagcctccacccacggctcccagtgtagaggaaatgctggcggacatggaaacgttcgaggtcaatcagcctacgataagcggatctacagacaacttggacttggagcacgctttcatgactgaaccagagaatcttcccctttcaacatggtggcagatgttcgacgagtacgatcagaaggtgaagaaactgtcggccaccgtgggagatctggagacccaacgaaatcagttaaaagaatgctatgcgaagctggaaaataacgcggataaactgagaacggacatccaaaagcagcaggcactggtcaaagaagcccttaaatgttaatctatcattaagctaccttatcttaaactattgttgaatgcacgagcgggtaacaagtaaaacctaaaaactccacaatcttgagaatattcactttaggcccactgcactgtggttcgagtcccggctagaacttcagctcaaagtacgtttgcggtatatttttcaaccgcgaggtgtatttttctgagcctgacattttaacggtcaatgcgcggtgtggtcacactgcttggtggatggtaaggtggtcgaaaaaagttgttaaaagcgcagaaaaagcaattgtaatgcaattgctccagtgactgtgaaaagtaagcagccaagcaaat

SEQ ID NO: 4322 - DNA, 777 bp, DROSOPHILA
tttgtttaccactgtgtgccatccctaatttgcgcggcatatttttagtcgaattgccatttttacaaaattttaagcaaacaatgcggaatcaggacgatctaagtcagggcgccaaacagagatttgtggagacggctgccagggccaagaatcccctcgaatctctgagctaccaaagctacaaagcccccagcggagaggaattcaaactcatctgccgagcgaagtcggatgcggactccaaactgctgaaatgggcctttaagctggccgagacgaacgtgggaccctattacaagcaactcaagatgggctggcagcccaagatcaaagccgccgagctgaacaagaactgggctcgctacttggtggcccagaacgaaaagaaggagaacgtggcctacgcaatgttccgcttcgacatggatcacggggactgtgtcctgtattgttacgaaatgcaagtggctgcagagtatcgtagaaaaggcctgggaaagttcatcatgagcactttggaggactgcgctcgcctgtggcatctggaaaaggtcatgctgaccgttctcaacaacaacgaagcctccatttccttcttcaagcaactgggctacgtcaaggacgagatctcgccagatgtcctggaacaagccgactaccaaatctttagcaaatcgatgctaagctgagtatttattggacaccgaagattatagatatttagcaactagtataacaatgcgtttatttcaacaaattggccgtggtctccaa

SEQ ID NO: 4323 - protein, 202 aa, DROSOPHILA
MRNQDDLSQGAKQRFVETAARAKNPLESLSYQSYKAPSGEEFKLICRAKSDADSKLLKWAFKLAETNVGPYYKQLKMGWQPKIKAAELNKNWARYLVAQNEKKENVAYAMFRFDMDHGDCVLYCYEMQVAAEYRRKGLGKFIMSTLEDCARLWHLEKVMLTVLNNNEASISFFKQLGYVKDEISPDVLEQADYQIFSKSMLS

SEQ ID NO: 4324 - DNA, 2450 bp, DROSOPHILA
cggagtcttcatgacggattggcaacgattgtgttgtaccgatatgaaacattttcccttctctatatatatccaactagctaattgactggaatatgccgtggcatgcccaggcaatcaatatgtaatatctatgtaaatcgcgaagggagcagctatattccattcctattagtaaacttcgtgtcatctcaactgctaatagtcatttaggataaaacatttctttattcgtattcatggtacagctatttttattgcttaatatgttttgaaacaaagctagttaagaaaagaaagtaaaaaaagataatttttatataattgtgttatttcttttacaagtcattttccgattttccgtcttcatataatcggtttttttggcataaaaaataaagtaatgtaccgaaatggaaatctcctgcatcattaaactcgtagcaaaatttagaatcgatttgattttgcgtctgacttttttaatttttactcatttttcgcaaaaaatcacgatgtaaccccttttaaaaaatgcaaaaaattgcaaaattttaaaattttaaaaaacattttaaaagggatatatatggttagctgtggtaattagctgcttaataaagtctgttttataattgtgggacctatttcggctgagttacagcaaaatttcaaaaatatatatgattttttctaaaaatagtgagttttttggccggaacacactatgtactaggatatcaagccactttaggcttgtaattgaattcccaaatataaataaatatataagaccatcagaaacctgagtttgcttacgatgcactggcgccatctgttgctgagcagaggcgagggtgcaatgcaacagcagccgacaacaaacgcaagagataactagcgagtaaaaacatttgggccgttaaacaaatactttatttacgacttgaactttagacaagcgatcagatggttctggatggctggatccatgctccctttagaccttgacgctgtgctgcaccagctgcaggttggagttcatgaagcacatgccggcgtggtaggccttcgagcaggagtcgccctccttggagtgggtctcggcgcagtgggcgatcttctggtgcacctcgtccgattcgtgcacctcaactccagggccggccagctggatgtggatcttgtggacatcgaatccgtgctcggtgtcgtagaagccgaacttctggaagatgcactccaggtagcagtgggtcaccgcgtcatcggggtactgccacttcttgtacttctccacgagctcctcgctggcgtgaaccttctccacgcactgcgtgcgatagttggtcagatcctcgtgcgtcttcaccacatagtcgtggtgatggtgatggtgatcggccaggacaaaggccagacccaataggagaacgatgagaaccttcatgctgatgtatgtttaccttgtcacaactgcaactgcaatttttgcccagctcagcagttgtttttatagacacagtacacagtacctaccgaagcaatcaaagtgaaattaacctttcatcgggtcgatttcgggtgattgactggcccaccgattacccttatcaagggccaaaggcccccaagcaacgacaaagccactgccagatgccagactccagatgcaaggctatcaacaagtctgaatcacggcttatcacaaaaatgtgacgtgactttgagcaaattccaattgaatcaaagtttcaagctgaactggcgccatctgtcgcgaggtggcgaaatcgggagagcgagacctgactagttcatgcagtggcgccatccgtcgtctagcagcgaaagcaaaatcagtttgagaacgcaaacaaaacgatattcttcgtctttttgttagcctcagcaaatagcttttaacgttatccctatacagattcaataacagtgaaaataatttaattcgaaagaaaacatttaggcttggggtcacccgagttcgtagactcattgtgccaatcaaaacagaaaaagggaaagcgaaacttcgtccgaaagtcaagtcaaggaaaatccgcccaccacaatgctttatcaaacggccccagcagacctccaagttttcgggactgaccccaccagcactcagcaaaccccacaacttgcggcacgagtgtgggtgaggaccggatcggattggatcggatcactcttatcaccttttgactgtgaacgtgactgcgccaaatgaaaacaaactatcatgctggagatggaggagtacactgaaggaaaaactataagcttaccacatattctaacgaatgtggttacaaacttacattctaatgtataccttagaattgaactaagtactagtatagtttcttatgcttgctttggcatacaattgaaaagtttataatttttctgccagtgtcagt

SEQ ID NO: 4325 - DNA, 450 bp, DROSOPHILA
atgaaggttctcatcgttctcctattgggtctggcctttgtcctggccgatcaccatcaccatcaccacgactatgtggtgaagacgcacgaggatctgaccaactatcgcacgcagtgcgtggagaaggttcacgccagcgaggagctcgtggagaagtacaagaagtggcagtaccccgatgacgcggtgacccactgctacctggagtgcatcttccagaagttcggcttctacgacaccgagcacggattcgatgtccacaagatccacatccagctggccggccctggagttgaggtgcacgaatcggacgaggtgcaccagaagatcgcccactgcgccgagacccactccaaggagggcgactcctgctcgaaggcctaccacgccggcatgtgcttcatgaactccaacctgcagctggtgcagcacagcgtcaaggtctaa

SEQ ID NO: 4326 - protein, 149 aa, DROSOPHILA
MKVLIVLLLGLAFVLADHHHHHHDYVVKTHEDLTNYRTQCVEKVHASEELVEKYKKWQYPDDAVTHCYLECIFQKFGFYDTEHGFDVHKIHIQLAGPGVEVHESDEVHQKIAHCAETHSKEGDSCSKAYHAGMCFMNSNLQLVQHSVKV

SEQ ID NO: 4327 - DNA, 5709 bp, DROSOPHILA
ttattactgaaattaaccatttgatgtagcttacaattacaattacatataatgtagaattatacacatctcatataatttgggttcctctgcacaaactctttgcatatgtattggtaattattgtttttccattagacgaattgaagttttgattggacacgaattgaagttgtatctgcgattctcgcgaatcgctatgtatgcttgtatatatccttatggttgtatgcacgtagttattcaatgaagtttaatgctctaacactcagtttacaaaatatacgtagaagcgggctgatgtctatatagatctggtatagtttataattgtattcagtacacttaatatcagtagtggataatgattcggtgtcttcgttaagctatgctttcatcggggtctcctccatccgttgcctttaaaggtagtgccgctagatacacctgtagtgcttattgcgttcggtttgagctattcgtgagtggttatactctagagtatgttattggtaattgattcctacatgtactatgctgcttacattattgtattgtgttggtttcctctccgaatcaatgttttctgactttttcgatcgatttgtgtgtggttttgtagcttcttggtgctaagcattctgctgcgtgttctctctagattcaatttggtttagttttatttgtttcattagttttagttatttgtttttatttttaagagtacgtataaagtgttaagcagtaagcatctatctttgcttcgttctggacaaaactttaagagcttccggggtgtgcaaatttgatgtcttgtatccattaaagcgatggtatactttaggtctttacaatcaaactaaaatattcaaataattaaaattaaattgtacagacatatgtatgcttaaacgttagatatcataaatattttatacagatgtatggttaataatatatcttttgaggaaatcaacttcagtggtgggcacattaaatataacttcaactatttgatatgaaaatcatacatgaatatatagcaacaaagtcggtgtcagtttaaaatatattgagaattcccctgccttgcttattctcatatttaaacatgtctatattgagatgtttctgaattatcttacacttacatgcacttttagggtcctaaacattttctaatacatttaatttagttagtggttgcttggtaaatatttcttttctgcttgtggcgttaacggccaattatctcgcattaatcttgcttcaaactcaaagcaagtgatctcccagaaatcaagtgaaatataaagtagaaagtagaaaataaactcaatcaatatgcaatcatatgccaaaaaccaaagagaaattcatggtggcaacgaggtcacatgactcccatttcggttgcctgctcctgctcccttccccctcattaaggggcgcctgcgcccaggaggttcctgcccctcccctactcgttcagcttgtgccactcggcgatctggcggcgcggcgagttgcaaacctcgttccagtggttcaaggcggtgctgctcgagttcgggccgcccagctccagccgaccgatgacctgtggaaatatcgagcgtgcaattatccagctattggcattaggtcatcccatgcgacttacctcattcttggtcacgcgatcccagtcgagcagcatcagttccaaagacacaccctcaagactggcgccagcgccctgtaattgagatatgcacgttaacttatgattctttaaaattattataaaagcttttcaaaaatagtccgtccatgtttaagttctatgataattatacgaacacaagaaaacaattaacaattaatctatgctaggtaattgatatggtgtttcgttaaactacaaacaaatagtaaatgaatatactattactcacttcggcggcgggaatatcgaatgcgaagctctcgttgaaaacggggctcagagttcgtttcttcacgtgcgtcttcttcttggcgatgcgttggccattgtagaggagatatatcttaacatacggatcggccagtccggtgacatccatgcgcggtaagtttcgggccttcagcaagacgacggtgaggcgaccggcagctggttgccagcagagggagatgagcagctccccgcgaccctgggctcgaatcttcaagctccgtggctggatctctttgctgatggacaaagcctctttggagatgtccccgatctcgatggaggtcaatgggcacaccacttcgccaatgacgtcgtcacgtgagtatcgatcgaagctgaggatgacaaagtgcagcgacatgttctgcaggtcgttcatgttcaggccgtagaaggtgaagtcctcgtcgtaaaccgggttccgggtatttcgcaccacccgggtcttgaccttgtgctgcttgtccggcagcagctgcagcttgacatacggatccgttgccgcctgagtgcgtccattcatgccagtgggaatatctccggttccgctcgatcctcccttgcaggggagtccgcgacaacggatgatggacaccataagggcgttcctttcggccaagtagcgcagcttaaaatagatggtacccagcttgccgtactggtcggtcacggtcagctccttcccgttggtcagcgaatggtcgtccagggtaatggtcacacttccgttggcgatcgtctctaccggcgagtggtgaaggctgttgtgcagcgagtgcttcaacccattaccatccaccacggtcagttgattgccattctgctgctccgcatgctgggcgggtccatctccctcctcgctgtacttgacattcggttgcgcaatcggggaggtggactggtcctgcatcggcgacagcagtcccatctgcttgcctcccgtcggcgagggcgacttcttcaagtagtgcggcggctggccgctgggcgatcgaacggcggtcggtcgccgggtcggctggaaggggaacgaggcgtcgtgctggctctgtttcttgttccggaggcgcatctgccgggcgcagatgcaggccactgacgagaggacagcagccgcagtcagtcccaggatggcggggacaactgaaaggacaacaggtatgttaggcaacatatgcatagtttagttgtacccaaaacgttgtcttcgattgaaatatgtgcaaggtggtgatgggacaatgtcactagtgtaaccttaaagccataaacaaaagtaaaatttactcgtattgtgttggaagttttgaaaaacccactgttaactagcactagcaccccattccagattacatatatagacgctcaatatgcaatctcaaaattatataatgggataattaaaagaatttaaaacataatagaaaattatatagaacattttatcattataaatctaataccgaatattaaatttaaatatccaataataacaaaaagcgttttattttctatcttttactaatatccgaaaacacaaaagaaaacgtttaatcacacttttgaatatgttctgtaattagtcaccgaaatgaaaaaatagaaagaacttttctccctaacacagctgtgagttgtttgtagacttcctttgttattagaacattaactttcgccaattcgttttgagcttatacatttcaccccaaataaaagagcacaacaaataacacatgtgcacgtatccccttcgaaacctgacaatccaggcacaaagacccgaattaattattcatagccaccgaaaaagtttggcacaacttgtgtgcaacattttgaacaagttgctaatgagcaaattggactgatcgaccactaaggtcgcattggatgctgcaatatggtatggtacttactcgtgtccatgacgctggcatctgggatatactcttcggccattttaaatggatttggcttagccgctctcagcacgtttccactcgatgttcctggcggctgtgtggaataacaattagtcacggtttaaaagtgaggaggaaaagttttgctggctgtctttggatgtttgcaactttcggtggcacgtgaagaattgcgtgcttcgattttgcgcacaaatgtatgctagaggctttttcgtgagcagcagctgcctgctttctgctcaggttatgctgacgtttggcttttgttgttatttgcattacttgaggacacccactcaggcacactttctggcaagagagcgggagagacacacacacacacacacacatatgagccacttgggtgctcttctagggtcgcatgaatcatcgcagcccttgcacacacgcacacgaagtttgcaggtttttcaacttctggaaaccatttttaatgggaagtcccacatttagaaatgttcctttctttcatttaggtcttcgtaacgttttgaaaatattcccttttactatcacttccagtatctgtatctattgtttattgcagcatcagagattctcggaaaagccatagtagccacttgatagtttttacgttttcctcgtaatcctgtttacgcctacattttacttgcttgaatgtattatagccttacttttttgtatctggtcctgcacaattaatatccaaaaattgtaatatttttcacatccacaaattgtggaaaaaaaatcaacaacgcagttctgcagccgttcgactttattttgccagtggcttcttaacttggctgggaaatcgttaaactcgcgcaggcgcacgagcaagcagctttttgtgtgggttgtttagccgaaagcggtggttgaagaaacctgtgacgtcttagccgaagtcaggggtgcttaaagaaagttttacaacactagaccatattcatgagtaaagggttgagtaataaaatacataaaaagttataaaaaggtaaaatttagaccaatttagacctactcattgcaaacactcaaaagctcccggttcagaccaagtttcagagagcgcagctttgcggccagctttaagctgtctttcgttgagttcgagcttttcgtcagtttaaaaagactggcgcctgctggtcagaagctgagtcggtaacggtctgcgtctgcgcgcagttcgaacaagttgagaaagagaccaacagaaagcccatccaagtgcagtgatcaatacgggtaactgacaaaaaccctagaagtcagggcttaaaaacgattttgcagcgctgccagtgtttttgtgtgataaaaaaaagcggctcagaaaaacttgctgacagcagatagcacacacgtttttgtcgtcttcgggccattgaaaaattttcccgaggcattttctataaggaataaacaattaattcaatatttaaagcataaaaggaaactagacaccacatcaccggactctacgatcgtaagttgatgcaatcgtctttatttctattatttgctgccttttcggtttttgcacaaccccaaaatccaaaaattcgcgatgtccgtttctggcattgaggaatctcaaaagatttggacagctttttggcccgaagtctgctggaaatttgccattgtcataagcccaagaaacggaattttgttcggtcttctgatggctcacggcgataaatttactgcactttgtttgcaatagctccaattcgattcgtttgtttttctggcacagagcacagt

SEQ ID NO: 4328 - DNA, 2067 bp, DROSOPHILA
tcgaacggctgcagaactgcgttgttgattttttttccacaatttgtggatgtgaaaaatattacaatttttggatattaattgtgcaggaccagatacaaaaaaccgccaggaacatcgagtggaaacgtgctgagagcggctaagccaaatccatttaaaatggccgaagagtatatcccagatgccagcgtcatggacacgattgtccccgccatcctgggactgactgcggctgctgtcctctcgtcagtggcctgcatctgcgcccggcagatgcgcctccggaacaagaaacagagccagcacgacgcctcgttccccttccagccgacccggcgaccgaccgccgttcgatcgcccagcggccagccgccgcactacttgaagaagtcgccctcgccgacgggaggcaagcagatgggactgctgtcgccgatgcaggaccagtccacctccccgattgcgcaaccgaatgtcaagtacagcgaggagggagatggacccgcccagcatgcggagcagcagaatggcaatcaactgaccgtggtggatggtaatgggttgaagcactcgctgcacaacagccttcaccactcgccggtagagacgatcgccaacggaagtgtgaccattaccctggacgaccattcgctgaccaacgggaaggagctgaccgtgaccgaccagtacggcaagctgggtaccatctattttaagctgcgctacttggccgaaaggaacgcccttatggtgtccatcatccgttgtcgcggactcccctgcaagggaggatcgagcggaaccggagatattcccactggcatgaatggacgcactcaggcggcaacggatccgtatgtcaagctgcagctgctgccggacaagcagcacaaggtcaagacccgggtggtgcgaaatacccggaacccggtttacgacgaggacttcaccttctacggcctgaacatgaacgacctgcagaacatgtcgctgcactttgtcatcctcagcttcgatcgatactcacgtgacgacgtcattggcgaagtggtgtgcccattgacctccatcgagatcggggacatctccaaagaggctttgtccatcagcaaagagatccagccacggagcttgaagattcgagcccagggtcgcggggagctgctcatctccctctgctggcaaccagctgccggtcgcctcaccgtcgtcttgctgaaggcccgaaacttaccgcgcatggatgtcaccggactggccgatccgtatgttaagatatatctcctctacaatggccaacgcatcgccaagaagaagacgcacgtgaagaaacgaactctgagccccgttttcaacgagagcttcgcattcgatattcccgccgccgaaggcgctggcgccagtcttgagggtgtgtctttggaactgatgctgctcgactgggatcgcgtgaccaagaatgaggtcatcggtcggctggagctgggcggcccgaactcgagcagcaccgccttgaaccactggaacgaggtttgcaactcgccgcgccgccagatcgccgagtggcacaagctgaacgagtaggggaggggcaggaacctcctgggcgcaggcgccccttaatgagggggaagggagcaggagcaggcaaccgaaatgggagtcatgtgacctcgttgccaccatgaatttctctttggtttttggcatatgattgcatattgattgagtttattttctactttctactttatatttcacttgatttctgggagatcacttgctttgagtttgaagcaagattaatgcgagataattggccgttaacgccacaagcagaaaagaaatatttaccaagcaaccactaactaaattaaatgtattagaaaatgtttaggaccctaaaagtgcatgtaagtgtaagataattcagaaacatctcaatatagacatgtttaaatatgagaataagcaaggcaggggaattctcaatatattttaaactgacaccgactttgttgctatatattcatgtatgattttcatatcaaatagttgaagtta

SEQ ID NO: 4329 - protein, 474 aa, DROSOPHILA
MAEEYIPDASVMDTIVPAILGLTAAAVLSSVACICARQMRLRNKKQSQHDASFPFQPTRRPTAVRSPSGQPPHYLKKSPSPTGGKQMGLLSPMQDQSTSPIAQPNVKYSEEGDGPAQHAEQQNGNQLTVVDGNGLKHSLHNSLHHSPVETIANGSVTITLDDHSLTNGKELTVTDQYGKLGTIYFKLRYLAERNALMVSIIRCRGLPCKGGSSGTGDIPTGMNGRTQAATDPYVKLQLLPDKQHKVKTRVVRNTRNPVYDEDFTFYGLNMNDLQNMSLHFVILSFDRYSRDDVIGEVVCPLTSIEIGDISKEALSISKEIQPRSLKIRAQGRGELLISLCWQPAAGRLTVVLLKARNLPRMDVTGLADPYVKIYLLYNGQRIAKKKTHVKKRTLSPVFNESFAFDIPAAEGAGASLEGVSLELMLLDWDRVTKNEVIGRLELGGPNSSSTALNHWNEVCNSPRRQIAEWHKLNE

SEQ ID NO: 4330 - DNA, 3094 bp, DROSOPHILA
ggacataccgctgcacgacgccaccagggaggtgatcctggtgggcgaacaggctcgggcccaggatggactgcgccggcgcatggacaagatcaagaacagcattgaggaggccaactcggcggtgaccaaggagcggaagaagaacgtcagtctgctgcacctcatctttcccgcggagatcgccgagaagctttggctgggctcctccattgacgccaagacgtatcccgatgttacgatcctgttcagcgacatcgttggcttcactagcatctgctcgcgggccactcccttcatggtgatcagcatgctggaggggctgtacaaggacttcgacgagttctgcgacttcttcgacgtgtacaaggtggagaccatcggggatgcctactgcgtggccagtggactccaccgagcctccatctacgacgcccacaaggttgcctggatggccctgaagatgatcgacgcctgctcgaagcacattacccacgacggcgagcaaattaaaatgaggatcggcctgcacacgggcactgtcttggcgggagtggtgggcaggaagatgcccaggtattgcctcttcgggcacagcgtcaccatcgccaacaagttcgagtcgggcagcgaggcgctgaagattaatgttagcccaaccaccaaggagtaagtggtgtactctactgtccatctccacctctatatcatgttgctttccctactttcagttggctgaccaagcacgagggctttgagtttgagctgcagccgcgggatccatcgttcctgcccaaggaattccccaatcccggcggcaccgagacctgctacttcctggagagcttccgcaacccggctttggacagcgagctgccgctggtggagcacatcaatgtgtccatgaagaccatatccgagggcggcgatgcctagaccccccgtagctccaatccccccgtagaccacccacacgctcagtagtcctagttcggtgcacttgtattgtggttttgcctgttgcctgcttagcctagaatcaataaaatatcccattcgaatggttgcatttcagcatagagatgaacacattttattggttgagaccgaaaattcagacctaggcggccttctttttggcctcctccgccttggccttcacgaaggccctgaccttgtcgccgatcttactggccatcatgcactggtgtccgcgaaaggcccacacatccgtgggattcttctgcgcgttgtcgtccacgcagctctgggcgatctgaagggcctcctcctcggacaggtccatcttgaactgcttggccaggcggtcggcgtggtagccctgttggtcgcagaagatgcccagcttgatggccgagcaggtcaggtactggcgcacgtcgggctcattggggaagatcaggttcttcagctgggagatctggtcgttgctcagcggattctccttgaggcaatcaacgcggattttcctgatctcctcaccagtcttgggcgtccagtcatcggcatgggcctgtttcgaaagaggtttcacttagttagtacacagttcgagctatctactatctacttagataaaaaaactctgagctattgggcaataaattgtatttaaccttaagaaataaatatttatgattcatcgttttttgcttgactacaaattgttttgttaattcattttgtaaccccctatatcaaggtacacattgagtcaagcctgatcggaattttccggcctgcgttaaataaatgataaattatgcaaaactgtgagactttgtagcaatagacatcagcaataaatgtgagcacgttaaactttttattttatcagcacattctacaattttgaaattttttgaatacattttgaatttcttgcactggttggttttgagtttgggtatttcataaatcaagttccaattggatcagttcgttcacatttgattgatttgaaacatatatactatacacaccacagcacagagggccagagctacgatcagatacttgagcatattgagatatagttagttatagttgcacgatcgcggcgaagttgaggttctgaactgaggcgccgacggccaagtgcctgactttatagcttcagatcgctggatgtctatatatgtatgtctatatatttctatcgctctgtatgtcaagagttcagttgcttatcatcgctccagtccagttcctagccacactgtttgattgcatccccgccagctgataagtctgggatgagacccagacttggattcgatgtgagcatttgctcagctctatttgctatgcaaaagcggtttgccgattaacttgtttattgaatagattttccgataatccagcagtgggttgagttaagtgattcctcaattgaattatttcgaagaaatttacttcctgtttcgtgaaatctaaatgcatcgactgcttcaagattatgagttaaatgatattgccttgtattgagctaaaatttaaagatagaaaactaaaaaggtagaaaactataagtttgaaaatatataatgaataccatctgttcaatgttaatcacgtaatatggtttttcccaaaaatcaatcatattcgaactggaatagtatttcgtagattttaaacagcatattcatttatgcttaatttaatataactacaaattaatctgctgttttatctgtgtctgaactgaaattagattagtaaatctgccgttgggtatgacattgcacttgacccgttatcagtgccttggatcgagtcaatcccccgattttccatacaaatgccgagctatatagatagtatagcttatagatagctttcacccattcaaaccgaggagcgatccaagtggccaactgtcaattcgacggccattatgcaaggccatgcaatcgtgtttaattaaatcaaataaaattcacagctggccgtcgcgttcaaaactaaatagtgcccccggcgaggcagagatgtcattactctgggtttgggatgaagtcgagcactacatgggcatacataacacgggtggtaagtattgagccgatgg

SEQ ID NO: 4331 - DNA, 625 bp, DROSOPHILA
aacctcaacttcgccgcgatcgtgcaactataactaactatatctcaatatgctcaagtatctgatcgtagctctggccctctgtgctgtggcccatgccgatgactggacgcccaagactggtgaggagatcaggaaaatccgcgttgattgcctcaaggagaatccgctgagcaacgaccagatctcccagctgaagaacctgatcttccccaatgagcccgacgtgcgccagtacctgacctgctcggccatcaagctgggcatcttctgcgaccaacagggctaccacgccgaccgcctggccaagcagttcaagatggacctgtccgaggaggaggcccttcagatcgcccagagctgcgtggacgacaacgcgcagaagaatcccacggatgtgtgggcctttcgcggacaccagtgcatgatggccagtaagatcggcgacaaggtcagggccttcgtgaaggccaaggcggaggaggccaaaaagaaggccgcctaggtctgaattttcggtctcaaccaataaaatgtgttcatctctatgctgaaatgcaaccattcgaatgggatattttattgattctaggctaagcaggcaacaggcaaaaccacaatacaa

SEQ ID NO: 4332 - protein, 151 aa, DROSOPHILA
MLKYLIVALALCAVAHADDWTPKTGEEIRKIRVDCLKENPLSNDQISQLKNLIFPNEPDVRQYLTCSAIKLGIFCDQQGYHADRLAKQFKMDLSEEEALQIAQSCVDDNAQKNPTDVWAFRGHQCMMASKIGDKVRAFVKAKAEEAKKKAA

SEQ ID NO: 4333 - DNA, 2918 bp, DROSOPHILA
ctcatatatatttgtttaggtgtatcgtattaaatacagatatttccgagagaatctcctcgagaaacaaaacacaaaaaatgcaaaatgaattcaagaaatcaaacgtgtttacaactataaataaaactatgcgatagatgaaaactattttgaaaaaaaaaacatttataagtatacatatgttggcagttgcaaaaaccgaagtaaaaaacaaaaaccgaaaagaaatgttgtactactttttggaaagactgaagagatcgaaattaacctttaattgaaccagcggaggaaatgatgaaaatcaaacattttaaagcgcgtttttactgcagttactaagcaaactgaatgtgtcctataaaatttcgtactaaatggcagaaactaaacctaaacgtaattacgagtatgacaacatcaaatgtaatgtattattaaataaaataattttaattttaattttaatcctaatctaaattaaagttaatctaaccgatagctagtgtttaactccagaacgaaatctcaatgtaaagacaaaacgaaaatggaacacaaaaagaaaatacctacaattaagtgaatagcaaatgaactctgacccacacacccacacacattaaatagaaacatttggggtattcagatagccgagctaaatgattatttgttttaccgtctaacgtttacagcagattacaaaacgattcaatggctaagatatgcaaatatacggacagttcccagttggacttggattcgatatccagctgaaatatgcatacgtacttatataattgtcaatagtagatgtgtgttcctcagttgatgtaaattgatttccgactaaccacaaactcaacccgtaataaagtaaattaaatgttatccttcccctgtgtctcggaatatcattttggatggcctgcctattttaggaatattgtgttgataatctcctcaaatatcattctgttgcatatgtgtatagtacttacgtaacatagtgtatatgggacacgttgtgcaacttaaacggatggggttcgtgggccaggaagctgttgtatgtgtagaacagaggctccgtggaggccacgctcttaatggccacattacggaaacagatctccgtggcgaccagaatatacggcgacacgatggtagcatggcagacaaccgtaaactccggcttgtgaccccgctgaaagacattcatcaaccatggaggagacgtcgatggcgtggcgttattcacctaccaaataccacagatgggcccgcagtttggcagctttttggaaaccacccaacttccggtttcgtcgcaaaactgcagaccatcacctcctgttttttcataccccgacgagcaggtgaccgacattagagtgcccatcggcagcaccgactgatcgcagtctatcggacgaccattcagggtgcactgcctcgtgtggcttagattacccacgtgcttacattggggcacgcaccaggacaatggatagcgacactggtcctggtcgcaaatgttcttctcctcgccgatcagagcatatccattgcggcagcttagatggacgacggtcttatcgggcacaaaggcggtactttgaaaggttgtcccaccaacgtagttttcgaccaccagagattttgaagggtcttctagtcgacacactttccaagcgtttttgacatccttctccgccatctcatcggagccatctaggcaatcgggaatgtgattacacaatgcattcggactaacacaggctccgtagaggcatctgaaagccgtgcagagtgtgccgtcttcgtcgctgcagtccttgcaatccgctaatccatcgcacacctgactaaagttcagacagttcagaccccttgcaatcgaaaaagtcctcatctctggaacgcatacacaagatgctatgcagcacaccttagctttaacattaataaattttgtctaacaaggtatgttagagtaaacaataaataacaaatgcatacggtttaattcactcagtaattcaaataaatttatcaaatatttaaattttacgagcaattgggattatttgtcttaaaagtatgggacgtcgtcccataggtaaacttactatgtaagtatgttagggcaatttataagataaattagttgttatactaggacagcatctaacgtgaacatactcaaactcaaccaattgagtttcatagcaaatacaacttacatacagttccctttgaggtcttcgtactcattctttagatttgcatcatgcaagcactcgaacttattttcatcgcttccatcccaacagtcgatctttctatcgcaatttagagttccatttaaacacccaccataaaaaccctcctcatcgcagaccttgctatagcataattcgaacctttgatctggccgatcggaactttcatctggcaaacaattgccaattattgtttttagtattagacttcaaggcaagcgacccatctaatagtaaggaaagcagaaatgtgcaatccaatgatataataggtatctgttagtctgtactcttttgtataagcaagaatctcctcttatcagtgctttaaactctgttaactatagtatactcacagaattaagagagctgataagacacgtattaatgcaaataattcgcagtgcacattgttttatataataccttttattactgaaattaaccatttgatgtagcttacaattacaattacatataatgtagaattatacacatctcatataatttgggttcctctgcacaaactctttgcatatgtattggtaattattgtttttccattagacgaattgaagttttgattggacacgaattgaagttgtatctgcgattctcgcgaatcgctat

SEQ ID NO: 4334 - DNA, 813 bp, DROSOPHILA
atgaggactttttcgattgcaaggggtctgaactgtctgaactttagtcaggtgtgcgatggattagcggattgcaaggactgcagcgacgaagacggcacactctgcacggctttcagatgcctctacggagcctgtgttagtccgaatgcattgtgtaatcacattcccgattgcctagatggctccgatgagatggcggagaaggatgtcaaaaacgcttggaaagtgtgtcgactagaagacccttcaaaatctctggtggtcgaaaactacgttggtgggacaacctttcaaagtaccgcctttgtgcccgataagaccgtcgtccatctaagctgccgcaatggatatgctctgatcggcgaggagaagaacatttgcgaccaggaccagtgtcgctatccattgtcctggtgcgtgccccaatgtaagcacgtgggtaatctaagccacacgaggcagtgcaccctgaatggtcgtccgatagactgcgatcagtcggtgctgccgatgggcactctaatgtcggtcacctgctcgtcggggtatgaaaaaacaggaggtgatggtctgcagttttgcgacgaaaccggaagttggcggggtcacaagccggagtttacggttgtctgccatgctaccatcgtgtcgccgtatattctggtcgccacggagatctgtttccgtaatgtggccattaagagcgtggcctccacggagcctctgttctacacatacaacagcttcctggcccacgaaccccatccgtttaagttgcacaacgtgtcccatatacactatgttacgtaa

SEQ ID NO: 4335 - protein, 270 aa, DROSOPHILA
MRTFSIARGLNCLNFSQVCDGLADCKDCSDEDGTLCTAFRCLYGACVSPNALCNHIPDCLDGSDEMAEKDVKNAWKVCRLEDPSKSLVVENYVGGTTFQSTAFVPDKTVVHLSCRNGYALIGEEKNICDQDQCRYPLSWCVPQCKHVGNLSHTRQCTLNGRPIDCDQSVLPMGTLMSVTCSSGYEKTGGDGLQFCDETGSWRGHKPEFTVVCHATIVSPYILVATEICFRNVAIKSVASTEPLFYTYNSFLAHEPHPFKLHNVSHIHYVT

SEQ ID NO: 4336 - DNA, 3759 bp, DROSOPHILA
tcaacctaacgaagaacattcgaatcaagtgcaacacggtggtggggctgtcggatctcactttccgtttcccaaacatcatcgagccgtggacggggcacttctacgctcagctgcacgaatcgaacaccgagttaaggctaactgccgtcaaaatgctatctcatctgatcctcaacgagatgatacgcgtcaagggtcaaatcgccgacatggcactttgcattgtggacggcaacgaggagattcgcaatatcaccaagcagttcttcaaggagatagccaacaagtcgaacattctgtacaacgtcctgccagatatcatctcccgtttgggggacataaacctcaacctggatgaggacaagtaccgcattatcatgtcctatatcctgggtctcatccagaaggatcgccagattgagacgctagtggagaagctgtgtctgcgcttcccggtaacgcgggtggagcgtcaatggcgcgacatcgcctactgcctcggcctgctcacctacaacgagcgagctgtgaagaagctaatggacaatatgcagcactacagggacaaggtccaggtggacgaggtttatcagtccttcaagctcatcattagcaacaccaacaagttggccaagccggagctcaaagctgtagtcaccgagttcgagaaccgactgaacgagtgcctgcaagtcaacccggataccgctgcccagggtgatcaagaaagcactccagaaggtcagggcaacagaaccagagcggcgccaaggacaaagaagggtggtcgcaagccggcggccaacaggaacaatactgtgcgaggacgcggaagacgtgctcgccgggattccacctcagaagagagcttcagttccagcagcagcgactagttcgtgctccatcttaagttacgatctgagcgggtttttaatgatgtacaaagatggtttttaataaaatagttaatagaacctattattgatatatttattactttgaagtcaacaaacatctagtaaactactaagatccgtttccacatccatcagaaagggaacaaatatttggttgcactaagctactgggatggggaaaccaacacacgtaaatggcaatactctagacgctttggaagtactaagtttggtggttgcgttcatgttgtctctgggcctccgacagatgagcactgggcactggcttcacttaattttcttgcgaagggagcgctggagggcaggaccgtcgtccgcggtgctcagcgcaatggcaaactgggcggcgtagtaggtgatcatgatctggaggcgggcgcagggcaggggcacgcccacgaacatggtgaccgcgatcagggcgtcggagatcacaaacagaatggctccgatggcacagaacacggcgaggaagttcctggagtccacggcgcgggccagcgatctccacagcattgtggtgatcaggaaacagtagatgggcactccgatgatgagaatctcgtccagtttcgtgtgcacgaagtaaacaactgggggtttcaaatattccaggtaaggtatacgtatataatgaccagtaaacttacaaagcgatacggccacgtacaagagcagtccaatgaaccactttatgggcttccagccaaaggcgctgatataaaacacgtgcgccactccaaaggagatcattccgaagggaaagagatttatgttgagcagagcatcaccaccactcgagaaaaccagacccaatagaatccaaagtgagcgacggtatctgttaaaaatttcttgttaataagtaagtagtatatagtatttcgatgctataaagcttactccttcttgagcgagattcccttggccaccacatagaatacaagcgcgaaaatgggcaggcatttgagcacggtggtccatagctctccttgaggatccttcctcaccagcgagaagtataggacaatagtaaccaggaatggcaccaactttgggccttgcgacttagcctataatcgatacatagtacataattttaaatatattgctttaagtatttacaataattatcttaatatgattacgaggcttaacatgttgcctggtcttaaaatagcttaaacgattataacaaatcgagccacggaggtccaaactacagccaaatcaagtgattagggaaatcgaaccgtttcggggggcagattagattagggttggttcttggggttggctcgacggaacctcgtcaccaaacataaatgggctttgcatggaattattaagggggggtctaatgggctcgggtggtgggcggcactcgagtggtccttcaaactttcgctttcaatgcaggagctttcgaagtgcgcccgtccggagaaccgagagatgtgcaaggtcaaggacgaagctttgtgtgctgcgtcttggttccactttctgcgtttagatagagcatccgcaatgcacacatatacatatttcgcataatttctatattatcaatgaagcttaagaccgtgagattcctgaattccagaacctgcgctacttacgaactgcccgaaatcgttcattgcggccgtaattagtgcaaattacaactattagagagggttaaaaaaaaatccgagccagccaagctgcactttcacacgatgcgagcgcggaatggaaaataaacaaaactatacagtgcccccccgaaaatgaaaacaatggaaaaagaacacgttgcgcacggtcggccaacgtcaataaactgaggcgtatcatatacattttcgattcgctggactgaaaagtttccgattgctggagagtgaaaagttttcagccggacatgtggtgtgcagcatatgcagcattctgcagatacggatatcccacagatacagatacagatacattttgcgggcccaggagggcagattgattatttcttacctttgccgtttggtggagagcgggaaactcggagagcgctgctcacgcaacaggttaattgagaattgaccgttgggcagagcttttccgccagcatcagaatgtatccgtgagatacactcatgcgcactcgctctccgctctccgctctctttgtatcttcaaaacaatgcaacaacctctgcacactttcacttgccaaagctttctccgcaaagcttggctggctccggactttttcgccaccttactgtggcccaaagttcattccgtttcggattgtggcatttttcaggcgtgcgaaaaaattcctcagcgctccaagaatttccacagcaattttggtcactgctttaaagtgagcataaagccaagaggccagcgaaagaatttttattttcttaaccaagtaagtgctagcccaaaagtatgctattgttaggcgttcgagtgtcccaagtggaaaaaccttgcttgattgagctggaaaattgtgtatccgtgggtgcttcctgcaggcaaatacacactcctgtagaaagcaggaggtggtgaaaattaaagctgaccagtgtgacacacatcgggcagcagcagctggcggggattggggcaggagcggagctcgtaaattatgcaaaacgaaattatggtaatgccactggccagaaagcacgagtgggatccttgccaagaacgaaataaagaaggactgccacacacttgacctccaaggagcaaagccacacaagacactgcagggactcgagcctatgtgggccaccagtgggtggtgcacgtagca

SEQ ID NO: 4337 - DNA, 1148 bp, DROSOPHILA
ttggccgaccgtgcgcaacgtgttctttttccattgttttcattttcgggggggcactgtatagttttgtttattttccattccgcgctcgcatcgtgtgaaagtgcagcttggctggctcggatttttttttaaccctctctaatagttgtaatttgcactaattacggccgcaatgaacgatttcgggcagttcgctaagtcgcaaggcccaaagttggtgccattcctggttactattgtcctatacttctcgctggtgaggaaggatcctcaaggagagctatggaccaccgtgctcaaatgcctgcccattttcgcgcttgtattctatgtggtggccaagggaatctcgctcaagaaggaataccgtcgctcactttggattctattgggtctggttttctcgagtggtggtgatgctctgctcaacataaatctctttcccttcggaatgatctcctttggagtggcgcacgtgttttatatcagcgcctttggctggaagcccataaagtggttcattggactgctcttgtacgtggccgtatcgctttgtaagtttactggtcattatatacgtataccttacctggaatatttgaaacccccagttgtttacttcgtgcacacgaaactggacgagattctcatcatcggagtgcccatctactgtttcctgatcaccacaatgctgtggagatcgctggcccgcgccgtggactccaggaacttcctcgccgtgttctgtgccatcggagccattctgtttgtgatctccgacgccctgatcgcggtcaccatgttcgtgggcgtgcccctgccctgcgcccgcctccagatcatgatcacctactacgccgcccagtttgccattgcgctgagcaccgcggacgacggtcctgccctccagcgctcccttcgcaagaaaattaagtgaagccagtgcccagtgctcatctgtcggaggcccagagacaacatgaacgcaaccaccaaacttagtacttccaaagcgtctagagtattgccatttacgtgtgttggtttccccatcccagtagcttagtgcaaccaaatatttgttccctttctgatggatgtggaaacggatcttagtagtttactagatgtttgttgacttcaaa

SEQ ID NO: 4338 - protein, 254 aa, DROSOPHILA
MNDFGQFAKSQGPKLVPFLVTIVLYFSLVRKDPQGELWTTVLKCLPIFALVFYVVAKGISLKKEYRRSLWILLGLVFSSGGDALLNINLFPFGMISFGVAHVFYISAFGWKPIKWFIGLLLYVAVSLCKFTGHYIRIPYLEYLKPPVVYFVHTKLDEILIIGVPIYCFLITTMLWRSLARAVDSRNFLAVFCAIGAILFVISDALIAVTMFVGVPLPCARLQIMITYYAAQFAIALSTADDGPALQRSLRKKIK

SEQ ID NO: 4339 - DNA, 3080 bp, DROSOPHILA
ctcctttatgaacaacatagacgctctgactccatttggaatgaatgtaagtcccttagttgcgtcacagtttgctcatattttgtttaattttattttttggttactaagctcatgattaaggaaccacgccagtggtccaatgaaatgatgtaccacctgtacccggatacggagaactttgttgctgtgcatccgctggtcacggaaacctctccaaatacctatgaaatgagtcccaaaaaaagacgttgctactttgatgtgtgtatagcttgcaactaataggaaaagataatcataataataattccttactccataggatgaaaagaaccctaccttccagaacacttcgttgacttataaccgcgaaaactgcctggtggtgtgcctccacttagttgtgtggaagacctgccagtgctcgctgccagcttttctgcctcccattggtaattatcgtaattattctattacattttaaattttttttttttttagatggagttccggaatgtggaatcaacgatgcacaatgcttgggcaacaattccgatatattcacttacgtgaagatgggtgatcaggagaaatacattaacgactcacgacagggtcacttttgtgattgcccagacaattgcaattcacggctgtacgaaatgtcacttaatgtgcgcaaattggattagtaagttcaatgtatatattcttaaagaacagataattaaattcccctctcttttagcccaaaaaactcgacagatcaattgataaaagcccaggtttattatggccaacgtgtcatgaccaaaatcattacgaaactcaagtacaccaatatagatttactggccaactttggcgggatcataagtctgtatataggggcctccgtcatgagttttatagagcttttatttgtgctgggaaaactgatgtggggtttcatcagagatgcgcgcataaaattgaaagagtatactaagtagcttactttaaaaaatgatgtaaaactttgccgtaaacaagtatatataacattatttctgtttagtttcctggtccgtgggatagcgtatatagatagccggatgtggcactgtagccggcgtctctggcagttggtccaagtaggagcagccgatggccagggcgctgccatcggagctgaagttgagcgtggatatggaggtatcgtattcgtggaactgacaaaggcgcttcttgttgaagccatcccaaatgttcacaatgccatcggatccgccagtggcgaacgtctgatagacattgtggaaactcaaggcattaacggggtagatctgttcgatattctgctccctattccggtggcacttgaaagcgaacttgcggcgctgcacctcaggatcgtgatccaggtactccactgccacccgtccctcgatggaggacatcacgtagccttctttgttggggaatagacgaatgcagcgggtctggtacttgagcgaggactcccgcttcatgatgtagctgtccatcttgcgaaggtcccagatgagcaccttgcggtcggaggtggccaccacgatcttttcgtcgatcacggacatggagtacacctttccgttgttctgttcgaaggttccaacgcagcgcttctcccgcatgtcccacagcttcacggtattgtcccagctacccgtgaggatgccattgacatactcggcgtgctccacgcatctgatgggctcctcgtgggcaccaattatgctttccgcctgggtgttgacatcaaagagacgcagctggttgtccagggagccactgaccacgtgcactatgtcctgcggatcgttggttgaataggggattgttaatgtgtacgaaggagtctcaccatgaaggcacagtcgagaagaggggcatcctgcacgaatttctgacgcagctggtttgccggcacatcatagaatctaagtgttccgtcccaagaagacgccgccatgtattgattcgatttggggccgaatttcacagcggagatcaggtcctccggcggattgttaagcttgaactctgggggacgcattttgtcaagttttctgctagcaacttgtggataataaaacaataaattcaaacagaaactgcttaaaacaaatcaaactccgaatttgcacggcgtctggagaagagatgcgagtatttcgatatcactatcgatacattgcatatttgcatcaaggggactccctaaacaggtacacttttaataatgtaaaaaattttacaaacccctgttaaaccaatataaatttagtttttgtggtaagtatctatctgataaatacaccctctcattatgagcattgtaagcttgcagtcagcagtaaccgataaccgatatcaagcgatcgatttggcggcgaatctgcccatctctataagcgacgccactcaattcagaagatacaattattatttcgcggtaaataggagtaataaccgccatggaggaatcgcacgacttccagttcgtccttcccctgaatgcatctgatctgatcaactccagcggagatcagtattacgtgaaggagatttttggcgcccaggagattcccgcgaaactacaaggtaagtttccgttttcgcggttggtttttaaattgagtacagttttcggacgcgcaatcttcatgtttccttcccagaatgcaagcgcaaagtgcacttgggcgatcctttttatatattcgagcacttcgacttgtattactcgatcatcgaggcccgcggttcagatggcgcctctgcacagaatctaatgaggtcctttgacctgctctacctgaccgtggagaaactgttccaagacttgcagcccctgctgacggccagtgagcccatgtctaaccagcagcgcaatagttacctcaacctgaccaaaatgacgctgttcctccaggtgagcaccgtcaagaagatcaacaacagtgtccagcaggccatgcgggatcagcagctcaatgttcagaagaagcgtgccaagccatcggagggattggagcagtttcccaactgggagg

SEQ ID NO: 4340 - DNA, 1027 bp, DROSOPHILA
atgcgtcccccagagttcaagcttaacaatccgccggaggacctgatctccgctgtgaaattcggccccaaatcgaatcaatacatggcggcgtcttcttgggacggaacacttagattctatgatgtgccggcaaaccagctgcgtcagaaattcgtgcaggatgcccctcttctcgactgtgccttcatggacatagtgcacgtggtcagtggctccctggacaaccagctgcgtctctttgatgtcaacacccaggcggaaagcataattggtgcccacgaggagcccatcagatgcgtggagcacgccgagtatgtcaatggcatcctcacgggtagctgggacaataccgtgaagctgtgggacatgcgggagaagcgctgcgttggaaccttcgaacagaacaacggaaaggtgtactccatgtccgtgatcgacgaaaagatcgtggtggccacctccgaccgcaaggtgctcatctgggaccttcgcaagatggacagctacatcatgaagcgggagtcctcgctcaagtaccagacccgctgcattcgtctattccccaacaaagaaggctacgtgatgtcctccatcgagggacgggtggcagtggagtacctggatcacgatcctgaggtgcagcgccgcaagttcgctttcaagtgccaccggaatagggagcagaatatcgaacagatctaccccgttaatgccttgagtttccacaatgtctatcagacgttcgccactggcggatccgatggcattgtgaacatttgggatggcttcaacaagaagcgcctttgtcagttccacgaatacgatacctccatatccacgctcaacttcagctccgatggcagcgccctggccatcggctgctcctacttggaccaactgccagagacgccggctacagtgccacatccggctatctatatacgctatcccacggaccaggaaactaaacagaaataatgttatatatacttgtttacggcaaagttttacatcattttttaaa

SEQ ID NO: 4341 - protein, 326 aa, DROSOPHILA
MRPPEFKLNNPPEDLISAVKFGPKSNQYMAASSWDGTLRFYDVPANQLRQKFVQDAPLLDCAFMDIVHVVSGSLDNQLRLFDVNTQAESIIGAHEEPIRCVEHAEYVNGILTGSWDNTVKLWDMREKRCVGTFEQNNGKVYSMSVIDEKIVVATSDRKVLIWDLRKMDSYIMKRESSLKYQTRCIRLFPNKEGYVMSSIEGRVAVEYLDHDPEVQRRKFAFKCHRNREQNIEQIYPVNALSFHNVYQTFATGGSDGIVNIWDGFNKKRLCQFHEYDTSISTLNFSSDGSALAIGCSYLDQLPETPATVPHPAIYIRYPTDQETKQK

SEQ ID NO: 4342 - DNA, 4064 bp, DROSOPHILA
gccacgtgccacatgaggcgcacaccaggattagcataacaccccgtttcacagtcacggatgaacgaacccggacggtgactccggagatcagaagatgtatctttggcgatgaggtcgacaatccgcactacaagaattttccagactttgagtactgggtgggaaactgccggagcaggtgccatcaggagcatgtcctcaatctgtgcaagtgctctccctcgatcttttttcccatctcagataaaggtaacttaagatctactgcagatacataattctatatatatttctcttcacagataactttactgcatgcaaagcctcagacttcaagtgtctatacgacaacagatgtaagatatcccttcaaggacatttcatgtcaaataatttaaaccttttccaaatagttacctttagcattgaacggcatcccgaggaggacgattttgttaaaaatccttttaaggaaagcatgatctgcgactgcttcaccagctgcagtcagctggttttcgaccgggttttcactactaccacgcttgagtaagtgaatcctatgtgtgtaatccactgcaatttctttaacaatttaaaaaatcctgtgcagtaataatgaaacggacacagaggcgggcacaatgcgcttagatattttctaccaatccggttggtttatccaataccaaaccaacatgagatttacctttgtggaactactaggttggctatacttatctaataaagtatcatcttaaatttttattttatcatttcagctagctttggtggcataatcggactgtttttgggagcctccttactgagtgcctttgagttggcctactacttctccatcggcctctatttgtacattcatggcaagagaaagttaagaaaaccagaacccggcgtattaactattcaatttggccagagaaaaataacaccaattaaattttgacattaaacatttaataaatacagcatatcattaccacacattctttctgtagttaaaaggatgcctcaatttcctgtcattggtatccttgtgggcagcgggattctcagccagatggccaacttcgttccttaggtagccctttaaattgacccacttagccttcaggtgcttaaataagaccccatagtactggtggtcatatagatgcatagcaagtcccacagtaaggtagtagatcaactcgaaggcactgaccatagaagcacccaagcaaagtccaaagattccacccagattggctgcgaatatacgagatatatgagtggttcgccatgctgaatctcttaccaattagatcgataatggtaaactccaggcttgtgcgatacaaaggtgtggtctccacttggtagtgcacatccaccctgaagagtttctgatgcggatccttgggtctgcaaagaatggtttcagatatctcaagaaatcaaagaagggttccattcaagtttcatacagtttatgggctgacaaaggcagtgtggtggtggaagtataatagtcgagcaggtagcagtccaccaagcaggaacaggtcattcccagcttggtggcactgaaaagggcatcctcgtcccttcgcttgtcgtagctgaagatgtctgcaacagatgggttttatttccagaattaatttattcccttatatgtatctcctaccattgtgacgcgcaaggcagcgcaggctgactgcgttgcaatccggaactgaaagaaaatattgggactatattatataataatcacatcataatcatattatattttttaagaaaagagtaattagacttacctctgtggttgtacaggaagaaaatgggcaaggagcagttgcagagctgaattaggtaggactcatggcagcggttgagacagttggagagctggaagggctttccaaagttcttggccgaatcgttggcgtccagttcgccctgctcgtccgcgaagaggcagttcctgcgctccggcgggatactgcgcgtggtgttatccgtccaagtgagacccggacggacagtcacgtaggtctccgtgttttgggttattgaatatacgacattgttcagttggtcgggcttcttaatcataacctgaaaatggtttaatctagtaatattctacggcctggcagatacttacgtagacattattattcgcctgcgaatcgggtcgcctgaagctctcgtttaagattagatcaaaattcaagcccgtactctggcctgctttggcattgtgcctcggatagaagttattaccctccttctgcttaattgccttggagcgtggcgaaacctccgagttgaaaaccaaacaaaatccaaactccgtcttctccaacacgaagtattcgcagcaattgaaggaggaactgcgccacaggcaggatttcggtaccatgatatccgagcattgaagagtcataaatatggccagctcagttaggttcacaaagcccaccgcctccaggttatcgtcctccagctcggccaagcttgaaaggtaactgccaaagcgcaaagtttccatccgagaaacaaggacggtgaaactttcgaccagttccacgctggcattggtcggcaggaactgctccttggccgcctccagcttgttccagttgatgcggttgtccgtgcagattcccacggccggaaatggcaccagaaacacggggaactgcggatcgtggaccaccgtctgcagcttctgggaaacgaatcgctcggagagcaggaggtagaaaaagaaggacagcccgatgctaatgatgagcagcatcgaccagatgattctaaatacaatgattatatacaatttaaaattgaatgtagatatgaatagaggataaaccacaaacctctccaagttatgcaggtgggaatcgtacagatagcgaacgcagtgaatggtggacttctcgcagtagctccgaaagtggacctttaacaaatccgcgaggcacctctcgttgtcaccaaaaccggctgcctctgtcggtttgaccgaattatctcccttggccattccggtgacgagtcactcaatcactgagcttttggccggaattcggggatcccttttaaggccacgttccaaaggccaggtgacttgtaattgtatgtgaggggacaaagttccgacggccaggccatccattatggctcacaagctttgtaattgagtagttatgtttcctgccatttgataagcccgctgacagaagtggttgtctgcgcattgattagcggatcgaactaccaattagcgcgattttcccacagtcgcagttcgtccgctgagtgaaatgagtgccaccgcctggaagccagaaccctcctccgaggataatgatgatgaccacaaggagtcaaaaaaaaagctgaagaaggagggggcaggtggatgggcttcgaccaggcggtaagtgatacccttcgctccaaaaatatccatgactctggccgtgcataatctcttgtgttccaaaagtaatccatgaaattcggtttttttttaatctatagatacgccagaatcccccttaaaataatggccgctctggccaccgtgtatgtgagcattctttcctcggagcggtacttctactactgggtgcagacctccatcgaaaggactgacatgcatgtatccgagatcgatttcccagccgtgaccatcattccgatcaatttgagcatcctgaaagccgagaagctctccaaggcctataacttggttcagtccgtggtctggcaaacaccgatgtccgcccgcctcacggatgagaacttcacggagttctccgaactggaaaactggaacgcgcagagctggggaatctaccaggcgctgcagatgaactgccagcacttcttcaccgagtgccagtggcgtcgcaaggcgatgaactgctgtgacctattccgacccaccaagaccttcaatggcttcgccttcgagttcaactcactggtctcctcgggaagagatgaaacgtggccctggtccgtggcttcatgcggat

SEQ ID NO: 4343 - DNA, 1647 bp, DROSOPHILA
atggccaagggagataattcggtcaaaccgacagaggcagccggttttggtgacaacgagaggtgcctcgcggatttgttaaaggtccactttcggagctactgcgagaagtccaccattcactgcgttcgctatctgtacgattcccacctgcataacttggagagaatcatctggtcgatgctgctcatcattagcatcgggctgtccttctttttctacctcctgctctccgagcgattcgtttcccagaagctgcagacggtggtccacgatccgcagttccccgtgtttctggtgccatttccggccgtgggaatctgcacggacaaccgcatcaactggaacaagctggaggcggccaaggagcagttcctgccgaccaatgccagcgtggaactggtcgaaagtttcaccgtccttgtttctcggatggaaactttgcgctttggcagttacctttcaagcttggccgagctggaggacgataacctggaggcggtgggctttgtgaacctaactgagctggccatatttatgactcttcaatgctcggatatcatggtaccgaaatcctgcctgtggcgcagttcctccttcaattgctgcgaatacttcgtgttggagaagacggagtttggattttgtttggttttcaactcggaggtttcgccacgctccaaggcaattaagcagaaggagggtaataacttctatccgaggcacaatgccaaagcaggccagagtacgggcttgaattttgatctaatcttaaacgagagcttcaggcgacccgattcgcaggcgaataataatgtctacgttatgattaagaagcccgaccaactgaacaatgtcgtatattcaataacccaaaacacggagacctacgtgactgtccgtccgggtctcacttggacggataacaccacgcgcagtatcccgccggagcgcaggaactgcctcttcgcggacgagcagggcgaactggacgccaacgattcggccaagaactttggaaagcccttccagctctccaactgtctcaaccgctgccatgagtcctacctaattcagctctgcaactgctccttgcccattttcttcctgtacaaccacagagacatcttcagctacgacaagcgaagggacgaggatgcccttttcagtgccaccaagctgggaatgacctgttcctgcttggtggactgctacctgctcgactattatacttccaccaccacactgcctttgtcagcccataaactacccaaggatccgcatcagaaactcttcagggtggatgtgcactaccaagtggagaccacacctttgtatcgcacaagcctggagtttaccattatcgatctaattgccaatctgggtggaatctttggactttgcttgggtgcttctatggtcagtgccttcgagttgatctactaccttactgtgggacttgctatgcatctatatgaccaccagtactatggggtcttatttaagcacctgaaggctaagtgggtcaatttaaagggctacctaaggaacgaagttggccatctggctgagaatcccgctgcccacaaggataccaatgacaggaaattgaggcatccttttaactacagaaagaatgtgtggtaa

SEQ ID NO: 4344 - protein, 548 aa, DROSOPHILA
MAKGDNSVKPTEAAGFGDNERCLADLLKVHFRSYCEKSTIHCVRYLYDSHLHNLERIIWSMLLIISIGLSFFFYLLLSERFVSQKLQTVVHDPQFPVFLVPFPAVGICTDNRINWNKLEAAKEQFLPTNASVELVESFTVLVSRMETLRFGSYLSSLAELEDDNLEAVGFVNLTELAIFMTLQCSDIMVPKSCLWRSSSFNCCEYFVLEKTEFGFCLVFNSEVSPRSKAIKQKEGNNFYPRHNAKAGQSTGLNFDLILNESFRRPDSQANNNVYVMIKKPDQLNNVVYSITQNTETYVTVRPGLTWTDNTTRSIPPERRNCLFADEQGELDANDSAKNFGKPFQLSNCLNRCHESYLIQLCNCSLPIFFLYNHRDIFSYDKRRDEDALFSATKLGMTCSCLVDCYLLDYYTSTTTLPLSAHKLPKDPHQKLFRVDVHYQVETTPLYRTSLEFTIIDLIANLGGIFGLCLGASMVSAFELIYYLTVGLAMHLYDHQYYGVLFKHLKAKWVNLKGYLRNEVGHLAENPAAHKDTNDRKLRHPFNYRKNVW

SEQ ID NO: 4345 - DNA, 13514 bp, DROSOPHILA
ctcattagtgagtcaatacacgcagcacgttttgtccccacattgttacatcaaacgcttgccccatgggacgggcactgtatccttgcaggatgcaggacacaaggacctaagctgggcgaaaaaagtgtaaaaaatcagacagacacacatgcgagctagtgccccccaaagagttgtttaagatgcgttgcatcgcactttcgcactttgctgactgctgactgcaactcgtgcagctgtctatccatcttggccatatccgtttttcccaccaaccgactgactgactggcatactcaccctggtgaagcccctgaacccgctgaatcccctaagggagcaacggattccgggggccatgatccgaaaatgtaaagtgtaaactttttgccagttgtttgctgaactgtactgaactgaactggcactgcactttgtcttcctgcttggctggccaacgccatcgccatcgccatcaagtgtggcaactcatggcatttgcagtcctgcgagcaatccttaaacagccccataccgtcagtccccctggaggaccacaaattcgcaagtccgcaaagatacccttagtgcccgggctgaaatttaaataagacaagtcatcgccgagagttccgtcttagttgtcgctttttaatctccttgcgtagtttgtatatggtagttacagtatagtacactcaatatataaatctaggtttgccgtttgccgtttgcagttgcagcttagcctagtatgcatggcaatcaattgagtttaatcatcttgctcggagcttaaggataatgcttaaggataatgcatttacatgtacacttagactagacatgcttacacaccaatacaccgatacacggatacagacacaacgaggactctatgagctatgtatgtcacttatgcgctaccatattcaatattaataattgccatttgtttgaaattcccccatctctgttccctccccacctaaccatcccttggaccatccatttcgctttgtttgttttttgaaaacaatgagcaacattttgccatggcttgttcctactcatccattaaactgacgtctcgccattgttattagtttttcccgcattagagccccattcttctactcgatttattcgccgaccttgtgggggcggggcaatcaatcctaattgcacacattaattattgcaaaatcggaatcggaggagcttagccatcataagcatacatgtagagtggtacagaagtggatgggcgagccttttgagggattaattcattaagctgccgcatttcctaactttcggctgtctgacaagtacaattaaaattcaccctattcatattgctatattggtatatatgtagttcaaagaacgtaatggaggatgggctaattagctagccaacaattgcagtgattatgactttgtacttggatctcctacgactgggaactggtcttgaagcctgtttgcctgattgttcgagtccttaagttggtataaattcatattgcacccgtagaatttcagttgataacaaacgaacaaacgagtttcgagtaacagaaagctagttttgagcgacagaggagtcaaagttaagctatatacatgcatagtatcttcttggatttcagagagtcaggtacttggacaggttgaagacgtagctttttgaattcaattgctagacgtttgagacatttacagaacggaacggaacgaaacggaacgaacaactacataatggaagatctaagatatgagagctaacagttacactaatcccactatgcaactaccgcctgcaactgcaactgcaaccccgtgtttttgggtgtcgatatagggaggatttcctgttgcatagtgttctatcaccgatcgataagctaatgagtggctaggcgagtctagattgctatgtacacacttcgaatgggtcgaccaatgggctggcgaaactcaatggacacctctaagccaattgcaattcggattgagctatattgattcgcttgaaggtaaaaataacatacatacatacacaaatctttgctggcaaaatgataataaaattcagttcatatccttattgaaacctgaagagctagtaaaaaaataaatagacaacaaagtgaattcaaaatctgattggcttagaactgtccaaagtattgcctttccatcgatcaccgcttctgataaacacacatatgtatatggttgaatcttaaagctaatgtctgggcttgtttccgtggttctgttgctgagtttacttgaccgaggagctggaggaactcgatgcctccacgggctggctctccagttggggcgtggtcaccaccagggcgagtccgacgctctcgctctcactgtcgctgacctcctcgtcgtcgtcctccacgtcgcccagcgtagttatttggctctggacactctggcactgctccaggattcggtgttggttccgcatctgcacctgatcctcgctggcgtcgatcagcgagggcgccgaggtggtgtccgctccggccacagtgctgatgattccattgggcgatcccagcgaggcgttcgagctgcgcaaccgcttcatgcccgtcatgggcatgaaggacacgtggtgacccgacgagttggagggtcccggggtcagggccttgagactgggtgccagcggagtagtggccccgctcacagagcctcctggactgccactgccactcaaggtgggcggcaccgaagcgatcgtcagggtggacaccgaggaaggacgtcctccgacgcccaggtgcagcgaactggccgaggcagccgccaccggaggagcactgatggtgactatggtcttggctagagcgctgttcaccgccgtggtggagttgtagtccccgcgcatctgcatccccgagctgcggcgcctggagcggtggtggtggcggtggaagctctggcatctagtgcaggatcgctgcgaggacgagggcgtggccgtgcccgaggagtggtgctggtgatgggcggaccgtgatccgccgcagttgctgcccccgctgcaggtgctgcaactgctcagctgccgtcacatgagcgtccggtcgatctggttcaccgagtggtagccgaaggaggtggaggcggccaccattgcagcggccacgtgacactgtgagaaaaaagggggcagaaagggacaaaaaggaatgataatgtattgaaaataagtgggcaaaacatatttaacaacatttaagtttaaaatgaaaaaaggaaatattgaattaataaagtaaagttagttaagtaaagatatagaaaagataagttcaaagtaaacaaacaaatgtcgaagtaatccgaataaagttggaaagtaagcggaaaaacaagcaacaattgaatacaatgaagttaaaaaacaattcgttgagaaagggacagagacagagaggagtgaaagagtagaaaggcgagaaaaagcgtttaattaacattttgttgtcttatttcgtttcgagtgtttgcatacaatttgcaggcagtgtttccggaaaagttcgggtgttattcttttcttttccttttcctttttttttaattttttgttttgtggagtgtggctgtaaacaaaattgccgtttcaacgcagcagcagcaaacagcaaagcaacaaagtgaaacgacaacaacaacaatgcacagccagagcaacaataacaacaacaccaggtgggtggtgggcgatgggcggtgaaaacggagggggcgtcacaacaacaacaacagcaagaacaataacaagaagagagacgaaaactgttgcggcttttcctggcagatttccccttgatttcaaccattttcccaggcttttcctctactattttatttttttttttgggtgcagtaaaagtcaaagcaaaatgcatgattgaaaacagcaaaacaataaaagagtgtgggaaaaactaggaaaagagcaacaacaagcagccatagcaacaacaaaagagcgggaaaacgggcaaagaaaagcggtagctgaaattccaatttctgattttcagtttcctttttgttttcttttattttatttttttttttggggctgagaattataacagtaacaacaacattatcaaaaaacttgtgagtgtgcgtgtgtgtgtgtttttggggaaaattccaagggcttttcccatcttgcaagtgctttgctgctcctaacccgatttcaccttaaaccaaaccaacaaaaaacccatcatctttggttgcccaattcaattacaggctcacaggcaccaccttcttcaccacgtcgcctaaagttcttaaatcccccgaccatttgcgttcaatttgcattgcgtatacgccgagtggtccgtcgcccttcgcagtgcggtcgcaattagcttaaataattgaagagcctgaccggatggcccgcttagcagacgccccaggccaacttggtaatttgcaatttttatagccccccggcgatgtcgaaaatacaagagtagggatgttagataatcacttgagttagttttgctgtagacactttgctttaagtaagcttgcacctatacgtctgaaaagttaatagctgccacctaatctagtcgatttgatttaaagtagaaataataaattacacttattacttgcttgatttacatataaatcgatagttgaaatcatttcctggccatctgcatattcttacctttttctaaatactaattcccgccatctacgttgttttaggacctgctcataaaacccgcttatctagacttcattttgccttgagtatttttatcataacattttagtgactcattaggggctggtcaccgaaaaaggacctttcgtgcggcttcgccaaaaggtcaatggcaccgtggcagctccaagtgggctgtttcgcgcacgaacttgtcgcggccacgcccctttggctaatttattgcctggcactcaataaaccactccggggtcctggtatccccgggatcctgactggggccacaggctaagctgcgggggcaccctatcgctatccctatcccgcctgcttaacggcgaccttgtccgttgacagtcacaaaatgcccgattgccaggacctcatttcgctgctccccctttggagcctgggcaggacattaaaagttacatgactgcctacgagaattcccacggactggagctcggacttccgctccaacgactctgtcacataattataaacgttaatttcacgttcacagtcaattagggataattgatgtttgcgcaacatttgtggtaaattacattttgatgttcgtcctgcccgagaaatgagccattatcgaatccacgtattcgggatgtatttgtgtgtatatagaaggcacacgattattgttccatttagtgcgcctcagttcgtttcggtggcatgaaatcggtttgattaatcggttaagcaatttcgatttcgaattcaatttggaccgcctctcataaatagcacaaagacttggccaataattgatgcaattagcagcgattatagcagcagcattttagcaaaagcaacactggcagccacaaggagcagagtatatacatatttatcaaggattgattaaagtacgtgctatttccctgcagttttcgctactcgaaggccccgaaacgcagcagctccgaggatgtggcagttggcctccggctggccagtggtttcctctgcaaacagttagaagcacaaattcctggtttacaagctgccaaatttatgctaaagagcctcagctgcaaatgtgtatgcgtgtgtgtgtgtggctccgatttgtgtgtgtgtgtgtatgtttgggtgggctcggtatgactgactggcattttcaatcaaaacatcttgttgcgctcaagtgcacagggagaaatcaacaccacctcttatgttctacatttattataatcttaacaatcatatacaattaggctgttggtttcaccaatatgtttaatgtaagatttgtaattaaaagtgtggtaacacttaacactcaaaatatttttgctaggaatatgaaattcgtaggacacaagtacgtaaacgatacttgactttatgccatttaaatgtcgctatgatataccgcaagtataataattttcgatatgtaaaacgatcattggctgacctttagtggattttttcccatgtgcacgcccactaaggatgccagtcgaaatgggatgcaaattggccctggcggccagagtgcgcttatgtgtatatgtgtgtgtgtatgggtgggaatcctttacggctcattaggacaccgagtgggcggtcaggggtggtcacaaatgtcaggcggcccacagacgacagtcggcgattaatcggcgtgttgagggtgcacgtggcagtgtgggcggtggtggcattaaagttgaatggaactcgtgtaaagttaatttttaagtgtcgaattgggactggcgactcccagtggcacacagacagctgcaacttgcggctgaccgcaatgtgcttgaggtggcacaaagatggccaacagtggggcagtcaagtgcccgacttttgagggcggaaatcgagtcctttcggccaggcacctaaccacacatctgcaatatcctcatttgaccaaagccatttccacttgccgtagagcgagcaaattgcggcagccggaagtcgcctcatttgtcggccaaagggcaggtccttcctgagcaaaggatttgtcataaattatacaaattgcaagcagttagcaaggacaaaagtgtcgggtagtagaaccagctaggacctgtttgataagtttactttaatcttttaaatttgcccttgtacaacgggtcgtatgcgtattatcctcctcgccatgttttgctttttcaattctgggccaatctccaatctccttgctgcccattttccccagctcgctggtgagtcataacctttaacctcttttggttaaattgaagatttttgatacaagtttctattaaattaagtgctttcttgttgatttatatttggcatttagtgttctgggcaaacgttctgcagccaacaggcaaacttataaagtgcacaaactttatcctttgacaatcaattcgctttcttgttgtgccaaccagcaagctttaaatcctatgatgttttattgaacaactgaatcgaatgccggcaaatgcctgcattttattcaggtattattttaagtaatcccgcccgttgaacggaatgcttcaagtgtcgactcagtcgtgcccgaaacttcatatccgcgttctttgaattggcagtggaggcacttggcaaataaattggcatgctcttgggtgtaattgatatgatgacagacacatcgcaaagaaaacccccaaaatcgaaaggagcggatgcggaaaggcattcgcatccgcatccgcatccgcatccttatccctacacccacacagccacacccgcaccaccaccgaggccagacacatattggctgttgattgctgtaaataacattttcatcaatacaattacatgtgtgtggtatgtacgagtgtggtgtgtgtgcgggctgtgtacgcttgtcggcgggcgaaaattgagttggaaatttttaagtgcaaaaaatgtttatggttcacttgataacacttctcaagtatcggttgtgcgtgactcctttgcgggtatttcttgcctccggtggggaaaaggtagcatcctgactcggatgctatgtcgagaaggtcaagaggccggccaagtatgtattgatccaaaataataaaaaacgaactgaaaatgtgaaacccttccttctcggtcataaatcgcagagaaaagatggccagaaagttaaacacacatttttggcaaaattaagaatccttttaactgaaccttttcgaatgagctttcaatataattagtagggcagtcagccaaaaagttcggcaaataatgaatttcaaaagtaaaaatcataagaaaagatcacatgaaaataataataatattgtagtacagcctatcgttaaatgaaaatttgcttttctttctaaagatcttaagtttttccacagatttccagcactcgtgtttttccaccacaagtgttcctgcctattaaagccagtccagtctatttttaggccctttcatctgctttcccgaatcgcataaaccatttttactctgccacaaacgagtataaaaagatcaacaaacacgttatgagagagcggtgctggtgtttcggttttttcttgtttcgtcattgtgtacactgggaaaatctcttgtgaggggcgacagcaacagtaacgacaacatcaacaggagcaggaacatggtgggcaaaaacagcaacaggaaacggtgacaaaaacgttgaaaggacattgtgtcctgcaagtgtgcaagattgtgtgtgtgtgtgtgcgagtgtgtttgagtgcccagagactttgtggaaactttcgatttttcttttctttgtttgtgctcttttcattttcattcagcttgcctgcaacaacacacaaaaaacaacatcatcaaacagagagggctcaggtgttgaagcccagggacttttttgcgtgggtggatagctttatcagtgtcccagtgtgtgtgtgcttgtgagtgtgtgtgtgtgtgtaagggtgcaacacattcaacaggtgcttgaatcagagtctgttttcgcatcatgttcttttgcagcaaggtaagcaaatcaagaaaacatacataacagggtgttcccgaaatctctagagtcctcaaatcgtttgacattttaaaggatgaacataaatgttttttaagattatcctcaagcaaacttcttgttcgtagcatactttgcagtttcaaatctctggagatttcgagaacacactagagtgaaacggaaacaaggacacaaacaacaatgccatgtccgagtcaacaaacaggagtgagtgaaatagcgcagccacagacagagacggcaacagtaacagatgcagataccgaagaacacagacaggatgctcgtgcttattccccggttcttcatgtgggtgccgttcaagggacaacaggacacacagacagagaacggcgaacagagagagtcgcaggacacggacaccgacaccgatacagacacagagtcagagctcgcttaccttgccattgacttacggacaaatggagggcgctagggggcgtggctcggcgccttaatcattgtcaactaaatctacgctaaactatatgtaggtctgctcgcaggagttgtgtcgcacgtgctgaatgccgtgcagcgagcaggtcgagtagcagcgccgcgtcgcgaatctctgcaaaatcaagaacgccgccggaatcacaatcagctcgattcgccagacatggctatactatatatatatgctgtctatgggatgggtgtgagatggggatccgtggcgaagccgtaatgactttaatgctgtcgtgacatgagctattttgggacaggccttcgtttccgaaactgacactttaagcgtttctgataggtttgccaaattacttgccgaacagtcgaacttgcacaatttattaagcaaaaaacttggcaatcataaagttattcgccatcagatggtattgagtttaagggcatgcccaacttcaacatttagctttcaactcatcactcatacgccacgttgaacggaagatgagactatgtattttcttggcaagtcttaaaattaattcaacactcctctttcttatactaaagttcagacaagttcgactgtaatggggaaagtaagcccgtgactttggtgtaattacttagggatcctattgacagtgggtccttgacggacgacaatggatctctccgtcggcaaacagcgggtgcaacgctctaacgatcccattcaacccacggcaacccactcaggtgcagccagagttgccaaacattagaaaattattcattaaaatcacgcagagggtcgagggtcgacaggttgagtgatgcgccccggatgatttatgcaggattggggatgtaaggatgtcggtggatgagaatgaatccgctgcggatgtcaggaagttttcatggctgcctaccatgtgtgaacggatgtggtggccagaatcgtgggtcggggtttgggcggtaaatgtcagttatttttttgcatattcattaagtttgtaaattaatttcgccgttcgttgagtttcgtttttggagcatacgaaagtggagcgcttaattcacgaaagcggtctccatcaaacccaaaaaagtggatgcaacaacaagacagcagcgaaggagaaaatgtggaaaaccgccaagtttcccaatttcccagaccgtaaaaacgaggaagagaatcgaaacacatcgactcgcatcgcctgtcggaggatgagaatggcagtggatggagtgggtcggagaacactcacctgcgatttggaacgcatcgtgggctggtacttgcggcgaatcttgcgtggacagcacatgcacagcagacgcacaaaggccctggaagagaagccagttaggatcggggccagctgggttaagctcggcattcgaaagccacaaaaacgcagcccaaataaaaaaataaaaaaacagcacaaaaaaagagtactttctgtgcttactccaccaaaggtaaacgttgaataaacatcttcgttctggctaaaaatatataagcttccagcccaggagccaggataagctaaatccttgtgtgcactgacgcataataaataaaataaaatttgaaaataagaaactgcgttttgtggagctgaatgcttcggctcaaggataactaaggatcctcacctgcgaaagtccctgctccagcaggcgtaaatcacaggattcatgcaggagttgatccagccgagccaggtgacgattgccgagacgatctcctcgtgctcgatgcactcgatgcagaacccagacagcaggttgaccacgaagaagggcagccaacagatgatgaacacgcccatcacgatgcccagcgtcttggccgctttcttctccttggcgaacttcgccagtttcctggacagcgagaagttcttgcccatgtgccgatggcgtgccagtccgttgttatgcagagcggatagcggctcatcatccggctcctccggcgtggaggtcgtcgtgccaccgccgtgattgtgatgatggtggtgcgaatgggagtgcgagtggctcagagatcctccgccaccgccacctcctcctccgccacctcctcctccggagacctggttttgctgatcccgcgtagtgccaccacgatgaatgcgcaatgtgagctgcagttccccggaggccatgagcacctgcttggttccaatcttaagagatctcgtctggatgacggctgccctgtagatgcgacagtaggtgaagaccatcactagaagcggcaggtagaaggatatcgtcgacgagaagaccagatagcctaggtgctcagtgaaggtgcacttgtaggcgggcatctcgccatccctcgcagctcgccaccacacaatggccggaaagctaatggcgctggagcagatccatacagcggctatcagtccggccgctcgcttgaccgtcatcctcatgggatagctgaagggatccgtgatggcccagtagcggtcgagtgagatcacgcacagattcagtatggaggcggtgctgaagagcacgtccagggaccgccagatgtcgcaccagtccgtgccaaagaaccacgtgttctccagcacctcgtacagcgccgagaagggcatgaccaccaggcccaccaagcagtcggccacggccaggctggtgatgaagtagttggtggccgtgtgcaagtaccgctcccggatgacggccaggatgaccagtgagttgccgaaaaccgtggcgaaggagaacaggaagaggaaggcaagcaggcctacacggtcgttgggcagcgcttccaggaactcggagagatcgggttccggcgtggtggtgccgccacctcctgttgccaccatcgcaggactcaaggtggcgctggtggcggaggtggtggcgttcagcacgagctccgtgctcgtcggcagcccattgaagtagaagtagacatcctcggagatgttgtagctgccgaagaacgacggcgagggagaacgggtctgcgtctgattgagcccatccacccggaggagcgccaggaggggcgcgccggctccttccgctccttccacttccggcgacgagccattgtcgtccaccattgcaactcagtgctgtgtcgctgcagctgacgcgagtccctgtttcagttgctgttcctgtgcctgattctgttcctgttccaatttccccggcagttgctgctcctgctgctgcagttcgcggctgccagccaaattaatgaagcgcattttcatgtccttcagcaggactcgccggcgggctgccaagctgtcgagaaaagagacaggaaggctggtgaacacaatgcaatcaggacgaacttaagataaagtgtcggttttacacatttcatggagcggcagatttattgtagccactgtggatttgagtagtgaacatcctgaaccctttgataaactttaccataatgccgctctgaatattttataatttcatcgcaaagtaaacagcacatttcatgtcgatatcgacagccttaatgcaataatattatcattagtaagcaaattaatatgaaaaccaattaaagttgttttgagtttagggaaagcgaaattgtggatgcgcaaactctggcataaaatgatgtgtagccgttttgggagcatgttctaatttttatacttaatcaagtttggattcttttgacaaaagttttcgtcggtctaatgaagctattgtaattgaatcgctgggcggggcgggctataaatttcattcaattaaaatgttgactttcgcatccacaggtaaccgagttaagcaaatttcccgcgcacaaaagctaaacaaacacattaattagaggattttttgggctgccgccgcctggtcggaaatctgcaggtggaggagctcagcagctttcagctgctctcctgcgcccaaaaggtgcgcaattaattggcaagcagacacgccagctggaggagagatcctggcgcaggaggtggcgttgcagatgtggagtgtggggagtggaggtccttcggaggcgagtgccacacaaataaacaaattaaattacatttggagtgccaagcttgttggcaggaagtgaagcgtgcgaccaccaggacttgaactccagttgccgggcaggatgactaagtggatgctgcctttgtcagcggcttttgacagaggaagtcaacaactgtgcgc

SEQ ID NO: 4346 - DNA, 3831 bp, DROSOPHILA
caggagcagcaactgccggggaaattggaacaggaacagaatcaggcacaggaacagcaactgaaacagggactcgcgtcagctgcagcgacacagcactgagttgcaatggtggacgacaatggctcgtcgccggaagtggaaggagcggaaggagccggcgcgcccctcctggcgctcctccgggtggatgggctcaatcagacgcagacccgttctccctcgccgtcgttcttcggcagctacaacatctccgaggatgtctacttctacttcaatgggctgccgacgagcacggagctcgtgctgaacgccaccacctccgccaccagcgccaccttgagtcctgcgatggtggcaacaggaggtggcggcaccaccacgccggaacccgatctctccgagttcctggaagcgctgcccaacgaccgtgtaggcctgcttgccttcctcttcctgttctccttcgccacggttttcggcaactcactggtcatcctggccgtcatccgggagcggtacttgcacacggccaccaactacttcatcaccagcctggccgtggccgactgcttggtgggcctggtggtcatgcccttctcggcgctgtacgaggtgctggagaacacgtggttctttggcacggactggtgcgacatctggcggtccctggacgtgctcttcagcaccgcctccatactgaatctgtgcgtgatctcactcgaccgctactgggccatcacggatcccttcagctatcccatgaggatgacggtcaagcgagcggccggactgatagccgctgtatggatctgctccagcgccattagctttccggccattgtgtggtggcgagctgcgagggatggcgagatgcccgcctacaagtgcaccttcactgagcacctaggctatctggtcttctcgtcgacgatatccttctacctgccgcttctagtgatggtcttcacctactgtcgcatctacagggcagccgtcatccagacgagatctcttaagattggaaccaagcaggtgctcatggcctccggggaactgcagctcacattgcgcattcatcgtggtggcactacgcgggatcagcaaaaccaggtctccggaggaggaggtggcggaggaggaggtggcggtggcggaggatctctgagccactcgcactcccattcgcaccaccatcatcacaatcacggcggtggcacgacgacctccacgccggaggagccggatgatgagccgctatccgctctgcataacaacggactggcacgccatcggcacatgggcaagaacttctcgctgtccaggaaactggcgaagttcgccaaggagaagaaagcggccaagacgctgggcatcgtgatgggcgtgttcatcatctgttggctgcccttcttcgtggtcaacctgctgtctgggttctgcatcgagtgcatcgagcacgaggagatcgtctcggcaatcgtcacctggctcggctggatcaactcctgcatgaatcctgtgatttacgcctgctggagcagggactttcgcagggcctttgtgcgtctgctgtgcatgtgctgtccacgcaagattcgccgcaagtaccagcccacgatgcgttccaaatcgcagtgtcacgtggccgctgcaatggtggccgcctccacctccttcggctaccactcggtgaaccagatcgaccggacgctcatgtgacggcagctgagcagttgcagcacctgcagcgggggcagcaactgcggcggatcacggtccgcccatcaccagcaccactcctcgggcacggccacgccctcgtcctcgcagcgatcctgcactagatgccagagcttccaccgccaccaccaccgctccaggcgccgcagctcggggatgcagatgcgcggggactacaactccaccacggcggtgaacagcgctctagccaagaccatagtcaccatcagtgctcctccggtggcggctgcctcggccagttcgctgcacctgggcgtcggaggacgtccttcctcggtgtccaccctgacgatcgcttcggtgccgcccaccttgagtggcagtggcagtccaggaggctctgtgagcggggccactactccgctggcacccagtctcaaggccctgaccccgggaccctccaactcgtcgggtcaccacgtgtccttcatgcccatgacgggcatgaagcggttgcgcagctcgaacgcctcgctgggatcgcccaatggaatcatcagcactgtggccggagcggacaccacctcggcgccctcgctgatcgacgccagcgaggatcaggtgcagatgcggaaccaacaccgaatcctggagcagtgccagagtgtccagagccaaataactacgctgggcgacgtggaggacgacgacgaggaggtcagcgacagtgagagcgagagcgtcggactcgccctggtggtgaccacgccccaactggagagccagcccgtggaggcatcgagttcctccagctcctcggtcaagtaaactcagcaacagaaccacggaaacaagcccagacattagctttaagattcaaccatatacatatgtgtgtttatcagaagcggtgatcgatggaaaggcaatactttggacagttctaagccaatcagattttgaattcactttgttgtctatttatttttttactagctcttcaggtttcaataaggatatgaactgaattttattatcattttgccagcaaagatttgtgtatgtatgtatgttatttttaccttcaagcgaatcaatatagctcaatccgaattgcaattggcttagaggtgtccattgagtttcgccagcccattggtcgacccattcgaagtgtgtacatagcaatctagactcgcctagccactcattagcttatcgatcggtgatagaacactatgcaacaggaaatcctccctatatcgacacccaaaaacacggggttgcagttgcagttgcaggcggtagttgcatagtgggattagtgtaactgttagctctcatatcttagatcttccattatgtagttgttcgttccgtttcgttccgttccgttctgtaaatgtctcaaacgtctagcaattgaattcaaaaagctacgtcttcaacctgtccaagtacctgactctctgaaatccaagaagatactatgcatgtatatagcttaactttgactcctctgtcgctcaaaactagctttctgttactcgaaactcgtttgttcgtttgttatcaactgaaattctacgggtgcaatatgaatttataccaacttaaggactcgaacaatcaggcaaacaggcttcaagaccagttcccagtcgtaggagatccaagtacaaagtcataatcactgcaattgttggctagctaattagcccatcctccattacgttctttgaactacatatataccaatatagcaatatgaatagggtgaattttaattgtacttgtcagacagccgaaagttaggaaatgcggcagcttaatgaattaatccctcaaaaggctcgcccatccacttctgtaccactctacatgtatgcttatgatggctaagctcctccgattccgattttgcaataattaatgtgtgcaattaggattgattgccccgcccccacaaggtcggcgaataaatcgagtagaagaatggggctctaatgcgggaaaaactaataacaatggcgagacgtcagtttaatggatgagtaggaacaagccatggcaaaatgttgctcattgttttcaaaaaacaaacaaagcgaaatggatggtccaagg

SEQ ID NO: 4347 - protein, 537 aa, DROSOPHILA
MVDDNGSSPEVEGAEGAGAPLLALLRVDGLNQTQTRSPSPSFFGSYNISEDVYFYFNGLPTSTELVLNATTSATSATLSPAMVATGGGGTTTPEPDLSEFLEALPNDRVGLLAFLFLFSFATVFGNSLVILAVIRERYLHTATNYFITSLAVADCLVGLVVMPFSALYEVLENTWFFGTDWCDIWRSLDVLFSTASILNLCVISLDRYWAITDPFSYPMRMTVKRAAGLIAAVWICSSAISFPAIVWWRAARDGEMPAYKCTFTEHLGYLVFSSTISFYLPLLVMVFTYCRIYRAAVIQTRSLKIGTKQVLMASGELQLTLRIHRGGTTRDQQNQVSGGGGGGGGGGGGGGSLSHSHSHSHHHHHNHGGGTTTSTPEEPDDEPLSALHNNGLARHRHMGKNFSLSRKLAKFAKEKKAAKTLGIVMGVFIICWLPFFVVNLLSGFCIECIEHEEIVSAIVTWLGWINSCMNPVIYACWSRDFRRAFVRLLCMCCPRKIRRKYQPTMRSKSQCHVAAAMVAASTSFGYHSVNQIDRTLM

SEQ ID NO: 4348 - DNA, 3398 bp, DROSOPHILA
acacacaccaaacagttttctactttgataaacacaaaagaaaaacctactaataatgataataataagagtaacgatacatttatagtttgtacgaagcagtcctaaacacaacaatacgaacagccacgcccacacaactttaagatataggagagatctagaacagagcgtacctgagcagacctcagagactcggaatcggacgaaatcaaaggatggctaaaagccagcaccaggaccacaccgaacagattactccgatcggatccctctgaaggacccatccatctatgtgaacgttgtaaaccctctgtgtgtcctttcgttccgtcacttctcctcatcaatcagctatcagcagtaggaaaagcgccaggaaaaactaatggaaaatgtggtatcaaatgttattgagaacggaggacagttaagaaaccgcgagagtctcgctcaaattttttgtgtaaaagaactttatattttcattaaaacaaaaaccatgtattaactattgattccgaaccgaaagcggacctttgtaagttgtaaaacgtttgttatctaaaacaccttttgttcaccttctttatatgtgtacgagaagatgtgtcgccaagccagaagcagcgaaacttaataatgtaaagtaaaaaaatgttaaaagaaaaccagaaaaaaaaatggtaaaaggaaaccaaactagcaaacaaaacctgtaactatctatgtacggaaacgaaaaagtaatacctaaaccttaagtaagagaagcaaaacaaaagaaatccacaataatgtccgatcttaaagaaacgagaatgaaaactaagaactattaatttataagaaacgagttgatgaagaaaatcttaagagagaaaagcaaaattacgctcgagtttgtagtaaatgttgataaaaaaaaaacacacacacactccgaagcttttaatcagtcaatggaaccatcgttcagctgcacagtgtaccagtcgtatcatctccagaaccgacagctgttatccttggaggcggtcaggatggcgtctcctgcgtagctgtaggcgcagctgaacacctcaccctcatgaccagccagcacttgggagcactgtccggattccgtgagccacaggcgagccgtgttgtccgctgaagctgtgagcagcatgcagccactgggactgaagcacaccttggacacctcatccgagtgtcctgccattagggagagcatctccaactccgaggatccttctagcctccagaccctggccgtgcagtcgctgctgcaggtggccaaaagttggccggctgcatcgaagctgacatcgagcacctcatcactgtgcctggcagccagataaagttcctggtccagctttcgagtgtcccagatccgcgcggtgttgtccagggagccagtagcaatcagagatccgctaaaattccaaacgcagttggataactcagcgctatggcctcgcaactgatgccctagactgcaaggggaacttcgaatagtgatctttcagaactcagatctcaacccacctcttgctcctcacatcccaaatagctgctgaatgatcgaatgagccggtgagcagcatctgaccatcgcgattaaagcgggcggcaatcacttcggctccgtgatgggtcagttgctgaagctcatgagacgtttccacgtcgtagatcctggctgatccgtccagggaagcagtggcaatggatttcccatccaccggatgaaactcagcggccaccagttctgcggtgtgtccatagaaggtgcacagagattggccactggtggcggaccaaacttttgcggtgccatcaaaggatccggtcactatcttgtcgctgaaaataattgaaaaagttgtcaggttatttccagatccaccgctttgtagataaactaaccaatggggaaaattaaatccaaccgaaaagacgacattgtcgtggccactgaggatgtgctccacctgagccgtctgggtgttgatcacatggcaggtgcgatcatagctgccggtgaggcagcgttcgccactccgatcgaaggatacgttggtcagaggcaggatgtgagagttgtggcacttgtgcagatagaacttcttcttcacaggctctcggagtttcttctgcagcttttccagagcctgtttcagagcactaaaggcgttctgtgacctggcgacacttccgctgacagggcgaggtggaggtgacttctccaaatccgcaggtgattgctcctcctccgcttcggctaaggtttgcaataggatcctgtctgccagtggctcaatgttggttctgtacaaaagaagtacttgcataaactgtatccttgcaggatttacttactttgaatctaggtcaagtagatcgaagtgacgcagccgttcattgcccttcgtggttttatagttaactgccagtcctggaaaaagccaagatagtcaatagctacttagcacttggtttaatgatccttcccacctggcggatagtagcgcaggaagatcttggtggcactcattctgaggttgttgtgacttgcaactcaagaattccaacacggcgcattccgctgcatgtcagtttgctgacctgctttaattgagccattgttgattggactggctgccatgccaaaaggtattgtttgatcgattcaccttggcttccttgtgctaggtctgtgtcgaggactcatcgggcggttcaaggatgtagggtaatgtattcggattctatgcaagaatgtgactctatactccctcttgtttgcgttggttcccatttaaaacgaagcttttctaacaaaagcttatcctagccggttttcctactcagccattcatagaaccccattttgtatgtaaagtttttcttacttacttgttgtaaattatattttaaaaaagaaaatctgtttgcttgatagcttgatctttaaatgtataagattctgcctaatcctaataagcaccctacaaaatgcattagtcacgcattttaatactcagtaattgcattattgatttctgttcgaaattctcgtctttcttggtcaagtcgattttaatgacgaaaagcacatgactaattaactttgccagacagcaactactgtgtgaaccctaactaacccttgacctccgattgtccttcggggaacccctttggcatttgacaggagcgaccggctaaatggtctctggccattaaacctaattagcttgttcaagatgggaaacggaagccaaggaccccagaggccaattggctgccgacacctggtcgcatttttagcagatttaccatatgtcccacgtgggcagacacgcacccatccgcaaatccccggc

SEQ ID NO: 4349 - DNA, 1346 bp, DROSOPHILA
attcaaagtaagtaaatcctgcaaggatacagtttatgcaagtacttcttttgtacagaaccaacattgagccactggcagacaggatcctattgcaaaccttagccgaagcggaggaggagcaatcacctgcggatttggagaagtcacctccacctcgccctgtcagcggaagtgtcgccaggtcacagaacgcctttagtgctctgaaacaggctctggaaaagctgcagaagaaactccgagagcctgtgaagaagaagttctatctgcacaagtgccacaactctcacatcctgcctctgaccaacgtatccttcgatcggagtggcgaacgctgcctcaccggcagctatgatcgcacctgccatgtgatcaacacccagacggctcaggtggagcacatcctcagtggccacgacaatgtcgtcttttcggttggatttaattttccccattggttagtttatctacaaagcggtggatctggaaataacctgacaactttttcaattattttcagcgacaagatagtgaccggatcctttgatggcaccgcaaaagtttggtccgccaccagtggccaatctctgtgcaccttctatggacacaccgcagaactggtggccgctgagtttcatccggtggatgggaaatccattgccactgcttccctggacggatcagccaggatctacgacgtggaaacgtctcatgagcttcagcaactgacccatcacggagccgaagtgattgccgcccgctttaatcgcgatggtcagatgctgctcaccggctcattcgatcattcagcagctatttgggatgtgaggagcaagagtctagggcatcagttgcgaggccatagcgctgagttatccaactgcgtttggaattttagcggatctctgattgctactggctccctggacaacaccgcgcggatctgggacactcgaaagctggaccaggaactttatctggctgccaggcacagtgatgaggtgctcgatgtcagcttcgatgcagccggccaacttttggccacctgcagcagcgactgcacggccagggtctggaggctagaaggatcctcggagttggagatgctctccctaatggcaggacactcggatgaggtgtccaaggtgtgcttcagtcccagtggctgcatgctgctcacagcttcagcggacaacacggctcgcctgtggctcacggaatccggacagtgctcccaagtgctggctggtcatgagggtgaggtgttcagctgcgcctacagctacgcaggagacgccatcctgaccgcctccaaggataacagctgtcggttctggagatga

SEQ ID NO: 4350 - protein, 436 aa, DROSOPHILA
MQVLLLYRTNIEPLADRILLQTLAEAEEEQSPADLEKSPPPRPVSGSVARSQNAFSALKQALEKLQKKLREPVKKKFYLHKCHNSHILPLTNVSFDRSGERCLTGSYDRTCHVINTQTAQVEHILSGHDNVVFSVGFNFPHWLVYLQSGGSGNNLTTFSIIFSDKIVTGSFDGTAKVWSATSGQSLCTFYGHTAELVAAEFHPVDGKSIATASLDGSARIYDVETSHELQQLTHHGAEVIAARFNRDGQMLLTGSFDHSAAIWDVRSKSLGHQLRGHSAELSNCVWNFSGSLIATGSLDNTARIWDTRKLDQELYLAARHSDEVLDVSFDAAGQLLATCSSDCTARVWRLEGSSELEMLSLMAGHSDEVSKVCFSPSGCMLLTASADNTARLWLTESGQCSQVLAGHEGEVFSCAYSYAGDAILTASKDNSCRFWR

SEQ ID NO: 4351 - DNA, 2762 bp, DROSOPHILA
aacgattcaatttaaggctacatacaacatgagccgtacgccgtcggcaaaagatgaaatagtcgcaatagtcggcataggtacgagtatatcctagcccccccccaaatggtcccctcgcatcccaccccattctcggtgggtttttggcgcatgttgaggagtcgcagtccgacttcaacttggactcggagcggcggttgaattcaatgaaatttatgaagacatgactggcaattgtagttgcaacgttgcaacgtcggcctaaaaccagctccgctaaagacccagagttcgacgatccttcaacgcctacttggccattgcgattacaactcaattgtcaatcgcaattgattttccagccaatattttacgattaattaagcgcaaaatttgagaacaaagtcggggtgtgtcggcagtccagacaaaagaaattgtaggcgaatgcctacaagtacacgttctgcaggttgggataagatgcgaactgattccgtatacctgcaccgctacaggtcactcggtgatttcttttgccttttggggtgtggacagaatgaagtcagaggtcagaggatggctatggaaagccaccattgatagatgtcccgatatcgtcgaacatctcccgccaactgtgggaaaactgatgaaacgcagtgggacgactgtcgttaaatgcggacataaaagaaattagctggatagtttcggtttcggcactgatatgattccaaattcgggtggtccgagtcgggttttgaaaagaactgtgttcgaaatcatgagatgccagcaagtgcattgcaatcctataacactgatacaacctttgaagtcacctatcaatttaacctattaatataaataatctacaaatcgtatccaacaaactgatcacttttgtgtgtttgtaaagcatgaaagcacacattttaatttggcataatcatatttctttttgtttagtttttagaataaaccttatcaggttttaggcggtggtataataccaatttgcagtggtatcctgcggaactggagctccagcaaggcatttgttgagttctccatagtagagcgaggtgccctccacgaaatccttttcggaatagttcaagcagctttccaactggctgtccaaagtctgcaaatggatcttgatctggacggcggcttcggtggcattcgccgagacttggtacatgatttttgattgctcagctccctacgaaaattaagcagaattaaaattatatttaactactggaaactatagttaggtcgtatcgaagctgaaagtttccttgactttctagaacttacgacgttggcgaagcactcgaaggcgagcacgaagtccacaatggaggagcagtcgaagaaggtgttgcagccacgatccccggaagcctggatgccgaagagagtgctgttccaggcggcgaggaccagttcgctggcggtgtcgtagtccttaacgcacttattgtagtccagttcgtactgggccgacagcccgttgatgatgggtatgtagtagtcgaagcagcgtaccgaagtgccaggatcccgagcagccagctcttccgtttgctgctgaaggccaaggatcttcttgttggtgggcagcttcagcttggaaggctttaccacgaggctaaggctgaggccagaaaccaggccaaaagcgagaaccacggcgagcagggagaatttggaaaacatggctaaaagtctcagattccacttcttactgaatacctcggttgcagagctcagtgattttatacccatttctcgagcttcttatctcttttgaaagcaattgcctcttgttggaggaaatgtcgcatgtcgctaatttgttgtttccggtaattggtaaatatttcttaatttaatctcaaacaaagtaaattacatttatcagaaatcgtttccaatcggtagcagtaacaagggttcaatttttacttcaaattgaaaaaatgttgttcatggacttttaaaaatatctttgcttttggagaaaagttcaatttgtatcataaactgaaaccagcgtagacaatgtgccgaaatataaattcaaatttatcgtttttgaattgcaagccaattcagtacctaaagtaactaaagaagagtttatttgttatcagatacccgttacttagctggatgggcgtggcaacgccatggaacaaacttgttctggaatctgcgttatgatttctatgatttcttatagtagagatacgcttataaggacagactgacagacagatgggcggacatggtcaaatagactcggttaggtgttacatactcttcatggaatcaagtatgccgccttactctacgactaaggggtataaaaactgatgtatacggattaaagcagtttttgttataagacgtgaaactgtgaattttttagcatatttttttaaattttttttttttaaattaaataattcaccgactgatgttatgattaaaattaatatagttttatttttcgtatggcagctattaacaatagctgatacaataatcttaggtactgtcatgctttcataaataagttggtaccctctatattttattcaatcctgtcatctattaaacaactaagctccacagtgaatagcttgcattcctatattatttatttatataaaacagagaattcaattgcctgatatatttattgattgactttcttttaacgaagtaaaggtgctgcggtt

SEQ ID NO: 4352 - DNA, 664 bp, DROSOPHILA
taagaagtggaatctgagacttttagccatgttttccaaattctccctgctcgccgtggttctcgcttttggcctggtttctggcctcagccttagcctcgtggtaaagccttccaagctgaagctgcccaccaacaagaagatccttggccttcagcagcaaacggaagagctggctgctcgggatcctggcacttcggtacgctgcttcgactactacatacccatcatcaacgggctgtcggcccagtacgaactggactacaataagtgcgttaaggactacgacaccgccagcgaactggtcctcgccgcctggaacagcactctcttcggcatccaggcttccggggatcgtggctgcaacaccttcttcgactgctcctccattgtggacttcgtgctcgccttcgagtgcttcgccaacgtcggagctgagcaatcaaaaatcatgtaccaagtctcggcgaatgccaccgaagccgccgtccagatcaagatccatttgcagactttggacagccagttggaaagctgcttgaactattccgaaaaggatttcgtggagggcacctcgctctactatggagaactcaacaaatgccttgctggagctccagttccgcaggataccactgcaaattggtattataccaccgcctaa

SEQ ID NO: 4353 - protein, 211 aa, DROSOPHILA
MFSKFSLLAVVLAFGLVSGLSLSLVVKPSKLKLPTNKKILGLQQQTEELAARDPGTSVRCFDYYIPIINGLSAQYELDYNKCVKDYDTASELVLAAWNSTLFGIQASGDRGCNTFFDCSSIVDFVLAFECFANVGAEQSKIMYQVSANATEAAVQIKIHLQTLDSQLESCLNYSEKDFVEGTSLYYGELNKCLAGAPVPQDTTANWYYTTA

SEQ ID NO: 4354 - DNA, 5704 bp, DROSOPHILA
tttgcgatcggaatgttttgtaaacaggaaacagatgtctaagctgtattccagacaatggagcgaccaattttttcacagttttagttccgatgttcgcactgcactttgtccatttaagtaattaaattaaatagtattatttacgaacagtactttcgaccctcctttaaattaattacgaattttttttcattacatcttatatgcatttatactgtttatactgtattgtttcaccaatagtatagcagtcttcctgatagcttttgtcgacataattatgaacacttgccaaatcgaaactttttgttgccaactgcaaaattttgtttgtcaaatttcaggtggggtcagaaattacttttgtttaatataactaagtctaaaaatgatcttatggtgatgtggaacataaacatcaattaataaatatcaatagaccagcaaactattttttccccttagttaataagatctgatttgatataaaaaaggcatttactttttaaaaggccgttttacaaattaaaattttcttacgaattcgattaccggagcattcccgaataatattgtagagagcaaaacgggttgatggtttctaaggtttcaacggcattactgttttgactattccctacatttcaaaatatatcaaaaagaaaatcctaaaatgtacagtagaaattcagctttttatagcttacttaaaagtttcgcaatacttattcttgaaaacgcaactcaatgtaagtttatgtataaagtatacttctgtatacattaatacaattataattgtaattaattaaatcactataattataattaccatgcatatcgcctacaaaccaaatgcggtctgcggcgaaggtaacggaaggccccaaatgcatcgttcacattcaaataaacaaagcattccccatcggtatcgttatcggttttcgatgtcgatagtcgttcgtagcaagacgcggtctcactggtgcacattgttttccgtcgcgtgtgaaaattgctgagtgtataaaaactgtgcatacttagagaaaacttctgcatttggttgaaaggtaagtgcgactgctgcggacgccatggagaccaaaaagctttgcaaaggcgagcctatggcgatacgaagaagtaatttgaccactgattttatggggctccgagctcagacgagatacacatacgcacacatacacacgcttacgtttcaaataggcaccagcgagacggaaaacaaaatgtcgaccgaattgtattttcctctattactttttcccaccgatttgtgaaggtttatgcctttcgaaggctcggaaaagtgtggtaaatttgtgctttcccaattagaagtttttgattgagtgacatctgggtttaagtgcacttttttctgagggcaatctccaatattgatttttacaatggctgccgaggagtctcattcattttccaggaaaatgtgcacagaaaagcttataccaaagtgcataggtgattacaattccaaatgaatgattttccaaatagttagttgataaatttacgaatagaattttctcgcaaatcaattttgatcgtctttcgtgtaggttatccactgatgaatacgtatgtgtgtctttttattctattcgagttggtattttcttttatttgataaggggtgggtgggggtcgagcgcatcttgtttagttttactttctcttttatttatgctgcaaacttcagcgggtggtgctccatccatgctagcatgtatgtatgtatttagagtgagtgtgtgtgagttagtgagtgagactgcaaggcaatcacgtttcttattctcagcatatttattttctgatcaatttttggcctcttttcagcactttaatattctttcctcccctctccagcatttgtttgaattttaatatttaattgttaacgtacatatgtacatagatacatacgtttagatacgtttcaatgacgcgagggtttcagcaagaaagcagatacatatatatacatatttgtgtagccattattttttttcgcttctttgtgaaattcgctatgctgctgtgacgtcataggtcaatttttaaagagaaaaaataaacagctgattgccaaataggcagcactgtcgtgcgagctagagttgcccttcctaaaaggcctactaaatgtcataaaatagccctcattgcactgaacaaaactcaacccggagaactcagtgacgtactttttctgaattttagggattattacatcagtttttgtatgcttccttcattcctgatgccatagtattactagctttgtcaacttatacagcaactcaaacaacccatgtgtatggaaagaacaaaatatggtaagtaccagttcatttctgaaagaactcttaaaagcaaatggaaaatcgctgaggtactgccaaatttcttgttatccactaaccactctgccacgcataaacgtttgagctcattttcattatcaataaccttgaaggttgattgaactgcgaaaggaaatattttgaccccctagacgggatataatttgatttccgcccccggagccccctggcaacaccctccccgccccgggagccaaccctggagccgcccctacacttgagccgtacaaatcctgtctgtcgtttgatgactttgtgtgcaaggagaacgaggcagtctttgtatctgactgcgtgcttcatttcgtcgagctccgtttcgtttagcctgctctctgctcaccgcttcgcccaccaacaaaaatacaaataaataaatgaaaagaagagccaaaacacaactcggaactcgctctgcgctttgtttgcctggctcttctttcccttccccctccctcttccgttttcatcattcgccgtgtgtatgtgcgatggacgagcgagtgtgctgtgtgtgtgggttcgctggcgcccgtgtgtgtgtgcgcctttgtacattgaactcaaaaattcgaactcgagaagaaaagaaaagagtgagaacgagtggagaccaagtcggataaccgacccatcccctccctctggtgccgtagtccacacacctcattaaccacccgaaaaggggtcccgaagtcgtctcgtattcgtcgtcttcatcccaacttagaaccctttgatcaggttgcttcgtctgctgacccagatgacgtccatcccagatccaagacttacctaaaatgttaagtgagtgggacgtaaatgactccgatcaaaaaataaataatccgtgtaattcctaagaatgaaatattacgagaatggcaaaacagtttattcgaaatatcaactgactgattgggtcgtctcaaataggattagtgctaacaaatggcatttaatgcaattcctctgaattagggtgtactataaactgttgaacatctgaaatattgagcttgggttagctctttttcccctgttccatacaaatcgatttttataataaatcaaaatattgcaatgaccattatgcattgttgcatttttaacaattgcgaattctacagttattggatagcccagatttcagtctcagcgctatggttatatggaaaatgaaaactattttgtataatatttgagatttagcgaacggcaaccctaagggaacgctgcgtagatttggatgcctttttagtttttggttgcccggcttgactctgttttttgttcttttttctccctttatttcctgatcattacgatcctgctctgatcttgtacagttctttgctgacaagatgaagttccgcgcactgatgcaggatccgctgtacatgaaagagttccaggccattgtggccactttaaccaagctggcgaaagattgtgtgatgattctgggctctcggcagatgcattttatcgtgaacgaggatcagagctccgctgcatcgcccttggtttgggcaggaattacagctgaggagtattttccggagtatcgcatggaggctgctcacccggatcaggagtacatagttctaggcgtgtcttcggcgaatctcggaagagctttatctgtgcttcgtggtggaggcgtaaacagctgcaaactgaagcttcaaagaattcagtttccgtgcatttcggtaatagcctcggtgcttacgtcgtcttcaacagaagcccgtgaagtggtgcacgatgttccagtgaccataatcccgggcagcgattggtctgcctacgttgtacccagagttccaaactcacagttggctttgggcctaccaagcctaagattgctcaaaagtctcattgacaagctgaagaatatatcacccagcctggagtttcaggtcaacgtggacggagagctcaatgtaatagccacctctgaaatgtccactgtgactagtcgattccagaaattactaattcgaactgtgtcaggatcccagcaggaagcgtcctgctctgtggattcaaggaaagcctcggccttctttggagcacttcaactccctaacgaagaactgactattggcattgaccgtgagcattccatccatctgcagatcgatgtacgacaggatgtggttctgcactctattctgccagctgtttgtatgtagcctaagagctggtatgtttatcatagctgtaataaatgcgacttgatgtattcaggtgtaataaacgttctcacttaattcttttccagaaaaactcgtcgatgttaatttaaattatctttttgcgaccctatccgcatcatcatgcgttatcgcttgaacaattatctcttttacaactaatgtagaatttttcttgttagtaaatctagcaggattgaacacgttctacgatattctgcgggtcatatttatttatttacatatgtatgtatataaaaacacattaccagcgctgtttgtttcttcttgcatatttattttaaaatttagttcgctaggacccttttggctattgatgcattacttgaatgttgagtaaaaatcttcaatacatttttgaatgtacctaataattcttggagagaagcaacctttcacgtcgtttgcaagtagtaatgtttgcctaaacgatatcgggccttatcagtgaacgaaagttggggcggctctttttatcgtcgctcttcgctgcctgtcccacattcgtcagcagccgtggccccatttcgcgttctctctcagaggctctattttactcgctcagctggattgcccatgcacttgcatgagtgtgcatgtgtggccgagagagcgtgtatccatgcatatttactatttagcgttactggtttttaattttatttcgaaaacatgcacacaactgcagttcgcttgcatttactgatgattccacttcatatggtacatttgtacatacatatgtaaacaaacatacatatgtacgtacctataaaatacacttgtaagtacttagatttttggtttttcataaaactatttcttgttaataaggctatgctagcagattgaacctatcagaaagtttaaaaaggatgtctacatcgatatggtgtacaagtagtcgactgaggaggtgattaccctttgtgcaccaccattttccattcaaaaatcgaccctaatcgaataattgagacgtttttgttattttgagaagggatatgatattttagtgattga

SEQ ID NO: 4355 - DNA, 981 bp, DROSOPHILA
gttttccgtcgcgtgtgaaaattgctgagtgtataaaaactgtgcatacttagagaaaacttctgcatttggttgaaagatgaagttccgcgcactgatgcaggatccgctgtacatgaaagagttccaggccattgtggccactttaaccaagctggcgaaagattgtgtgatgattctgggctctcggcagatgcattttatcgtgaacgaggatcagagctccgctgcatcgcccttggtttgggcaggaattacagctgaggagtattttccggagtatcgcatggaggctgctcacccggatcaggagtacatagttctaggcgtgtcttcggcgaatctcggaagagctttatctgtgcttcgtggtggaggcgtaaacagctgcaaactgaagcttcaaagaattcagtttccgtgcatttcggtaatagcctcggtgcttacgtcgtcttcaacagaagcccgtgaagtggtgcacgatgttccagtgaccataatcccgggcagcgattggtctgcctacgttgtacccagagttccaaactcacagttggctttgggcctaccaagcctaagattgctcaaaagtctcattgacaagctgaagaatatatcacccagcctggagtttcaggtcaacgtggacggagagctcaatgtaatagccacctctgaaatgtccactgtgactagtcgattccagaaattactaattcgaactgtgtcaggatcccagcaggaagcgtcctgctctgtggattcaaggaaagcctcggccttctttggagcacttcaactccctaacgaagaactgactattggcattgaccgtgagcattccatccatctgcagatcgatgtacgacaggatgtggttctgcactctattctgccagctgtttgtatgtagcctaagagctggtatgtttatcatagctgtaataaatgcgacttgatgtattcaggtgtaataaa

SEQ ID NO: 4356 - protein, 278 aa, DROSOPHILA
MKFRALMQDPLYMKEFQAIVATLTKLAKDCVMILGSRQMHFIVNEDQSSAASPLVWAGITAEEYFPEYRMEAAHPDQEYIVLGVSSANLGRALSVLRGGGVNSCKLKLQRIQFPCISVIASVLTSSSTEAREVVHDVPVTIIPGSDWSAYVVPRVPNSQLALGLPSLRLLKSLIDKLKNISPSLEFQVNVDGELNVIATSEMSTVTSRFQKLLIRTVSGSQQEASCSVDSRKASAFFGALQLPNEELTIGIDREHSIHLQIDVRQDVVLHSILPAVCM

SEQ ID NO: 4357 - DNA, 4389 bp, DROSOPHILA
cgcacagtgggccaagcgtccaagtacagtggccaaaatcgttggacatacgcacctcggcgaatttgccgtctgtgaagaatttgagcagcgagctcttgcccacggtgctgtcgccgattaaaatcagtcgaaattgatactcgaaaatgggttccaccattccgaagccgaattcgagggatttgtctcttggaattgaatccgcagcaaaaaatctgccttccctttgtaaagtttgatacgcaaatcgttgatttgcttatgctgctcgtttttcttcttatttcctgcagttgtattgcaaatcgaaactttctgttcttcacacgattactggctttgcaatgagatatttccggctgtcgctggtggttgttaaattataaatattcgagaattcaaattccttcgaattttgttttgttttgtgtttttttctcatatgcgtgcgcgtgtgtgtgataatgacaacgttgccagaccagcaaaagtaatcgatagtagccacaatgaaattatttcattaccattattaaacagttatatcttctaaattatttaataaaaatagtgtcctcacatcaatttggcagttttcagattttttaacaagcttagatgtatttttcggcggtacacaaaaactagctagacttggcttgaaaacggtaaccggctaatggcaacaccgccagtctggcaccgccgcccaatagagatggtcaaagaacgcgatttcgcgtgacacgatgaatgcatacaaatgtagttagtttaaattgttctgagaaaatatgacaaaaaaaataaaataatctttcatattaagctaataaatttacaataattacacaaaaagatttggccttgtacagtgctttgacacataaattaagacgtgcgtgttcattttcgttctaggctgtctcgtgcagagaaaaacccatcgctagtacgcactgtattttctttttacgtttgttttccgtgaacaccgtccgcttcgtatttcacagcacacaaatgtacaaacaagccgccggccaatcaaaagcaacagcggaaaataagatccctttgtcagcaaccggcaaccggagtcggtgaatcagccggaggctccgggatacggaatccaccacgttctcctccatcttctttgcctactcctcccccgatttggttacggaaccaatatcattaccgttaattatagccacagcggggcgagagcatatacaaaatctccatatagatgttcaagttcgtgctgaacgacgccgccagctacgtgcgatccaatgtgcgggagttcagtttgaatgcactgcgtctgctgccgcaactgcctcaattgagtccatacgatgtaagatttggggttcctggcaagtgtcattagcaagctgggcagggttcgtaaaatgtaatcagtttgtaagatcttcgatcgaaagtacttctttacttattaattattttggatttttcctattgaagctacttttagaaaccacaaatctatgcattacatccctaagccgtttaaaaatttaactataaagcctgcataattttctgaagatccaataactactttcaagggctttcaagaaagtcccgagtgttttcctataaacaaagtgaacgacgtcgacccgactgtattcgattttccatattcatatttcaactacagcaaccatttataatgcctttactgagcagttaatttcatttgatcgtttgcactggacaagagtccataccaagcggcttaagaacaaaatttttaggaaccgaataagaattaactgattaataactattaccatgggaacctttgtaattcccacataaagagtaagaatctgtattaatgtaaactattttcacaggttaaccttgttctgagggagaacgagttcgtttacaactttcccgtggatggagtcatccgcagctatgaaacaaatcagctgggatcaaactggccctgcgaggattcccgcacggaggccagcttcctgcaccgcaacggcttcatttgtggcattttcgacgggcatgcgggagcagcatgtggccaagtggtgtccaagcgactgcttcgctatgtttcggcggccacgctgccgcgccaggtgctccgggagcagatgaagcagggtgccgacagccagtcgttcctcaagtgccacaatgacaacgtggactttgttagcatgatcaagcccatgtacgaggctagtttcctcaagtatgtcaatcaattgttagagacaccgcaacgggatgtatccagtgaactggtgaacgccttcctccagctggatgaagagatctcgcaggaggctctgaccagcaacgatgtacgcaccatgaacgtggccctttctggtgggtgatgtatccatttatttatgtatataagttgccatcccgtttcatactttcctcttcataggggcttcatttctaaactataaatgtgtttattttccaggagccgttgcctgtttggttcacattgagggactgcagatgcacgtggccagcacgggtgattgtggcgcagtgttgggcgttcttgatccccagacgcagcagtggcactcaaagaagcttaacatcgaacacaatgctgacaatatgtccgaggtgcgtcgcattctggccgagcatcccaaggaggagcatgagacggtgatccgaaacggcaggctgcttagccagctggcgccgttgcgtgcctttggggactttcgctacaagtggtcccaggaaataatgcagcagaaggtgctgccgatgttcggcgtgcaggcaatggcgccgaattactatacgccaccgtacctaaccgcccgccccgatgtccagcagcacgaattggggcccaacgacaagtttctagtcatcgccagcgacggcctatgggatttccttccgcccagcgaggtggtcagcttggtgggggagcacatcaactccaaaaagatcctcgaaccgatgcgcctgccggaaggcgatacaacgctgcaggaaatctctcagcagctggccgaaagaaagtcagttatcctttaaatgtatgcttgttatttatttatttattaattacgcttttattgcattgcagggctggcctcactcgcaaacccgtagaccaaaacgcggccacgcatctcatccggcatgctttgggcggcaccgactatgggattgagcactcgaagatctcgtactatttgacgctgcccagggacgcggtgcgtctgtatcgcgacgacatcacaatcactgtcatctactttaactcggagcacattgccaagctgcacagcgatgtggatcaaacggaggtcactgcgccggtagcatgatctctgcgagagtgcatatgtgtatatttaacgagcctaaccttcagccgaactagcctaagtgttgcgtttaagtttgtttcatccgccatcggacctcggacgactgctgcgccaaataaatcgcacgcggaaagcgaaaaatcacatatgcaaattgtcttgttattcataaagagcgatgatcggtcgtctcatttgttaataaaataaaaatgacatgaaaatcccagcaaatatgtatatatcaagggttataagcaatcaagaaggtttcttcatatatttatttctcaaatagttcgtgattttgtaaagtagatactattttttcttttaaagcaagtacttatattaatttttgctgtttaaaatttacaagcaattcgtaatgtatataatctaattcaatttaaaacttcttattctataatttacgccaattttcttgttttcaatttagttcggtctataaaacgggggggaaaccaggataatcctaagacttaggtatagatcatctgttgcaaacaagctattcaactttaagaatttcgaattgtgtagttttcgagaatcgatttattttcttttatttccaattacaattgattgtaacgctggctaatatatatgtatatatatttttactcgaatggatggtgtagaggggtgaaggatacagggatccggggtttcgtgggtggaggataaagctaattgaagaacgcggaatccacgaacttgcaaactggtaaacggtacgcatcctaatcctatacatggaaaaaactaggcaactactcagggatcgtattggttgttttttggggaacataactaaaaacaggtgtccctaatccttgccatcctgttcggccgcttcctgccggctgacacagttgaggaactccatctgaatgtgcgtaatctgtgtcttgctgaagcactgcatcttcttcttgagaaagtcaaagaacagatcgagctcatcacgctt

SEQ ID NO: 4358 - DNA, 1686 bp, DROSOPHILA
tccgcttcgtatttcacagcacacaaatgtacaaacaagccgccggccaatcaaaagcaacagcggaaaataagatccctttgtcagcaaccggcaaccggagtcggtgaatcagccggaggctccgggatacggaatccaccacgttctcctccatcttctttgcctactcctcccccgatttggttacggaaccaatatcattaccgttaattatagccacagcggggcgagagcatatacaaaatctccatatagatgttcaagttcgtgctgaacgacgccgccagctacgtgcgatccaatgtgcgggagttcagtttgaatgcactgcgtctgctgccgcaactgcctcaattgagtccatacgatgttaaccttgttctgagggagaacgagttcgtttacaactttcccgtggatggagtcatccgcagctatgaaacaaatcagctgggatcaaactggccctgcgaggattcccgcacggaggccagcttcctgcaccgcaacggcttcatttgtggcattttcgacgggcatgcgggagcagcatgtggccaagtggtgtccaagcgactgcttcgctatgtttcggcggccacgctgccgcgccaggtgctccgggagcagatgaagcagggtgccgacagccagtcgttcctcaagtgccacaatgacaacgtggactttgttagcatgatcaagcccatgtacgaggctagtttcctcaagtatgtcaatcaattgttagagacaccgcaacgggatgtatccagtgaactggtgaacgccttcctccagctggatgaagagatctcgcaggaggctctgaccagcaacgatgtacgcaccatgaacgtggccctttctggagccgttgcctgtttggttcacattgagggactgcagatgcacgtggccagcacgggtgattgtggcgcagtgttgggcgttcttgatccccagacgcagcagtggcactcaaagaagcttaacatcgaacacaatgctgacaatatgtccgaggtgcgtcgcattctggccgagcatcccaaggaggagcatgagacggtgatccgaaacggcaggctgcttagccagctggcgccgttgcgtgcctttggggactttcgctacaagtggtcccaggaaataatgcagcagaaggtgctgccgatgttcggcgtgcaggcaatggcgccgaattactatacgccaccgtacctaaccgcccgccccgatgtccagcagcacgaattggggcccaacgacaagtttctagtcatcgccagcgacggcctatgggatttccttccgcccagcgaggtggtcagcttggtgggggagcacatcaactccaaaaagatcctcgaaccgatgcgcctgccggaaggcgatacaacgctgcaggaaatctctcagcagctggccgaaagaaaggctggcctcactcgcaaacccgtagaccaaaacgcggccacgcatctcatccggcatgctttgggcggcaccgactatgggattgagcactcgaagatctcgtactatttgacgctgcccagggacgcggtgcgtctgtatcgcgacgacatcacaatcactgtcatctactttaactcggagcacattgccaagctgcacagcgatgtggatcaaacggaggtcactgcgccggtagcatga

SEQ ID NO: 4359 - protein, 475 aa, DROSOPHILA
MFKFVLNDAASYVRSNVREFSLNALRLLPQLPQLSPYDVNLVLRENEFVYNFPVDGVIRSYETNQLGSNWPCEDSRTEASFLHRNGFICGIFDGHAGAACGQVVSKRLLRYVSAATLPRQVLREQMKQGADSQSFLKCHNDNVDFVSMIKPMYEASFLKYVNQLLETPQRDVSSELVNAFLQLDEEISQEALTSNDVRTMNVALSGAVACLVHIEGLQMHVASTGDCGAVLGVLDPQTQQWHSKKLNIEHNADNMSEVRRILAEHPKEEHETVIRNGRLLSQLAPLRAFGDFRYKWSQEIMQQKVLPMFGVQAMAPNYYTPPYLTARPDVQQHELGPNDKFLVIASDGLWDFLPPSEVVSLVGEHINSKKILEPMRLPEGDTTLQEISQQLAERKAGLTRKPVDQNAATHLIRHALGGTDYGIEHSKISYYLTLPRDAVRLYRDDITITVIYFNSEHIAKLHSDVDQTEVTAPVA

SEQ ID NO: 4360 - DNA, 4345 bp, DROSOPHILA
gaggacatcggagcggcgtcgctggttcggctgcagtttgtagttgtagagaaccggattctggcgcaccaggttgatcagcgtaaggatgtcgtccgtgggcgcgttgtccttgtggtagcgcttgcgctcttgcgtcgacgaggacatgttgcttcagcttctgtgggtttccactgttgtgctctcccaaatcctgatgatccttatcccgataccaatgctgctcctcacattcaggtgttttgtttttgtttacccacgaaaagagaggctttcgttctcgtcgaaatgcacgcacaaacacatacacaagcgcacttgaacggagccaaacaccagcttatgtaggtgtaggaacacgcacgcacacactctcgcacactcgatgcaaaggatagcgactgtgtgcagcaggatctcctttgtagtcgctacggggcacgaatctcggcaagaatcgagacgccttgtccttggcgttcagctccaattgtgcgaatttgactgcacttgatgctcttgctttgcttttggctgtttttgctgttgcttatttcgcgctagggatgacacatcgcggaattggcgttctctttcgccgtcactgaaaagcaaaagtccgtttccctgtatttataatcctcaattaaaagttacgttcttatacaattaagtcgtatgggaatgatgttctaaggcaaactaattaaaggtttttattttttgagttcagtttttttaccaacactattagaaattagacttatattgtatttgtggcccatataatttttttttattatctttattaatttttgtaacatttaccattctaccaataataataatacaactatttgttggcaaaataatattaataactacatgttaaacatacaaagttggctattacaagccgtgctgatacgtgcactatcgataacaccgcacatgtgcaagcctgcgcttatttttttgtctcctcgctagcaataaaaaacaacacaattgtgtagcttcgtgtcttgttttgctcaatttgccgacgaattgcatgataatgagcacaccggcgaaaaataacaatggaactggactggaggacgtgaatattccgggtcaggcctatctgcgcgaggccctgacctcctgcactgatcccttgaaggccatcgagagttttcaggtttgtttacgttgcaccgaaaaatgggcgccaaaagttcggtgggcttatttatccaaatatcacctgcctttttagcttgagaatggtgtattgctgccttcactgcgccccatgttgcctttactcgatttgcacggcgtgcgtcgactggactttcatacctcgctgatggaggagctgcgcgacaagctgatagctcacatcaacgagatgggccaaaaggagccccgggagcgggacaagaagctcaaggagctgctcgttaagagcttccccgtcgttcgggtgaagtcgctgcggcccgtggtcatggccatattgaggaatacccagcacatcgatgacaagtacctcaaaatccttgtaagggatcgggaactgtatgcggacacggatacggaagttaagcggcagatatggcgtgataatcaatcgttgtttggtgacgaggtgtcgcctctcctctcacaatatattcgcgagaaggagcacatcctgtttgatcacaccaacttgaacaatctgttcttccacccaacgcccaaggtgcgaaggcagggggaagtagtccaaaagttggccaacatgattggcaccagtgtcaagctgtacgatatggtgctgcagttcctgcgcactctattcctgcgcacccgcaatgttcactattgcacgctgcgtgcagagctactgatggccttacacgatctcgaggtgcaggagatcatctcgatagatccctgtcacaagttcacctggtgcctggacgcctgcataagggagaagaatgtggacattaaacgttcacgggagctccagggatttcttgacaacatcaagcgcggtcaggagcaggttctgggcgatctgtccatgactttgtgcgatccgtatgccatcaactttttggccacgtcggccatcaagatattgcatcacttgatcaacaacgagggcatgccgcgtgacaatcagatactcatcctgttgttgagaatgttggccttgggcttgagtgcctgggtgatgatcgattcgcaagactttaaggagcccaaacttgattgccaggtggtcaccaagtttttgcccgccctcatgtcgttaatggttgacgaccagtgccgcagcttgcacgcgaaactaccgccggacgagcgtgaatctgctctgaccaccatcgagcattcgggaccggcaccggatgccgtggaggcgtacattcaagagagttccgtggccagcatattggccatgtactatacgctgcacacggcgcgcctgaaggatcgcgtgggcgtgttgcgcgtcttggccattctgtccgcctgcaaagacgaccgcgcatatgaggatcccttcctgcactctctggttagcatttatagctgcttttctaatatttacttttctgactcgattgcttacctctacagattgccctgctcatccccatgagcgaagagtttgccacggaggacttctgcaccacgctcttcgacgagttcatctttgccggactgacgcgcgagaatgtgacctctcgtcacatgctgaaacttttgtggtatgtgcacaataagctgcccgccggtcgtttggccacattgatgaaggctatgcagccgacgacggcccacaacgagcacatccacaagttgtacgaaattctgcaggagagaatcggcaccggggcggcggagacgccggtcattgaagcgccgcccatggagtttgattcgccgctaaagagtgtgccaacgccaggaccgcactataatgtccaatagctagaggcaccggcagtcgcaccacctgcggctgtcgtcggatgatgatggttatttgtgatgatgatgttgatgttgatgatgatgatcggaggccatgtatgtggctacctcatatacttctctggagcagccgaccggatggcaatccccaattagcatgcttgcgcaaataataattctactgtttagactaaacataaagcactgcgaccgagcaatcggatatagtttacatatttacagaatgtatggctttgttggcaggcatcaatcagttgtcgctggctattatatatattatatattactgttacgctagtgtaacgatcgattctagtacacaatatagagtacaaatctaaggcaatgtcttttagtttcatcagggtttttgaaagaaatattggttcccggtaccagtttctgtaatcacatactcaacttttaactcatctttactcaaatttaatgatttacataactggagtttcttacggacatggataattgaaagatcctaataaatttcggtataaaagttttttaacgcttatagcttagggaaatacacacaatttaggaggtttattagggataggagtctttcgtctcatgtctgatctgttttggaactggaaactggagctgatcccgctacggaagcggccggagatgtggaagcagccccaccggacgtggacgctggcgaaacttccacgggagaggtatccaacggaggtagtgaagatgaggccgacaaaatctcatcatctatgcaaacggtgggcgagtctagagtttgaatctctggcgagagactaggagctggctgtggcacagacagcgatgacgtggatgatgacgatgatgatgatccggaaccggaagtggaggaggatgaaccggatgaagaaagtgagctgctggcggttgttgttgttgtagtgcttgtacccgttgtcacagccattcgtgaaccggctacaacggcagcagctactgctgttgcaccatccttttctgtaacctcctcaccggttgcctcccctgaccttggcgatgaacccgctgaagaggcagttttttgctgtggcggagcgggtgtggcaaagatatccttctgcctctcagatttgcactcctttagcagctccgtgtactccgagtgcaaacgattccattcggaatgtggcttgagcgtatccagaacacactgcattaattccaactttggcacgaactagaaagagaggaaagtagagagcatataaacaacacgatcacctactatgtgtagacttcgctcacctgtgatattcccggctccggcatgctgagcagatcgtccaggaacacacgc

SEQ ID NO: 4361 - DNA, 2205 bp, DROSOPHILA
aaacaacacaattgtgtagcttcgtgtcttgttttgctcaatttgccgacgaattgcatgataatgagcacaccggcgaaaaataacaatggaactggactggaggacgtgaatattccgggtcaggcctatctgcgcgaggccctgacctcctgcactgatcccttgaaggccatcgagagttttcagcttgagaatggtgtattgctgccttcactgcgccccatgttgcctttactcgatttgcacggcgtgcgtcgactggactttcatacctcgctgatggaggagctgcgcgacaagctgatagctcacatcaacgagatgggccaaaaggagccccgggagcgggacaagaagctcaaggagctgctcgttaagagcttccccgtcgttcgggtgaagtcgctgcggcccgtggtcatggccatattgaggaatacccagcacatcgatgacaagtacctcaaaatccttgtaagggatcgggaactgtatgcggacacggatacggaagttaagcggcagatatggcgtgataatcaatcgttgtttggtgacgaggtgtcgcctctcctctcacaatatattcgcgagaaggagcacatcctgtttgatcacaccaacttgaacaatctgttcttccacccaacgcccaaggtgcgaaggcagggggaagtagtccaaaagttggccaacatgattggcaccagtgtcaagctgtacgatatggtgctgcagttcctgcgcactctattcctgcgcacccgcaatgttcactattgcacgctgcgtgcagagctactgatggccttacacgatctcgaggtgcaggagatcatctcgatagatccctgtcacaagttcacctggtgcctggacgcctgcataagggagaagaatgtggacattaaacgttcacgggagctccagggatttcttgacaacatcaagcgcggtcaggagcaggttctgggcgatctgtccatgactttgtgcgatccgtatgccatcaactttttggccacgtcggccatcaagatattgcatcacttgatcaacaacgagggcatgccgcgtgacaatcagatactcatcctgttgttgagaatgttggccttgggcttgagtgcctgggtgatgatcgattcgcaagactttaaggagcccaaacttgattgccaggtggtcaccaagtttttgcccgccctcatgtcgttaatggttgacgaccagtgccgcagcttgcacgcgaaactaccgccggacgagcgtgaatctgctctgaccaccatcgagcattcgggaccggcaccggatgccgtggaggcgtacattcaagagagttccgtggccagcatattggccatgtactatacgctgcacacggcgcgcctgaaggatcgcgtgggcgtgttgcgcgtcttggccattctgtccgcctgcaaagacgaccgcgcatatgaggatcccttcctgcactctctgattgccctgctcatccccatgagcgaagagtttgccacggaggacttctgcaccacgctcttcgacgagttcatctttgccggactgacgcgcgagaatgtgacctctcgtcacatgctgaaacttttgtggtatgtgcacaataagctgcccgccggtcgtttggccacattgatgaaggctatgcagccgacgacggcccacaacgagcacatccacaagttgtacgaaattctgcaggagagaatcggcaccggggcggcggagacgccggtcattgaagcgccgcccatggagtttgattcgccgctaaagagtgtgccaacgccaggaccgcactataatgtccaatagctagaggcaccggcagtcgcaccacctgcggctgtcgtcggatgatgatggttatttgtgatgatgatgttgatgttgatgatgatgatcggaggccatgtatgtggctacctcatatacttctctggagcagccgaccggatggcaatccccaattagcatgcttgcgcaaataataattctactgtttagactaaacataaagcactgcgaccgagcaatcggatatagtttacatatttacagaatgtatggctttgttggcaggcatcaatcagttgtcgctggctattatatatattatatattactgttacgctagtgtaacgatcgattctagtacacaatatagagtacaaatct

SEQ ID NO: 4362 - protein, 594 aa, DROSOPHILA
MIMSTPAKNNNGTGLEDVNIPGQAYLREALTSCTDPLKAIESFQLENGVLLPSLRPMLPLLDLHGVRRLDFHTSLMEELRDKLIAHINEMGQKEPRERDKKLKELLVKSFPVVRVKSLRPVVMAILRNTQHIDDKYLKILVRDRELYADTDTEVKRQIWRDNQSLFGDEVSPLLSQYIREKEHILFDHTNLNNLFFHPTPKVRRQGEVVQKLANMIGTSVKLYDMVLQFLRTLFLRTRNVHYCTLRAELLMALHDLEVQEIISIDPCHKFTWCLDACIREKNVDIKRSRELQGFLDNIKRGQEQVLGDLSMTLCDPYAINFLATSAIKILHHLINNEGMPRDNQILILLLRMLALGLSAWVMIDSQDFKEPKLDCQVVTKFLPALMSLMVDDQCRSLHAKLPPDERESALTTIEHSGPAPDAVEAYIQESSVASILAMYYTLHTARLKDRVGVLRVLAILSACKDDRAYEDPFLHSLIALLIPMSEEFATEDFCTTLFDEFIFAGLTRENVTSRHMLKLLWYVHNKLPAGRLATLMKAMQPTTAHNEHIHKLYEILQERIGTGAAETPVIEAPPMEFDSPLKSVPTPGPHYNVQ

SEQ ID NO: 4363 - DNA, 5785 bp, DROSOPHILA
gccagcatattggccatgtactatacgctgcacacggcgcgcctgaaggatcgcgtgggcgtgttgcgcgtcttggccattctgtccgcctgcaaagacgaccgcgcatatgaggatcccttcctgcactctctggttagcatttatagctgcttttctaatatttacttttctgactcgattgcttacctctacagattgccctgctcatccccatgagcgaagagtttgccacggaggacttctgcaccacgctcttcgacgagttcatctttgccggactgacgcgcgagaatgtgacctctcgtcacatgctgaaacttttgtggtatgtgcacaataagctgcccgccggtcgtttggccacattgatgaaggctatgcagccgacgacggcccacaacgagcacatccacaagttgtacgaaattctgcaggagagaatcggcaccggggcggcggagacgccggtcattgaagcgccgcccatggagtttgattcgccgctaaagagtgtgccaacgccaggaccgcactataatgtccaatagctagaggcaccggcagtcgcaccacctgcggctgtcgtcggatgatgatggttatttgtgatgatgatgttgatgttgatgatgatgatcggaggccatgtatgtggctacctcatatacttctctggagcagccgaccggatggcaatccccaattagcatgcttgcgcaaataataattctactgtttagactaaacataaagcactgcgaccgagcaatcggatatagtttacatatttacagaatgtatggctttgttggcaggcatcaatcagttgtcgctggctattatatatattatatattactgttacgctagtgtaacgatcgattctagtacacaatatagagtacaaatctaaggcaatgtcttttagtttcatcagggtttttgaaagaaatattggttcccggtaccagtttctgtaatcacatactcaacttttaactcatctttactcaaatttaatgatttacataactggagtttcttacggacatggataattgaaagatcctaataaatttcggtataaaagttttttaacgcttatagcttagggaaatacacacaatttaggaggtttattagggataggagtctttcgtctcatgtctgatctgttttggaactggaaactggagctgatcccgctacggaagcggccggagatgtggaagcagccccaccggacgtggacgctggcgaaacttccacgggagaggtatccaacggaggtagtgaagatgaggccgacaaaatctcatcatctatgcaaacggtgggcgagtctagagtttgaatctctggcgagagactaggagctggctgtggcacagacagcgatgacgtggatgatgacgatgatgatgatccggaaccggaagtggaggaggatgaaccggatgaagaaagtgagctgctggcggttgttgttgttgtagtgcttgtacccgttgtcacagccattcgtgaaccggctacaacggcagcagctactgctgttgcaccatccttttctgtaacctcctcaccggttgcctcccctgaccttggcgatgaacccgctgaagaggcagttttttgctgtggcggagcgggtgtggcaaagatatccttctgcctctcagatttgcactcctttagcagctccgtgtactccgagtgcaaacgattccattcggaatgtggcttgagcgtatccagaacacactgcattaattccaactttggcacgaactagaaagagaggaaagtagagagcatataaacaacacgatcacctactatgtgtagacttcgctcacctgtgatattcccggctccggcatgctgagcagatcgtccaggaacacacgcatccgcttttcggagccgtgagtggccagctggaacgtgagcatcttgtgccagtgctgtaattcgtccagcgactggagggcctcgcataacttgatctggttttcgatgaacctgatttttgcgcactgctgccagctttccgaatgtctcctaaaatatatagtttattgcatttagaatcatatattgaaaaggagtataaatagttttcacttacaactccatgctaccagtgaaactaaagtaattctgactgctggcctgcatgctgaggagcggaaacttctgttgcatttggtccatgtccctaggcagtgtccccctaattccgtggtacatgatcgcatccttggtggccagcaccagccacgattgcaagctcgtcgagtaggagtacgagttgccgctggggaaaccaatcaagggcatgccctgattcgttaccgagaactgtgcggccgtgccatgcttgtttagcagctccaggcagccggcggccaggctgacgacctttttggcaatatcccatatacgcagcaatccgcactcggtcagcacaccaaccaaactgttgtccggactctagaataaatagcaattaatataaatagcttaagacaccaattatcgcgactggatttctcaaaaataaaaaaaagcaggatctaatgcaaaatcgagtcgtgatttggctgcattatataagtgctagttatccggactcacaaaggcgcaatgcactgcagaactggtcagcgagatggcgggaaagactggacagcccgtctccatggaaattagtcgcatgctcccatccagagagcacagcatggcgtatttttcacacagattcagattgaccagcggagatccaacatagaattcccaaagcatttccttggaatccgatgcggttaccttggccagcataccgtgttgtgtctttaggtgaccgttcgagacatgcaggcgatagtccagagcggccttcacaaactcactctttccggtggccgttacattgagattgcttggactacaggtgctactttggtgctcctccagccgtggagtccgtaacagttcattgctctggccggggtcaaaaggcagtgattgacgtcgctggctggcgggttgggttttcaatctagaatccagacgacccagatctattttgctaaccaaaggctccagcggcatcaggggcgtggcagcgctctccgttggagcagcagccggtagcgttccgatcgccgccgagcaagaagttaaagctgttgtagacgatccactactggacacaatgttcatgctcagcgatgtgggtccatcttcgtggagaggtataaacatgggagtgattctacgtttgccatccttcgtcctcgtttccgtttgtttactaatgggtcgctggttggcctcgttattgttactaagtggaaattttgtgggcttgtccccttgaggcaacagcaatcgctgcggatgctccaagactggggcagactttcccagaccgttcacatagttcttaccatacatctttcgtataatggcattctgttcttcttcggaaatggccttacccagttcctcttcggtgaacttcaggcaagctatgctgccatccacactgcaggccattagcaggcattcctgggggccccacgtcaaatcgagaatgctagcattgaacagttcatggatgacaaccatgggacgctgcagggcggtcatccaaacggatagagaacgatcacgagagcccacagccagacagcagtattgcaatggtttgctgggactgccatcgttttcctggcggctcaagatagaattgtgaaacctaacacacgtcactgccttgcgatgacccacgaaatccttatcgcacttccagccctcgcgctcaattatctgagcggtaggtccgccaccattcatggcatgtgcagagaccagatattggccatccggtgaccaggacaatctcaagatatgcgttgtaccgccgcactcctcgaacggttcggttatcgtgtgcgataggctccagttcatggtgttccagattttgatgctgcggtcatcggattgcgaggccaaaaagcgacccaacggatcccaggagacgcccttaacgagacccgtgtgtccttttagagtggccaccgaatgtggaaatgcctgggcatcccagataatcaccgtgttatcaatgctgcagctggccaaatagacatcgttgggtgaccaggccaaatcgaggacatcgccatcatgaccacgcagtgtgtagaagcatttccacgattcgtgattcttttgcatgccgccggtaccgaaaactccactcgaaccggcagacttgcgccagatcataatgagcttatcgtcggatcccgatgccaggttctgaccattctgcgaccagcggacgcagttgacacaggccagatgctggtccatttggcacaacatcttcggaacatccgcatcgaattccgccttgtcggagagcaccggcagcagattccagatgaccactcgtccgcaatcgctgccctgccctccagtcgcgaatttcgtgcaatccttatggatatccaccgagaatatctgtttgtctgaggggataaatatgggtttggattatttctcaatcaaattgggagccaccaattggaaacccggcttttgcggattttccgcaacgtgcaaacttaccatcgtgatgcacccaggccggcttaaggagccgcatttacgatttacttataggtattatcttttcagtgcaattaagttaagataaagttaagattattttacgactgagattgttgataaactaccgctatatcggtatcggtaacgatgcccatcacctattcttgatcgtcatcgataggcgctattatcgttgccgacttttcgataaagagatcgaatgggcacactgacaaaggcgcgaaattttcaaaaatactgaaatagtacgtttatagccgtaagtgataaccacgtcgcacatttttataaaatgatagcgatccttcatatatcaaatgaaacaaaggcaaagcttaaaacaacacatatgtttcttagtgtaacttttttaatttcaattctacatcattcatataagaatagatctttcctttgttattcatttctttgttatgactgtggaaacaatgacaatttattttgcgattatagctcctcccttttagagcacctctcacgctataggacccattttttctagtttattttttcataaccactgggtgggtggagtgaaactaacgaaaggaaacgaacaacggcaaaacgccgaaagttttcctaagcgcttgattgccattggtctccttctattccgtgggcgtggcgtggggacaatggaatgggggtggagttgcgggtagtatcaaatgaatcaaaacaagactaatattttgagaagacgaacgccaagtttatccagcgatttagctagaaaattgcttttgcaaaatttactcatttgcttaatttgcatgcgtgaaaattgtcgttcaaaatatgttgtttgccccagttgtttgtttgccttgccagttgtgggtgtgtgtgggtttttccccattcatccaatgcaaatctcaagcctccaattgactgacaatccgaactgtctcaataaagtgaaaagcgaaataaaagcagtgccaactcactttacctgggacaatttgcaatccaacgcatctgtcgccggcaacatgtggcgtcaatgatgttcctctaacgttccctttcccctttccatgagtttttccatagaatttcccacccatttctgaatgccact

SEQ ID NO: 4364 - DNA, 3406 bp, DROSOPHILA
tatagcggtagtttatcaacaatctcagtcgtaaaataatcttaactttatcttaacttaattgcactgaaaagataatacctataagtaaatcgtaaatgcggctccttaagccggcctgggtgcatcacgatgacaaacagatattctcggtggatatccataaggattgcacgaaattcgcgactggagggcagggcagcgattgcggacgagtggtcatctggaatctgctgccggtgctctccgacaaggcggaattcgatgcggatgttccgaagatgttgtgccaaatggaccagcatctggcctgtgtcaactgcgtccgctggtcgcagaatggtcagaacctggcatcgggatccgacgataagctcattatgatctggcgcaagtctgccggttcgagtggagttttcggtaccggcggcatgcaaaagaatcacgaatcgtggaaatgcttctacacactgcgtggtcatgatggcgatgtcctcgatttggcctggtcacccaacgatgtctatttggccagctgcagcattgataacacggtgattatctgggatgcccaggcatttccacattcggtggccactctaaaaggacacacgggtctcgttaagggcgtctcctgggatccgttgggtcgctttttggcctcgcaatccgatgaccgcagcatcaaaatctggaacaccatgaactggagcctatcgcacacgataaccgaaccgttcgaggagtgcggcggtacaacgcatatcttgagattgtcctggtcaccggatggccaatatctggtctctgcacatgccatgaatggtggcggacctaccgctcagataattgagcgcgagggctggaagtgcgataaggatttcgtgggtcatcgcaaggcagtgacgtgtgttaggtttcacaattctatcttgagccgccaggaaaacgatggcagtcccagcaaaccattgcaatactgctgtctggctgtgggctctcgtgatcgttctctatccgtttggatgaccgccctgcagcgtcccatggttgtcatccatgaactgttcaatgctagcattctcgatttgacgtggggcccccaggaatgcctgctaatggcctgcagtgtggatggcagcatagcttgcctgaagttcaccgaagaggaactgggtaaggccatttccgaagaagaacagaatgccattatacgaaagatgtatggtaagaactatgtgaacggtctgggaaagtctgccccagtcttggagcatccgcagcgattgctgttgcctcaaggggacaagcccacaaaatttccacttagtaacaataacgaggccaaccagcgacccattagtaaacaaacggaaacgaggacgaaggatggcaaacgtagaatcactcccatgtttatacctctccacgaagatggacccacatcgctgagcatgaacattgtgtccagtagtggatcgtctacaacagctttaacttcttgctcggcggcgatcggaacgctaccggctgctgctccaacggagagcgctgccacgcccctgatgccgctggagcctttggttagcaaaatagatctgggtcgtctggattctagattgaaaacccaacccgccagccagcgacgtcaatcactgccttttgaccccggccagagcaatgaactgttacggactccacggctggaggagcaccaaagtagcacctgtagtccaagcaatctcaatgtaacggccaccggaaagagtgagtttgtgaaggccgctctggactatcgcctgcatgtctcgaacggtcacctaaagacacaacacggtatgctggccaaggtaaccgcatcggattccaaggaaatgctttgggaattctatgttggatctccgctggtcaatctgaatctgtgtgaaaaatacgccatgctgtgctctctggatgggagcatgcgactaatttccatggagacgggctgtccagtctttcccgccatctcgctgaccagttctgcagtgcattgcgcctttagtccggacaacagtttggttggtgtgctgaccgagtgcggattgctgcgtatatgggatattgccaaaaaggtcgtcagcctggccgccggctgcctggagctgctaaacaagcatggcacggccgcacagttctcggtaacgaatcagggcatgcccttgattggtttccccagcggcaactcgtactcctactcgacgagcttgcaatcgtggctggtgctggccaccaaggatgcgatcatgtaccacggaattagggggacactgcctagggacatggaccaaatgcaacagaagtttccgctcctcagcatgcaggccagcagtcagaattactttagtttcactggtagcatggagttgagacattcggaaagctggcagcagtgcgcaaaaatcaggttcatcgaaaaccagatcaagttatgcgaggccctccagtcgctggacgaattacagcactggcacaagatgctcacgttccagctggccactcacggctccgaaaagcggatgcgtgtgttcctggacgatctgctcagcatgccggagccgggaatatcacagttcgtgccaaagttggaattaatgcagtgtgttctggatacgctcaagccacattccgaatggaatcgtttgcactcggagtacacggagctgctaaaggagtgcaaatctgagaggcagaaggatatctttgccacacccgctccgccacagcaaaaaactgcctcttcagcgggttcatcgccaaggtcaggggaggcaaccggtgaggaggttacagaaaaggatggtgcaacagcagtagctgctgccgttgtagccggttcacgaatggctgtgacaacgggtacaagcactacaacaacaacaaccgccagcagctcactttcttcatccggttcatcctcctccacttccggttccggatcatcatcatcgtcatcatccacgtcatcgctgtctgtgccacagccagctcctagtctctcgccagagattcaaactctagactcgcccaccgtttgcatagatgatgagattttgtcggcctcatcttcactacctccgttggatacctctcccgtggaagtttcgccagcgtccacgtccggtggggctgcttccacatctccggccgcttccgtagcgggatcagctccagtttccagttccaaaacagatcagacatgagacgaaagactcctatccctaataaacctcctaaattgtgtgtatttccctaagctataagcgttaaaaaacttttataccgaaatttattaggatctttcaattatccatgtccgtaagaaactccagttatgtaaatcattaaatttgagtaaagatgagtt

SEQ ID NO: 4365 - protein, 1047 aa, DROSOPHILA
MRLLKPAWVHHDDKQIFSVDIHKDCTKFATGGQGSDCGRVVIWNLLPVLSDKAEFDADVPKMLCQMDQHLACVNCVRWSQNGQNLASGSDDKLIMIWRKSAGSSGVFGTGGMQKNHESWKCFYTLRGHDGDVLDLAWSPNDVYLASCSIDNTVIIWDAQAFPHSVATLKGHTGLVKGVSWDPLGRFLASQSDDRSIKIWNTMNWSLSHTITEPFEECGGTTHILRLSWSPDGQYLVSAHAMNGGGPTAQIIEREGWKCDKDFVGHRKAVTCVRFHNSILSRQENDGSPSKPLQYCCLAVGSRDRSLSVWMTALQRPMVVIHELFNASILDLTWGPQECLLMACSVDGSIACLKFTEEELGKAISEEEQNAIIRKMYGKNYVNGLGKSAPVLEHPQRLLLPQGDKPTKFPLSNNNEANQRPISKQTETRTKDGKRRITPMFIPLHEDGPTSLSMNIVSSSGSSTTALTSCSAAIGTLPAAAPTESAATPLMPLEPLVSKIDLGRLDSRLKTQPASQRRQSLPFDPGQSNELLRTPRLEEHQSSTCSPSNLNVTATGKSEFVKAALDYRLHVSNGHLKTQHGMLAKVTASDSKEMLWEFYVGSPLVNLNLCEKYAMLCSLDGSMRLISMETGCPVFPAISLTSSAVHCAFSPDNSLVGVLTECGLLRIWDIAKKVVSLAAGCLELLNKHGTAAQFSVTNQGMPLIGFPSGNSYSYSTSLQSWLVLATKDAIMYHGIRGTLPRDMDQMQQKFPLLSMQASSQNYFSFTGSMELRHSESWQQCAKIRFIENQIKLCEALQSLDELQHWHKMLTFQLATHGSEKRMRVFLDDLLSMPEPGISQFVPKLELMQCVLDTLKPHSEWNRLHSEYTELLKECKSERQKDIFATPAPPQQKTASSAGSSPRSGEATGEEVTEKDGATAVAAAVVAGSRMAVTTGTSTTTTTTASSSLSSSGSSSSTSGSGSSSSSSSTSSLSVPQPAPSLSPEIQTLDSPTVCIDDEILSASSSLPPLDTSPVEVSPASTSGGAASTSPAASVAGSAPVSSSKTDQT

SEQ ID NO: 4366 - DNA, 21311 bp, DROSOPHILA
ttatatatgctgtatatagatccgctcttaaatattaataactaattttgtttatctttctcttgcttccagatcatcgtttacatcgtttttcgcttaaaatgtatcccgcggaaaaaaaatgttcttagattaagtgaattaaatgctaaatattcttcgattttccttacatgcttttcgcttatgagtgtgtggtctgtatgtgtgtgttgttttgtcgttgtgtgtgtgtgtgtgtggtgtgtgtgtgtgattgtgttttttaaacaaattgttaagcttaaattacaattaaattgaaattaaaactaaacaaaaaattccagaagaactccattgaactaacttttgtttgtgggtctgtctgtgtcgtgtgtgttttaatattacaaaagttgttcgttatttatttatatatatatatttataaatcttttatcgtactttatgaagaacatttacacacacacatatatatcattatatatatatatttaccaagaatttttcatgtgtttttttttttaggttttgtacattttttaaaaattacgttaaattatttcataaatattttcttgctgttgtttttgtttcgcttttggattgtggcttgttttttatttgcaataaaatttcctatatataatttatatcaatcgtcatgtgtggagttccatcatttatcatttgccttcgtcatttctatcatttcgagtcgcttagttgctaaatactctttcccttagttgggaattcccttcgttttcatattattttatgctttttaagtctgaaatgttaattcgttttagctgatttgggtttgtattctctatatatcttttatatttatatatatatatatattatgtataaatattcttgtttttttttcgatttcgtttttgtttttcatttagtttgtttatataaagacgacaaaatgatgatttgaactttaaacattcttttttccttttcttgttttttttttgttttcataatgttatgtcttagtttggtttaaagaacttgaaattggaattaagttttagctttatgatatgctgagctggtccaaaccaccagttctatggtggtggtggtgttggtggtgcagctctgttctcctcttactggcgatccccaaatgtccccatacgtttttttttttgggttgattgccacccaacgcccccctggctgtaccacgtaatggtctacgtattgcatttaaaaactctcctgccaacttacaattaacgccccacttttcgcaatcctcgcatgcatttactctctggattttaacaaatgtttgtcatcggttttttttccttgatttatcactcatttacttcgttgatcctggcggcttaagctaggcctataatacctatgtttagttatagatttacgtttatgtttgggctgtataaacttgtaactccccccgctttttacacacgcttctaatacatatatatatatatatatttaaaaaaaaattcttgttaactacacaaaaaaaaaaaaaaaaagaatggaaatagacctccaacgcggtgcattccatttcgcgatcatagttggcattgctaaattggatgttcgaaagtttgagacttaaaagaattttcttgaatctataaataaccatgtacgatattgatattgaaatctaaatgcctcaatatgaaatttaataattaatctaacaatcaataatgtgagaaatctatatatctatcactctgaatttatacgagtcaagaagagtctttcgaaatcaatgagaacttgaatttcctatttccaacaaatacgatcgcaaaggaagtgtatctacggtcggtgtgtcttcgaatttgttctgagaatgcagcggagtgtcgggggctgtatctatgtgggctgtagatatgtatccatgtggctctatactcgctatatcaatcttaaccgaacgtatgatccagttgctgctgatctccttgatgccctatatcctgtcgctgttcatcatcatgatggtgttgctgctgatgatgatgatggccgtggtgattctggtgttgattctggtgatgattctggtgatgctgatgctgctgtagctggtgctggtgctgctgatgatggtgctgctccagctggggagaactattgctccccgatccagaaccagaaccagaaccagaaccagatccacaaccagaacccgaacccgaacccgaacccgaacccgaacccgaacccgaaccacttgcccccgctgaactgttgttgttgctgccaccgctgcagtattggaagagtagattctacaccatattcgcgtacttatcctgcggcgacatgtaatccaggctgttctgggagaaggcctgcgcggacacggtgcccgtgaaggatggcgatggcgacagaccaaaattggaggccgtgtagcccgaatggcccatgttgtagttgacctgattctgattgctaaagtactccatctgtgagtagtagctgggcgcctgggcatagttattcggatattgctggtactgattgtgccagaagttatacgaatcatgattggacatataggcggccgaatgggcggcagaatggtgggcggactgggccgattgggcggcatgggccgctgcggccgccgattgcggcgacatgggtgtaatgggcggcgatggtgtggtgatgctgctgctgctgtccatcggtgtgatattgccacccggctgcagcaggcgcggattgctgccggcggccgagccatagatgctgtgatgatgatgcactccggcaccaatatcaccaccggcatcctttagctgatcatagggcgagcgaagcagatcctgcgatacgcccacaccgacgccaacgccaacgccgacgccgacgcccaaattgaggccgccggatgaggcgccaccgccgccgccgccgccacccacactggatccatagccgccggacaagtgctcctttttgcaaacgatgctcaccggactgacggacgtggccggcgtgggcagcagtggcgaggagttctgatgggcggcggtcacgtttagggcagccgctgctgctgccgcggataggtgtccgcccgcttggctaccgccgccgccgccgctgctgctgctgttcggcgttgagttgccttggttgttgttgttgctattattgttggccgactgatttgtaccgcccgatgctgccgccgctgcggcgctcaaaaaggaactgtggtgcgtcttaatcgattgggccgctgccaccgctgccgctgcactggctgccgctgctgccgaattgttgttgctattattgccaccggaggagccaccgccctgctggctggactgtgagttgccctgcttttgcgacgacttgttgctgttattgccgccggagctctgtgtgttgttgttgctgctgctgccgttattattgctattgctgcgactgttggccgaggagctgctgcagctgttgccgctgccgccaccgctggcattcttcgagctgctcaagctattcgactgctgctgctgctgcaactgttggcggcacttggcgcggcgattcttgaaccacacctagaaaaaattgccaaaaaattgaagttaattagtgggggttctatttcgatttaagttgggtgcaaagttaggaaaatttcccaattcgaccacttcataaatgcttaacatcaatcacaatttgaaatggcaaccccccgccaaaagattctgttaaatcaatcaaccatcgatattacaaattcgtggctattcaagcaaatcatgtgcacacaaattccaaaagctccatcccccgctaagtcctgaaaatcgaaaaacaaggtaaaaccgcaaacgagccaacaatttatacaaaaataaaaaaaaaataaaataaaaagaaatcactttgaagttggcccaccctgactttcctttgaagttcattagaagagggacaaatcaagttgtcgtcgttttaaaacatcgccaaatgttgtctaaatttgtgctaaaatttgcaaaaattcccaagcttagtgttttcaatattattatgaaatttgcgagcagttcattaaacggaatcaaagaaaatgtcataggaaatcagagcggacgaagtcaaatcacaaaaggggatttacgagaatgcaaaatggaattgaaaattgtaattgaatttccttccagcctcaagtggaatgggccaatgcgttgtgctgacaaataatgaaatttgatacgccttgtttaatgctctttttttttccacgactggctccccctttttctttatttttttgtggaaaggttcatcctcgaactccccatgaaaatcaacagagaaaacggcaatgaaatgctcgagtggccgcagccgcgtggcaagtgttaacttccgaaaaaggggggggtttcggttgggctgagtgggtggtgtggggcggtaataaattcagctgtttaccaaagcacaagccattagcaagcaacaccaaccccaaacaacaaatcactgaaataacatttgccatgcagtcagcatcggtccgactgcttttccaattcgactgcttgacgaacagcactgcttgtgctttgatttccgccagccagagttgccagagtttttcggtattgagcaattttcaaatgcatagaactgctagttaaacgtactgtccgaattgaagagattcttttttgaacttcttaaaaccatattagaattatcattcatttcgaactagcacgctttttgaaagaatattttctattttttagctttaaaatgcctaattttggctggaaagccgccgtgtgccgtctgaactggcacttagcggattgtttgcagccccttaagcataacaaacaagactaagtgaattccttgcgctcgagtgtgccgctttatgggctgtttattgttgtcctcctgtctccaggactctactctattctccggtccacaaggggatgcgtttttcgcccaggggcgcgtttgagtgggtggttatgggtttccggaccacttcatgtctgtgggtggcagggggtcgtgtgattccgtgtgacaatataatcgagtcaattttttggccgccggctgttgatgtaacttttcctctctcagaacagcgcgtgactttttgcacttgttgtgggtccagagatcccaaacccagcccaacccataccattccacatttacagccagccatggaggacagcccgcaaacaccccccgcataatttattcattgctcgccgggcaaactaattgatgtgggaaaattgcagccgccggccatcaggcacacgcccactttcacgcctcccccctgacaaataaacaaacaaacgcaaacattcagtaacagcaaactttactgagacacttgactaaggcaaacaacacttgaggcaaaaattgttgaggctgtgagaattctggatatctggttccttgagaagatctcccaaaataatattccatatatggaatttcccgagtaaacataaagttggaaaatactatagccgacattctaaagatgattgctgagctaaatattataaccgacattctaaagttgattgctgaactaaatattatagccgacattctaaagataattgctgagcttaagtatgcaagttacccattttattttttatgcttactaatgaacagttcttttgctagcaagtgtgtaatagtctctatttttattaactcgattcccggactgacttttagctaagcacacatataatgttccgcattgcattaacaaattgaaaattatgcataactctcgcagcgtctctttctaagctccatatatgatgcatcggtcgctctctttcgcgcaaatgggcatgagtggaaggagtggaaattgttaatccgcaatgggaaaattaattttataaaacagctgtgcggcaaaagtttcccttctacgcttctcccctcatttcgcgcagcagacaaatccttttgcaacaaaggaaaagggaaaatggaaaacgtatagaaaaaaaaaaaaaagagttggctaagtttaggtgcgctctcgccctctccctcgcacccattgttgccgtctctttcgcgctcgtattccaacccccgacgacgaacagctgaaaacgaggcgaacatatctggaatccgtggtgataaaggggcagaaggggggggagggagcccacgagaaggggtaggctacaccatggaaaaaattccattataaatataggatctatcagagatatagtatgatctctcagagatatagtatgattgcaatctaactgtatgctttatgaaatactcatgtcttaaagatccttcacattttcaatgacttcattaggatagtgtttgttcatctattgaaaacctatacaagttattactaaacagggatccccctttgaagaacttctgttttcgaacatttccatttaaaatcggaagattttcttttagtgcacaggagctgcagaggggttattattattaggggtgcctgcttgcctggctgggattgggattgggattgggatgtttctgccgctgctggcttcccagtttaccagtttgccagtttccccgtgatttatgactgctagcgatggcagccatccaaactccgaccaccgacccacaggcaccaaaaatggaacaaaaaaaagatgagaagagaagagaagtgaaaaacccgatccgcaccctcgaacggcgaatgaaaacatttgggcgtaaatgtttgctctgttctggtgcagataagctgcgtaaaattattacgttatttgtattggttgcaatcaacgccctctcacttggaaacgagacacagggggacggggtaaacccacccccggatgccaaataccggattccggattctgaactctgaatctcgctactgggccataaagatgcctatcattcaattaatatttaccagaccctaagccccgtccttctgattatgactccgctttcgttgcggggatgctgattctgattctgattcggattccgattcggattcagattctgttactgattctcacctcggcggtaatgattatttatgtgaaatgatattctgttccactgacaacgtggtgacctttcaatggaggcctcctgttgcgaggactcaatgttaatgtcgtaacgataatatgatggtcttaaaggtggtctgtctatggttgcactctcaatatgggtagcatcatagttctagttaatacgagttctcaattattattatctcaggcaatatgtatttgttataatccactttaaattctagtcaaactaaccagctactaactctttacccctgccgtcggcagtctagtttttttgctcgggctaattgagttgcttggcttccttggcagtgccaaacacgaagccccattctcaagaacccagaccagaccagaccaggccaggccagaccatcggatccccaatgctgaatacccagtagttacccaaaccgaaagccaagccaaaacgaaaaccaaaagccagacgccttgtaacatgcaagcgaatcgtgttttttgccccaactgctgctactctttccccgcctttttggccagcatttccatttccattcgcagttttcagtcggttggggttttttaaggtttttcctagttttcctgcctgtaatctgatacgtgaccgagtgtgggtgcctatgtgtttttataacagtggatggatgcattgacatgttgcgttactacccagaggtacagtggcacgaaatggggttaagatttgaatgtaatcggtactatatcatatgatatttgcaagaaatttgcacacgatttagtaaatatcattgaaatattccgatgatgcaaccactgtactcgcatttgaaaatcaatcaagccgtggcgacaagaacaacgcaagaaactaaccaagaagaagcgacatgtgtggaaaaatgtgaaaatctatacaaatgtcaattcccagctacacccccgacattcatatatagtacatccatccacacttccttatacacatacatatgtatatcgccccttggtttcgccggtgtgcattactcgaatcaattgtgtaaaaaacgtaactttgaaaaggaaacaatacagtagcaggcgattcatgggacatgtgcaaggtgtccttgctgtattctttccatgctcaccattcattcggtctgcattccccctccccaccccttcgaaaatagaacgtgtcgtttttcattcggagccgaccactgcaggggcttcctccttaatcgctgttgctttttacggccaggtctttaaagttgacttgctattaactgcctttctttctttctttcttttaaagcgtgctcgttatctaagtagctaacttggtatccttactctcatatcttttatctcttgtttttatctttatctttagagcgctctactaacttatcaacttatactaaagttagacgtcttgttacagaagtttctgtttatatctttcataagcctgatgaaagttgcatgattctaaccctgcagtgtcacgtcctcaaattacacggacaaaagcagcggctaacaaagcaagggcaagcaaagcaaagcaaagcaaaagcaaagcaagagcaaaagcagaagcagaagaaaagcaaacaaatcgatagatcaatgtgtagctctgttgccaataatgtttattttttgtacactcgcctggcgttgtgtgttttcattgcagtttcagtgtccaaaaacgatcgatgttgcggctgtgtttgcccaagaaattaccaaaggagatgacagtttttttttttttttttccaacgaccggaaactgtgatcgtttttgggccatttggcagtttttcgggccaacggcgctagggaattggatttgtttatttaggccctatcatcgtggacacctaaacaaatagacgaggtaccaacgctccgtctttattcacccgaaaattgagttgtacaatttgccgtcatcgtgatcatctggctgacgctagaaattagcgcaaattatgctcgcctaatgccttgagcaaacttcagttacttcggcattttattttctatccaatatcctgaaggggtgacttgtcataccccgcaaatacgttcggcaaatacggcaatttatatcgcgccgttatcctttgagggggaaaattcagggacttctcggtaacggaactgccagtctatttgcattggatgaaagtcatcaaatctgtgcgctccatatgcgtacatggccatggtagcaaccaccaccaccccctcatatcctggctatatgtaatatgtctatccttctcaacaatctgttacgagctgttgtaatttgtttgttttatggatttccttcgacgtccgccgccgcatttgtcggcatttttcgagggcatttcgcctaattaaaccaactatacaagtgtatctgtgcgagtttttgtgggttcacaaaaagctcacatgtgctggtaatcgtaatcgcaatgggcgtgtgcccaagtcactgaggctttcgaagtcaaaaaaaaaaaaaacgagttagcaggtcagcgcaagtgtttgtatttgcgttttggggcggagaaaaagttaaaggaaatgcgataccggcagtgaaattaactcaatttatgggggggaaatttggaaagaagattgggaagtaattcctagcaagttagtactctggatggcacatctttcataggaaaatatgtaaaaaactgatttcaattaaatgctctaatcaaggaaactagcttgtactatttactgaaaacctcacatgatccttgcttaaataactcactttcttttctgtcaagtttcaatatcgatagcattataggttgccaagttatgattgtatgcttacctgtactctagattcgggcagattgatcttgagcgccacttcttcgcgcatgaatatgtccggataacgggtcttgccaaatagcgcttccagaacatccaattgggcgcgtgtgaatgtggtgcgttcgcgacgctgttttcgtgtgttgacgcctggatagcatagatcgcataaaggggagaaacgaaaaaggatacaaattataagttataaagttcacaagccgaaacgagtgcctaaccgaatgtgctgaaagttcttcatcgcgggaaagttacgtatacgccatggatgtcgtgacttttcccagtaatattttcgacagtaaccgttattttgctgccccttgtgcctgtgtgtgtgtgtgtgctaccactacacttttatgtgtgtgatgtggctgtatagcaacccccgaaaaatgtgacggccaacccctaaaagaataaaaaggactggcaaaggaaccaacccccgtgcagcagccgccccaaagaaacgactcccttttttccagtacataatgtttatatatgtaaggcgtatatagtcattgcgtgcgtgtgtgtgtgagagttcgtgcgtgcgtgtgtgtgcgtactaagccgccgcattgtttgccctgtcagctctctctctctctctctctctatcgctcaccctcgatgatggctcgaaaagtccaaaaaaaaaaacccgaaacatcaagatcgagactttgccatcggcccactccctatatttatacttctttttgtcccaaatacaccccgaccatgcgaccatgccgactatacgactgtatggccctccctttctggctctatcaaaaattaatgagttagtcattttggtcatgaatttataaattgaataaaaaacttcacttcactttgcagctgccgcatttcgtttgcgtttacgtttacgtttcagtgtctgtttcagtttcagtttcgttttcgctttcaaaatggttgccaacttggtttatttctttatatccacacaattaattgcaatttgtgtctgtctgccgttttttttttttaatatttttgggatacttaatattatgattttttgccttggctttatggagagagcgcgttcgtttaattaactgcacctataaattgttgacttctttcaaataatattttttttatggctaatttatgggatttcttggaaggtctcgcagctttttgatcgaacaaaatagctcaaggtttgtctaactaagatttcagaatttcagattgttaaagaagtgctcattttttgttatattttttttatcaccgtaagttgtctgatacttgttttctttttctccgccattaatgtttttcttcattatggcctctttcatcatattatatcttcattgtcaatacaactggcttatgtaacaagttaaaattctgtcaattacttggcttattacagcagtaaaggcaacgcaaggcaaaactacacaaattgattacgagtatgaaatggttgttttctttttataatttttcttttttttttttcttcttgtatgatttttagtcttttctttttgtagccgttcaataattttgtgtgtgccgcttggacagagagtcttttgttggcattttgtagccaattttttgtgatttttgtcaggtttttgtttgtcatttgcagcgtcaccgagggaagcgaaaaaaaaaactggaaccgaaaagctgaatctaaagctgaaaacttgaagataaagtcgccgcgaagaccgaagactacggagacttcgaaaactgcccgaagctcattattcattttgacaatttaactgataatgatgcaatatcgatgcgaactgacattgaaagccagcaaaacgaagaggaagccgaactatgcagtggcaaaaaaaaaaaaaacgcaacatacgaaaattccccatattccatctgtgttatgtttttttttaactttaactttcgaacgatacgcatgtcactggcattttgttctgccaaactttcagcacatttgagcgatctgatttgcttacgtgctgcacaattatgtttgtgcatataccaaaattgttgttgcgatatttaccccacataccttgggagaacccgacggcctccagtccgtgtgggaggccgaagggccccagcgatggcatgggcatgccgggcggcaggggtccgtgcggcaccgaatgatgcggatgcggacccccgtaactgtgcggatgggggcccaaatcgcccgatttgaggaagcccgccgccattaaggcctcggtcgagtgcagcgccacgttgaagctgtgtgtctccactggcctcaggcttctataatccgtatccgtatccgtatctgtatctgtagctgaagctggagctggagctggaactggctggatctatccaccaggtcactcacgtattccgatcgatagtcaagtagagcgataatcgctggttagtgcgctctaggtcctttcagtaggatctgtaagatggtataagttattagctattattagtgatttaacaaagtaatagtatcgagagaatacagcttgttgaattttataatgaacaatgtcacctatgctactgtagaacacataagattctttatcggtttagttgcgataagataggaaaatgcagtgcaagcaattatgagtcggtgagttaggaaaatctgtgcgaaaaccacttgatgccaacaaatcactcacaattcgccaattatctgtgaaattcactatttgctattccgccaagactctgtatgggataagatgcttgtttgtggtgggctaagctcttgccacgagttccaattacattctaagatcgagaccaaacagaaccgggacttatatggcaggtctaggtcttgatctatgtggctgtctgtgccaccatctctgtctgccgcctattaccatctctgtcgcgccctcacgcgctctatcgcccactcacgatcgttccttgcggtttaatcccgacgtttgcctatgatgtaaaatcttctaatctgggcagcgcacacagaatccgaggaagattacccaaccgcctccaaaacggggacccgaatcccgagatttcgagatcccgagtagcgagatcccgaatcccaaaacccgaacaccgatacgaagtcgcattcgggcttatcttgcggtttaaagatctttgatctgcgcttagccgcaggattatttcagacacttactaacacacacgatgaatatctacggggaggagacggactgatccaggacaatgggcattaagattaagcccagaaagagacaactagcctggattaaattccctttgtcctgttcttcactactctcgtcggttttcgtgcgaaaaaaattagcactatttggacggggaaagtagggaaagaaagtccaaatagtttcaaaaaaaaaaagagaaggttgtaattgcggaattagcacgaacacctctcgcattgttttgaaattgaataccgcacatggaatacggaaaacggaactatttgtcacatcaagagagaaagatatccacatacgatgagtgtatgtaaaatttgttttgttttgtcatgtcgttttcatggctcaatgcattttggcctcaaaatgcagccgcaaatacatcgagatcccgagatgcgaaaaacaaaaagcaccgaaacagaaacagaaacccaaccgaacccgaccctgatatagcacccgatccccgatccccgatgtgcgttgacagacccggagcctgttcctcctgcccttcgaattgccaaattacatgctcacgcgcacacgcaaattaataacacatctggcttcaattcgagattcggcagggcagcgataaaagaaaaaaaaaaagaacacagcgaaagagacagcgagagatgtgctctataaaggattcgcccttaaccatccaccaaaatgcccgtttcggttcgctgcccatctcgggaatccaactaaacggaagctgatcgaaaccaaagccataattgatagttgcattaagttgattaaagtaataattaaataatagtaatagcattatgattatatgcacaacaggttgtgataccagaatataaaaaaaaagttagctaatcgcaactattgagctattaacaagaaataaaaaggtgagcttaaataaccaaactaatcacgtttgagttttaagcgaactctttttcttatttaccccatcccattaaagttcccatggctcttatttaaccaacaacttccattaaccaaaattttacaaacgatcgaagaaggtagaaatgtgaaatgtagctccaaaaaagaaaaaagaaaaaacctcgtcgtcaaactctcagcatctgtcaaaaaaaaaaaccgaatgtgacacattttcgaaaacatcccggcaaagaaatgggttggaatatggaatgaaatggcgatctacggcactacgtgattttctagacatttcacagccccctttggccttccgccctcgctgattatgaaaaatcatggtaaatggcaaaaagagcaaaataaaaaataaaaaaaaaagaaaacaagaaggccccgctggcacttttttcattttttttttttttttttgaagagatccattgtgaggccgaaacgagtcgagacaaaatcatttgggctggacatatatcacgtacgaacggcggacactttcattataaattccattcggcattttcatgattttcggttcggtacgatcttctgatttgctccattctcagcgaatgtttttcaattttcactctcgatttctatatctactcccatttccgccgcctcacaaacatttcaattcgtttgtccgcgcgtaattacggtcaaaataatatttattggacaaacagccgggaggaaaacaaaataaagcccagagattcagcgatgctaccgtaagattttgggggtttttagagattttctagagtgctgtaatggagagatggggggggatggggggtactgaaccctttataagcccgcacatccaagtgttttggttcgctgatgatccgactgacggtccctgggaaagtcgaagagttcaagattcgaatagaaatcgaactgccacttggctactgttcatttgggccatgggaattgtggatctccacgccgtttgcccgtttgattaatggtccgtctttgcataactttcggtctacgcatttggctctgactaatatgaaatattaaatgccgtctcggcgatcgcatatttatatctatatttaaatttagtcagtcgggcatacagcggtgtgcagctgtcaggagtgctaacctgtcagtcgccggatcgcagttagtattagtagtagtagtaatcgctgctagtttctggtagtcgctgctattagccgccttaacaagcatcgcaacaacttaatgtgcccgggcatattgcacattttcctactgcacactggttagcggtcaggtgaaatgcaattcaattgttttggagtgccatttcagttgatcaagcaaaatcaattttatttaccatcgctatctgaaaacgatcaaatctaaaggttctcttataacaacatagtaatattgttaaacttggctttcttttgcaatcagcaattggaatcggtagtgtatcgctttggaaaaccatcttaggatgcacaaatcgcattagtaagcccaagtttctagccagtgttagctagtcacatatattcgtctatatggataacgcgttatggcagcgaaagagatggaggcatacaaaccgaaagaggtggcagatgaaaaatgcatttctcaggctcatttacattgagccgcggctactggaatatgctatatacatatgtatgtatgtacatacatatatgcggcataaaacccaaactcaaacttaaaactagacggtccgaagacccaaagtccgagttcgagtctcagtctaagagtctgagtttctgtttctggtctagcataataagcctgtctgcctgtctgtctgtctctgtggcaataatgcaacttaataaatgcaacaaagaacgcgaagcagaagtggtgcccccaagtatgaggtataaagtataaagtataaagtagccactgcaccagtcacgtcccaaaaaaaagaaaaagaaaaataaaacgaagagatgaaaacgggtaggaaaactcggagctagtcgcgctgccatttctacgcaaatgcattttgacatttaaatttgcaattttcgcataaaattatatttatttattccagctggctttggtgaaaagtgcaaccttgctgccgctggaggatcggatcgcgattatgatgatgatgagatgtggatgtggattccagctactgacttttgactttgacgttgacgttggctgaagtttaattaagcaacgtgccaaataattgaaaaagtgtgaagatttgacaagtttaagaggcattaaaatctagcctccgactatgaacactcacagttgcaatatatgtacatatgtatgtacatatggcctagaaatcaaacgactaactgtttgcggcgctgcgacaacttttccacttggccacattttttaattagtttctgtattttcgcttatcgcacggcaaattatttattatttacctaatcgaattgacacatgagcagacgtcggtgtaattaacagatacgaggcagattgctcaatcatagtaatctatcgtctatagatttaagcataatccccacgacttgtccaagtaaaacgtactccctatcaacgagaattgcgatatatgatggatatactcgactatgctaacaaattgctgcttttaattgctttcccattaagttaacaattagcgattcgatatggttatcacatataaacgagtgagttaaacgaattgcaattgtataagcaagaagtttttatatttccatatgatgtaaagtgctctcaaacagaatatacctatattcctagatctacctgttcattcacaagccacttttttgacacacaaaacccaataaatttccataaaattgcttttaattcaataaatttctggctttacatcattttctctgcctcttcccacaaatccattcacacaaaaaaaaaaccaaccaaaaaataacagaaaaaaaaatgttgaatgaattgcgcttgttgttttggttattgttgttgccttgtacaaatgattgcatcatggacagtggaccaaaaatacaaaaaaaaaatatattgtacatatcaataatagactaatagagtaaagagctccagtcgaatcgcagcacaaacaaaaacagcaagaaaaacaacgacagcggctagaaaaacttattatttgacgcattgtcaatgtgatcttgataagtcgaaactggaaatggaacctgaagactgaaaactgaaaactgaaaaaaaaaataaacctccgtctgagtgatttctatttaaatggctttgtcaacgaaatttgagaagcgaatagcaacaacaccgccagtatcgcgtaatgagcaaagagtgaagagagataaaaattaataatacaaataattggtaggcaaaaaaaaaaattgggagaaaaaaagtcagtaagtgcgtccaagtccaagaaacgctggatgaaatgaaataaactgaaacgaaatgaaacctcacttaaggcgaggcgacgccacaagagattgacaaaagatgacgacaaaacaaaaaaaaaaaaaaggcaacacccgatctcccaggtacgagcatatatatccatacccatgccaagtgtgtgggagttcgagttgatcgcaaccaaaccgatccgaaagatttggggcgtgctagggaagcggaacaatggataccgtttcacagtgagcgaaaatatgcccacatattaaaatataactcaaaaaccactatggaataggctagaactactagtattgttcaatacttaatcaatagtacaaaatatggaatgctaacatattgataaatactattagttgtaatatctatcacatcatgtcccacaagcatatcgaaccaacgtacttccaatgaattcttgatctaatgtttagctatgccattgctatgtgaatctacaacttcgagtactttttttttcagtgcttcctagagcgaaattcacttattcgctgagctttatggatatccgcgataaggtatcaaatgtgtcgcgacgcgatctcggcgactttcaattcacaatcgacaacgctgggcggatgttgtgaatgaatgaattggcattggaagattggtacattgaggtattgtgatactatggggatctaggcagggccagcaagcacaagcgtgggtgggaccgaatagatcccaagagatccccaccagcttcaccagctacaccaactgcacgaactccgtatccgaatctgaagccgaatccgaatcccattctcaacactttgattcgaatggagaaagactatcggaatgggagaaaaatgaatcgacttgcatatttaatattcagttgctttatgttagaaaaccatatgcaaattaataataaagcagaacaacaaagtagccagcgaggagtcaacgtattattcagatattttaatttatagccgccgctttgaaattagacgatccgatcgctaacatcgggaagtgggaatgtggtgatgtggggatgttgggaatatgtgtgaataatgtgacccgaacgggtccgtcggctgtcttctattgtatctagtattgattttcttggggtttcttcgccgttggccctatcattttgttagccttttttctatatcacatttctcgtatcgatttggtcggctcttgctggcttctttttgttttgcctaattaggggaggcggccttaatatgcccattaaaattatgaaaatcataacgaatctccgaaacgcgcattttctcacattacgatcagcacattagtcataggcggaaatttcctgaccgaaaccagatttttaaaaaaaaggctccatcatatcacgaagagctgaaggaactgaaacaaagtttcgggcatggaataggtaactctattgttggacttgggagtccccgaaatcaatgaatagtattccaattaaagacttctaagatccattgaatctgaagctaaataaagactagtatatgtggcaaaataatatcggttgattatagcatttggaagaacattttaaccttgtaaatatatgtagaagtgtaagtgaaaaacaaaagatctgtcaagttcggctaatcgaaaatagtgaaccaaacatattataacatatctctaaagtctgagctttataatgaagaatgaagattggctcaagaataaagttgaagcgataacgaaaaagaaaataattaagctttacagcgtgttagatctttcaatattattccaagtttaaagagtgtatttcaaatatgtcatagataatgtaagacttgtgacctaatatctctgctaaataaacaagttgataagagtaatccctaagatagattcccgctcccccaaaaactacttaggtctacagattccccatgtaatccgtgcttatctctcggctccacattccttgctggatatatagattgctaccgatttctcgatatcggcggatcgcactcaccgaaaaaaaaacacaaacaaaactagaagcaaaacggtgctgtattccaatggtgacttgttttcggatccaactactatatggttatggcatgagtatattttacacatgcatatatataaagatatatatgtatatttatatatatataaatattgtattccagagatgtatgttttttgggcgatgtttatggtttagcactggcaacacggtaaaaaaacagattctcgtcacttggcactgcgttatatccaaaaggatatatctctctgtattacttagtattctcctctggggctctttgtttctctatagctgtgttagctatagcttctcgtgttgatatttgtttatttgtgtttgattggtttagtttgcttcgatttgatttgattcggtttggcgacggcgaattgattgttgttattggcttgcgctggtgcttgcttgcttatcggcgaacgcggcgagtggcgagagcgatcgaacgagcggcgaacggggcgaatgagcaactgagcaactgggcgacggacgacgcacaaaaacaacccgagcggcacgaaagttactctggaaatgaattgcggtacaccttccacggacgatggcagcggcggcagcagcgcagcgagcagcgggcagagcaaaagtcgttcgaccagagtctgcgaaaaaagaaaaacaacaagaaaaaatgttggaagaagaagcaggaaaaaaacaacaaacaaacaccagcggtggtggaaacgagagggagagcgagtgagtgcctgcttttagcaatggctgcccggctctctaccgcgcgccagagtgagatagccgtagtttcgctccgttccagtcgttcagtatttcgctctctctctctctctcactctcttgcggcatctctctcgcacgccgcttacaacctgactgagtgggagcgagacaactgctggtggtaccgtttgctgagcagctgtatttaccgctgtgttgttgctgctgcgcgtgtgtgtgcgcgcgtgtatgagcgtgtgtgtacgttgctggtgtgcgtttgagtgtgggaccacaccccaaaaaaattcagttcaacaactttgttgttgccacaagagcaaaaaacgaggagcaaaaaatacatagtcataaaaggaggaaaaaaaagcaacaacgtaccttcgtatttttgcgcggcagcaatgaaattttaatgaaaacgacaagacagcgaaaacaacgcaaaaatttgttagctaacagcgaaagataaggaaacgggggtaggtggcgacgggcgtttaaaggacgctggtcagtaccgctacttttgctactgctgctgctactgctgctactgcttcttctttagcttcctcctcttctacttctgcgtcgcaaattgccatgcacacacaacaccagcggcgaaagcgcgacagggatggggagagccagccactcacacttggcacgccccctctctttcgccccaatgggcggcccccattgttcaattatcatttacgcaaagtgaggcgaaaagaatcgaaacttaag

SEQ ID NO: 4367 - DNA, 3755 bp, DROSOPHILA
gggttgtttttgtgcgtcgtccgtcgcccagttgctcagttgctcattcgccccgttcgccgctcgttcgatcgctctcgccactcgccgcgttcgccgataagcaagcaagcaccagcgcaagccaataacaacaatcaattcgccgtcgccaaaccgaatcaaatcaaatcgaagcaaactaaaccaatcaaacacaaataaacaaatatcaacacgagaagctatagctaacacagctatagagaaacaaagagccccagaggagaatactaagtaatacagagagatatatccttttggatataacgcagtgccaagtgacgagaatctgtttttttaccgtgttgccagtgctaaaccataaacatcgcccaaaaaacatacatctctggaatacaatatttatatatatataaatatacatatatatctttatatatatgcatgtgtaaaatatactcatgccataaccatatagtagttggatccgaaaacaagtcaccattggaatacagcaccgttttgcttctagttttgtttgtgtttttttttcgatcctactgaaaggacctagagcgcactaaccagcgattatcgctctacttgactatcgatcggaatacgtgagtgacctggtggatagatccagccagttccagctccagctccagcttcagctacagatacagatacggatacggatacggattatagaagcctgaggccagtggagacacacagcttcaacgtggcgctgcactcgaccgaggccttaatggcggcgggcttcctcaaatcgggcgatttgggcccccatccgcacagttacgggggtccgcatccgcatcattcggtgccgcacggacccctgccgcccggcatgcccatgccatcgctggggcccttcggcctcccacacggactggaggccgtcgggttctcccaaggtatgtggggcgatctatgctatccaggcgtcaacacacgaaaacagcgtcgcgaacgcaccacattcacacgcgcccaattggatgttctggaagcgctatttggcaagacccgttatccggacatattcatgcgcgaagaagtggcgctcaagatcaatctgcccgaatctagagtacaggtgtggttcaagaatcgccgcgccaagtgccgccaacagttgcagcagcagcagcagtcgaatagcttgagcagctcgaagaatgccagcggtggcggcagcggcaacagctgcagcagctcctcggccaacagtcgcagcaatagcaataataacggcagcagcagcaacaacaacacacagagctccggcggcaataacagcaacaagtcgtcgcaaaagcagggcaactcacagtccagccagcagggcggtggctcctccggtggcaataatagcaacaacaattcggcagcagcggcagccagtgcagcggcagcggtggcagcggcccaatcgattaagacgcaccacagttcctttttgagcgccgcagcggcggcagcatcgggcggtacaaatcagtcggccaacaataatagcaacaacaacaaccaaggcaactcaacgccgaacagcagcagcagcggcggcggcggcggtagccaagcgggcggacacctatccgcggcagcagcagcggctgccctaaacgtgaccgccgcccatcagaactcctcgccactgctgcccacgccggccacgtccgtcagtccggtgagcatcgtttgcaaaaaggagcacttgtccggcggctatggatccagtgtgggtggcggcggcggcggcggtggcgcctcatccggcggcctcaatttgggcgtcggcgtcggcgttggcgttggcgtcggtgtgggcgtatcgcaggatctgcttcgctcgccctatgatcagctaaaggatgccggtggtgatattggtgccggagtgcatcatcatcacagcatctatggctcggccgccggcagcaatccgcgcctgctgcagccgggtggcaatatcacaccgatggacagcagcagcagcatcaccacaccatcgccgcccattacacccatgtcgccgcaatcggcggccgcagcggcccatgccgcccaatcggcccagtccgcccaccattctgccgcccattcggccgcctatatgtccaatcatgattcgtataacttctggcacaatcagtaccagcaatatccgaataactatgcccaggcgcccagctactactcacagatggagtactttagcaatcagaatcaggtcaactacaacatgggccattcgggctacacggcctccaattttggtctgtcgccatcgccatccttcacgggcaccgtgtccgcgcaggccttctcccagaacagcctggattacatgtcgccgcaggataagtacgcgaatatggtgtagaatctactcttccaatactgcagcggtggcagcaacaacaacagttcagcgggggcaagtggttcgggttcgggttcgggttcgggttcgggttcgggttcgggttctggttgtggatctggttctggttctggttctggttctggatcggggagcaatagttctccccagctggagcagcaccatcatcagcagcaccagcaccagctacagcagcatcagcatcaccagaatcatcaccagaatcaacaccagaatcaccacggccatcatcatcatcagcagcaacaccatcatgatgatgaacagcgacaggatatagggcatcaaggagatcagcagcaactggatcatacgttcggttaagattgatatagcgagtatagagccacatggatacatatctacagcccacatagatacagcccccgacactccgctgcattctcagaacaaattcgaagacacaccgaccgtagatacacttcctttgcgatcgtatttgttggaaataggaaattcaagttctcattgatttcgaaagactcttcttgactcgtataaattcagagtgatagatatatagatttctcacattattgattgttagattaattattaaatttcatattgaggcatttagatttcaatatcaatatcgtacatggttatttatagattcaagaaaattcttttaagtctcaaactttcgaacatccaatttagcaatgccaactatgatcgcgaaatggaatgcaccgcgttggaggtctatttccattctttttttttttttttttgtgtagttaacaagaatttttttttaaatatatatatatatatatgtattagaagcgtgtgtaaaaagcggggggagttacaagtttatacagcccaaacataaacgtaaatctataactaaacataggtattataggcctagcttaagccgccaggatcaacgaagtaaatgagtgataaatcaaggaaaaaaaaccgatgacaaacatttgttaaaatccagagagtaaatgcatgcgaggattgcgaaaagtggggcgttaattgtaagttggcaggagagtttttaaatgcaatacgtagaccattacgtggtacagccaggggggcgttgggtggcaatcaacccaaaaaaaaaaacgtatggggacatttggggatcgccagtaagaggagaacagagctgcaccaccaacaccaccaccaccatagaactggtggtttggaccagctcagcatatcataaagctaaaacttaattccaatttcaagttctttaaaccaaactaagacataacattatgaaaac

SEQ ID NO: 4368 - protein, 548 aa, DROSOPHILA
MAAGFLKSGDLGPHPHSYGGPHPHHSVPHGPLPPGMPMPSLGPFGLPHGLEAVGFSQGMWGDLCYPGVNTRKQRRERTTFTRAQLDVLEALFGKTRYPDIFMREEVALKINLPESRVQVWFKNRRAKCRQQLQQQQQSNSLSSSKNASGGGSGNSCSSSSANSRSNSNNNGSSSNNNTQSSGGNNSNKSSQKQGNSQSSQQGGGSSGGNNSNNNSAAAAASAAAAVAAAQSIKTHHSSFLSAAAAAASGGTNQSANNNSNNNNQGNSTPNSSSSGGGGGSQAGGHLSAAAAAAALNVTAAHQNSSPLLPTPATSVSPVSIVCKKEHLSGGYGSSVGGGGGGGGASSGGLNLGVGVGVGVGVGVGVSQDLLRSPYDQLKDAGGDIGAGVHHHHSIYGSAAGSNPRLLQPGGNITPMDSSSSITTPSPPITPMSPQSAAAAAHAAQSAQSAHHSAAHSAAYMSNHDSYNFWHNQYQQYPNNYAQAPSYYSQMEYFSNQNQVNYNMGHSGYTASNFGLSPSPSFTGTVSAQAFSQNSLDYMSPQDKYANMV

SEQ ID NO: 4369 - DNA, 4050 bp, DROSOPHILA
tattattttttttttttggtaaaatataatcattgttttaccgattgcgataaatatagttgtccaaatgtagaatgtcatacctcgttgaattcgttacaaaattccctatcgatctgtgtttcaagttcgaaattaaaattttttgctttttttcgcaaatttagatgaaatgtgaaaattggtcaaaatttttatttttgggaatcataaaaatagtgatagggatagttagctatgcttattggcagtgcaaaacagtctttatttcagcggtgatatattttttgaccaagttatggagaaaaccccgcatgtaaatatccgttttttgggaaattttattttttgctaaaaaataatctgtattttctcaatagcaataaaaataattgtccaaatgtggaatgtcatacctcgttgaatttgtaataaaatttcctatcgacctgtattcaaagttggaaactcaaattttttgccatttttcgcaaatttagatgatggtacccctgatcgaaaatgcgaaaatttgttaaaaaattttatttttgggaatcataaaaatagtagtaaaaataaatagctatacttaatggcagtacaaaacagtttttattttagctgtgccaccttttttggccaagttatggggtgaaatcccgttgcattatatcacatttagacgtcatatttattttgttcttttgttaataaataatcagtatttcttcgatgggaatacaaatacttgtgcaaaagtggaatatcatcatacatcgttgaattcgtaattttttgttgtaatttattgatgtacatttttcgccaatttcccgtttcacattacaaatagtttattttttcattaggcaagaagtttacggagcttgtagacattatagaaatgttaaaatattatattaatgataataatgtcaaatgattggtatttggtgtcattggccttctgccgatctgcgccagctcgattaattggttaatccagtgactctgcagcgtcctcctcttcctgccaagatgtcaagctgaacgggttgcaatgtacacgaccatatgtatatatgtccattgccaacgagctaaatatgtcatatacattccttccacttttggcggaaacctcttcaaagcagattgactgacgatgggcatagttgaacccctgcgccatgctcacctggcgatggttcggatcatcacttttgttgcccaccagcaggacggttaccttatccggacacaggcgccgtatctccttcatccagccatcgatgttttggaaacttttggacgacgttatgtcgtagacgagcagtatgccatgggcactgcgacattgggtcgccttcagcaatttgaagcgctcgtcgtcggaggtgtcccagacttgcagcatcctccccatcctccaatcggcaaactccacgctgcactcccttctatccaagcccacagtgctccggtgtcttgtggtgaattggttatccgagaaacgcatcagcaggcaggttttgcctacgccgctgtcacccaggatgataatcttaaacggattgtcgtattggctcatcgttaattcggtttggtttaatatgtataacgattcgactgaagtgacaattttagcttggcttgttctgggtttttgttttttctgggacagaatgtttcaacacaatgtttcaaagtagtctacttttaaataggtccatcaattgcgattggaacattatttttaaattgatatagtagttacaagttatggagaaaaccctgtttgtaagtatccgatttttggcacaatttgtattatgttattttttttggtaaagaacaatcagtattttctcaatagcaatgaaaataattgtccaaatgtggaatgtcatacgtcgttgaattcgtaacaaaattccctatagacctgtattcaaagttggaaattctaattttttgccatttttcgcaaatttagatgatgggtaccccttatcaaaaatgtaaaaatttgttaaaattttttttttggaatcataaaaatagtgatagggatggttagttatgcttattggcagtacaaaacagtctttattttagctgtgcaaccttttttggccaagttgtgggtatcagcaattcttcgatggcaataaaaatacttgtgcaaaagtggaacatcatcatacatcgttgaaatcgtaacaaaatacgcattcaaactgggaaagttttatttatgttaatttttcgcaaatttcccgtttcacattacaaatgttttattttttcattgggcaagaagtttacggagcttgttgtgcaagtatagaaattttaaaatattatttttatgataataatgtcaaatgaagtcgagatgcttaacagcaggtattgctgtctttggccctctgccgatctttgccagctaaattgattggttcatccggtggctctgcagtgtcctccgtttcttgcccacctgacaagcgatttggggtatgaatcacaagacgattgtatatgccaactgacaacatgttgaatacgtcatttacattcgcgccactcttggcggaaacctcataaaagccgagtgcccgatgattggcatagttgaaaccctgctccatgcgcacctgacgattatccagatcatcacacttgttgcccaccagcatgacgttcacactttccgaagacatgcgccgtatctccttcagccagccatcgatgtttcggaaacttttggacgacgttatgtcgtaaacgagcagtatgccatgggcaccgcgataataggatggcagcagcgacttaaagcgctcatcgccggcggtatcccagatctgcagcataaccatccgaccggccaactccacgttgcgcaccctgaaatccatgcccaccgtgcacacgtgtttctcggtgaatcggttatccgagaaacgcatcagcaggcaggatttgcccacgccgatgtcacccaggacgagaatcttaaacagatagtcgtattggctcatcgttaattcggtttggtttaatatgtaaaacgattcaactgaagtgacaaatttagcttggcttgtttctgttttttctgagaaagaatgtttcaataaaacgtttcaaagtaaaaataattatagggatagttagctatgtttattagcagcacaaaacagtcttcatttcagcggtgataacgtttttagctaagttatggagaaatccgatttttggccatgtttttattttgttgttttcttttggtaaaaaataatcagtattttctcaatagcaataaaaataattgtccaaaagtggaatgtcatacctcgttgaattcgcaacaaaattccccatcgaactgtattcatagttggaaattcaaattttttgtcataattcgcaaattttaatgatggtaccccttatcaaaaatgtgaaaatttgttaaaatttttttttttctaatattcgcccgatagtgatagggatagttagtcctgttgattagctgctgaaaatagtccttaattttgctgtgcgacgttttttactcaagttgtgatgaaaactccgctcgtaaatgtcgcgttatggcaataccatgttcccctgattttccgtccaaaaataaatcaattgtagtcgtcttagtcagtgtgtccttggtcttgtatctttgctatagaaacattgatatatcggaggcctgtttcttggaagctacctggtttggttttcttttcggcgccttgaagctcagtgggtctcagtggctccagcgagattccagcgccatataagcaccatctgcgcatggttgatattcatagttggcgcacgtccatcactcgtatggagcttcaggtgtagtgcttacttttcttttctcttttcgtttgactcttgcaacgggtatgcacttttcgccaatcaaagttgaatgagatgttggtaaagagttttcaaatttcattattaatatttgatgaaatcattaattacgcttatcag

SEQ ID NO: 4370 - DNA, 1104 bp, DROSOPHILA
atgagccaatacgactatctgtttaagattctcgtcctgggtgacatcggcgtgggcaaatcctgcctgctgatgcgtttctcggataaccgattcaccgagaaacacgtgtgcacggtgggcatggatttcagggtgcgcaacgtggagttggccggtcggatggttatgctgcagatctgggataccgccggcgatgagcgctttaagtcgctgctgccatcctattatcgcggtgcccatggcatactgctcgtttacgacataacgtcgtccaaaagtttccgaaacatcgatggctggctgaaggagatacggcgcatgtcttcggaaagtgtgaacgtcatgctggtgggcaacaagtgtgatgatctggataatcgtcaggtgcgcatggagcagggtttcaactatgccaatcatcgggcactcggcttttatgaggtttccgccaagagtggcgcgaatgtaaatgacgtattcaacatgttgtcagttggcatatacaatcgtcttcaatacgacaatccgtttaagattatcatcctgggtgacagcggcgtaggcaaaacctgcctgctgatgcgtttctcggataaccaattcaccacaagacaccggagcactgtgggcttggatagaagggagtgcagcgtggagtttgccgattggaggatggggaggatgctgcaagtctgggacacctccgacgacgagcgcttcaaattgctgaaggcgacccaatgtcgcagtgcccatggcatactgctcgtctacgacataacgtcgtccaaaagtttccaaaacatcgatggctggatgaaggagatacggcgcctgtgtccggataaggtaaccgtcctgctggtgggcaacaaaagtgatgatccgaaccatcgccaggtgagcatggcgcaggggttcaactatgcccatcgtcagtcaatctgctttgaagaggtttccgccaaaagtggaaggaatgtatatgacatatttagctcgttggcaatggacatatatacatatggtcgtgtacattgcaacccgttcagcttgacatcttggcaggaagaggaggacgctgcagagtcactggattaa

SEQ ID NO: 4371 - protein, 367 aa, DROSOPHILA
MSQYDYLFKILVLGDIGVGKSCLLMRFSDNRFTEKHVCTVGMDFRVRNVELAGRMVMLQIWDTAGDERFKSLLPSYYRGAHGILLVYDITSSKSFRNIDGWLKEIRRMSSESVNVMLVGNKCDDLDNRQVRMEQGFNYANHRALGFYEVSAKSGANVNDVFNMLSVGIYNRLQYDNPFKIIILGDSGVGKTCLLMRFSDNQFTTRHRSTVGLDRRECSVEFADWRMGRMLQVWDTSDDERFKLLKATQCRSAHGILLVYDITSSKSFQNIDGWMKEIRRLCPDKVTVLLVGNKSDDPNHRQVSMAQGFNYAHRQSICFEEVSAKSGRNVYDIFSSLAMDIYTYGRVHCNPFSLTSWQEEEDAAESLD

SEQ ID NO: 4372 - DNA, 5868 bp, DROSOPHILA
atcaaacaatagtatccattaacttgtatacatgcaccaatcatgttctttcttaagagtcttagaataattagcacataatacgaattattagtttttagtagacaataagaagcattagttttactttttggattaaaagacatgcttcaatgcaaatccgccacataggttttcattttacttgcacatcgaatagcaacaacactgaaatgcaatggcaacttgacagcaacaactttcagccccacaacaacaacagctgcaacagcgattccaacaaacatatgctttgagaaaaaaaaaaacaaatatgtaccaagagagacagccagactcaccaacacactcgcacgcggacacacctccccaaataacaaaacagctgatttgttatcagcagttgctgaatgagccccacagagcgagccactctcttgcagcaacaacaaaatggggggaaaaaaacgacgccaacggcggctgctatggcaacgaccttccttatttattacaatgtgtgtaattcccagccgttttctcactctctctcgctctctcgctgtgtgtgtgcgagcgagacagtgccctttcctgacttaaattgcccattttttagtacagaaatgtttaatatcgctgtctgtttgagtttttgcaatttgttttccttttttggtctgcagaaagtctctcagtgcgcagtttagctttcgtattccaaaaccggagaggttcttggggtatttgttgtattcttatattaaggaactacgtaggtgtgttcgaagttgcgtcgcagaggatttttaggcagttgtgtggagatcacactgcttatgttgatattatatgggttttaagttttaggggtgtaccaaagtgctcagaaatacataagtaaaaataacccattcccattttaaccaggtgatgctgatagattcattcaactccccgtttttagtgcggctcaattagctctcaactcgccgttaacccctttagaacccatctgcttttacgaccccataaagctgctcccaaaaatgcgtttgccgtaaaaaattaaagcactaaaacggttaaagacatcgtattacaaaataatgtgcgctctctcgctcttttctcgcctctttgtctctctctgtctcgaccaaagcagttgtaaagatggccgccgtgtagtaacatggctgaatgtataccacacacacacacgcaggcacagagagagcggtcacagagagggagagagagcggccattgaatgcaatttatataggaaagcaacaataacaataactctgcgctcgtctcctgcgactgtgtgtgtgctgaatacgtcacggaacatcagctgtgccgaacagcaggtaggcgtcggcagaatggagcgaagacgacgtttcgagtcagtcgcttcaaagagctcgattcgtgcggacataggaggagataaagcgtggtctgtggcacgtaattaacgaagaagagagttaagaagattcaacgtcgcgtcgaaggtgaacacgcagttaaaacccaaaaacaaacgcaacgcagccaattgtgatacgaaaaataagtaaatcggcagacaatcaacaaaaacaataaaagcaaagcctacacacaggcgtaggcgtctagccaacagctgtttttcgtgcgcgctccgtattcagcatactcgctgcgcttacaaacgtcggcagagaccgcggcagagaagcaagcggcggcagcaaaactacaaagcagaaactacaattcagatcgcgtttttcttcggagtggatgagacgttcgttcggcagttctattgcgcatagaactaacaagttacctactccgcgaactcacccccgcgagaaaagaacagaacagagcataaccgaatggaaagaagacaaggagtagctaaaaagcaacggttaagttagccagcaaaaacgggcaaaaagactgaaaacacacgtggattgttcactcaccccgacacgcgcacccactcgcactcacactcacccagcagctccaactgttcgctgcatttatgtaaaaccaaacaaagactgactaaaacgctaataaatatacaataaacgtaacgaaacaaagttaaacacgcgaacagcagctaatattatacgggttaaagcgaattccaaagcaaagcaaacacacatatggattaaggttcctcctatctcaaaacacaaaaacaaaagcaacaaccaactcacggattacctgcagcggcaaatttaccgttagccgctctttttggattaccagtgccaataaaaccacaaaagtgaattttttcgaaagtgaagaaagcgaaaaacatccgcaaaatgataaaaatctaaatctaagtaaataagcaaaccaaaagcgaattctgtgttaccgaaacgagagcaaaagctaaaagatcccctgaatacagcaatgacgatggccgcctgttatgccaactacgacatgtcgtccctgtcgcacggcatgtcggccctgtccgccctgcagcagcaacagcagcagcaacagcagcagcacagccagacgcagcagcagcatcatcaccagcagcagcagcaacacatgtaccacgccgccgtggctgcccaccagcagcagttgctgcaacagcagcagcagcagcaacaccaccgccatcaccaccagcccgccaacaccagcagcagcagcaactcgcgccacagccatgcggcggcgacccaaacgcaggtcgccgccgcggttgccaacagcagacaacaacaacaacagcaacaacagcagcaacagcagcagcagcagcagcagactgccagcagcaacagcaacgcagcccccgctccatcgccgcagaaggactacagcatcccgctgcacgtggactgcagcgtggagtacgagctgcccaaccagcccaagccgccggcgggccagagagtggagcccctgctgatgatccacccgtgctacttccgcaagatggagtcgcagcggcgcagcccgttcgtgaacaacatgcatgcgaccgcgcgggcggtgagcagcagctcgctgagcagcggagcggccctgggcggaggcggaagcggtgcggcggtggccacggcgcccagcagtagtgccgcgcggcgtggagcccgggcggctacgagcgcccagcagcagcaacaacagcagcaacgctaccaacagcaacagcagcaactgcggcaacagcaccagcagatgtcgcagatgtcgcagcaggcccactatccccagcaacagtctagtctggtccgccagcaccagcagcagcaacagcagcagcagcagcagcaacgtgccagcagcaaccaaagccaacgccaaagccaaagtcagagccagagccagagccatgcagccaactcagcggcggcagctgcggcccaggcctcgatagccgccgcagccgccggccagtgggatcaactggctgcgctggccgcccgcaccgccctcacgccgcaccacatgctgcatccccacagccactacgcggccaagggtagtggcggcggagcagggggcgggaagcgggacgccatgatctccggcagctacggacagacggcggtcgcctcggggaagctgcaacagtcgcaggtgcagcagcagcagccacagcagcaacagcaacactgcctgcctccgccgccgtgggacgcgacgtccatgctgatggaccgctcgccgatggccacagttcctagcaattatcaggccggccctgacaccaatcccatgcgcctctactcggccacgcccaccgccggagcggcctcgggcgggtcggcgtcggtgggcggaggcggggcggtgagtggtgcgggggcgacgggagcagtgaacacggccaccgacaagttgagcggaaagtaccgccagtacttgcggtcccagcggatgcacccgtacgcggcggccgcctcgctcaacttggcagccgccgccgctgccgccggccagacctcgtttgtgccgttcagttcggcggccacggcggtggcggccacgcccacattccagcacctgccgcagatctcctgctacaacgtgtgatgcagcaccagcagcaaccaggacaacggcaacatcagcagcagcaacagcaacttgcaacacatgagacaggcgcctaccaagtacgcgtcgatgaaatagccgcctcaaggaataattaatagatcctcccctaaaacagtactatatatacacacccatcaaagcttttagaatcaaaagtaattaactctaaaaatattaagagatgaaacaaaattctgtctagctgctatgagaaattgttgtccgacggtgagaaaagaggaaatgagcgatctttttttcttttagtaatggtagtaattgataaacgatacaaaaacaaacaacaacaaaaaaaaaaaatgcaaactattgtagtgatatttgttataaaataattttagtaattaatttaatttaaattaaacaaccaacaagaaacaacagcaaccgctctgtgtaagccaaccacataaacaataacaactgcaacaacggcaaaaacaagaactgcaacaacaacaacaacggcagcaacattaaacaaaacaattgctaaaagttacacatacgcatatttaattacaaatcagcaaaatgttacaacaaccatttaccgaaagaatacgaaaatatgaaaggaaaattattaccaaacgatggagagagaagagtaaagcagaaaaaagcaacacaaaaaatacgaataaaaattattcaaaattatgcaacgtaatttgaagcgagatatgcaaaaattaagtaaattgtgttttcaattaacgtagcgagcaagaaaagcatagttcaagtgatttggccgcggcaaggaaaactccccttgccgtcggcttttgtggccaacttttcacacttcccaccaccaccgaccgactaactcctctttctgttcgccttgattcgattttcatcttcgctccctttgtttcctcattctgctccgcctcatggcctcctcctctgcggtgagccgtgattgattattgtcattgatggaggaccgggcagcgggttggggtgacctcggcgcacagcacaggggtccctcgctaatggcaaaccgttgagctgagacgaatttcgaaaacttacagggctccgatttatggctagacatgaggacgtctcttgaaatttcactattaatatcttatacttagatacttatatactatttaatgtatttgagccagctgttgaaggactaaatctggcaacacactacgatatcgagagatgttgatttccactctatgtacatatatgtgttccacgacgtcggttatttcgcttttacgcctttgttttcgattagaagtttaaatacgttcttgttcacgccaccagcggcctcactgtacttacctttcaaagaccagcattctcgaagttcattcgttacagtgatataaccgaactgcctttgccttcagtgcttacggctctaattttggtctttgttgcgaggtgaaaacgcagcaaaatctaatggtttcgagtggccaggaaacgcgagatgttatcagctgaaattgtttttgctcgcccccaaggtccctcgggaaagtgtgtgctttcattactgattgcatgtcgaggcgattggcgcggttccatgggagttgctgggttccggaaagcaaatagctgagtaatttatgcatgggcaggaaaacccgctgaggattcagcgcgccattaagccaatcgtcgaattaattaagccaaaaaagagttttcaactga

SEQ ID NO: 4373 - DNA, 3868 bp, DROSOPHILA
ccctttagaacccatctgcttttacgaccccataaagctgctcccaaaaatgcgtttgccgtaaaaaattaaagcactaaaacggttaaagacatcgtattacaaaataatgtgcgctctctcgctcttttctcgcctctttgtctctctctgtctcgaccaaagcagttgtaaagatggccgccgtgtagtaacatggctgaatgtataccacacacacacacgcaggcacagagagagcggtcacagagagggagagagagcggccattgaatgcaatttatataggaaagcaacaataacaataactctgcgctcgtctcctgcgactgtgtgtgtgctgaatacgtcacggaacatcagctgtgccgaacagcaggtaggcgtcggcagaatggagcgaagacgacgtttcgagtcagtcgcttcaaagagctcgattcgtgcggacataggaggagataaagcgtggtctgtggcacgtaattaacgaagaagagagttaagaagattcaacgtcgcgtcgaaggtgaacacgcagttaaaacccaaaaacaaacgcaacgcagccaattgtgatacgaaaaataagtaaatcggcagacaatcaacaaaaacaataaaagcaaagcctacacacaggcgtaggcgtctagccaacagctgtttttcgtgcgcgctccgtattcagcatactcgctgcgcttacaaacgtcggcagagaccgcggcagagaagcaagcggcggcagcaaaactacaaagcagaaactacaattcagatcgcgtttttcttcggagtggatgagacgttcgttcggcagttctattgcgcatagaactaacaagttacctactccgcgaactcacccccgcgagaaaagaacagaacagagcataaccgaatggaaagaagacaaggagtagctaaaaagcaacggttaagttagccagcaaaaacgggcaaaaagactgaaaacacacgtggattgttcactcaccccgacacgcgcacccactcgcactcacactcacccagcagctccaactgttcgctgcatttatgtaaaaccaaacaaagactgactaaaacgctaataaatatacaataaacgtaacgaaacaaagttaaacacgcgaacagcagctaatattatacgggttaaagcgaattccaaagcaaagcaaacacacatatggattaaggttcctcctatctcaaaacacaaaaacaaaagcaacaaccaactcacggattacctgcagcggcaaatttaccgttagccgctctttttggattaccagtgccaataaaaccacaaaagtgaattttttcgaaagtgaagaaagcgaaaaacatccgcaaaatgataaaaatctaaatctaagtaaataagcaaaccaaaagcgaattctgtgttaccgaaacgagagcaaaagctaaaagatcccctgaatacagcaatgacgatggccgcctgttatgccaactacgacatgtcgtccctgtcgcacggcatgtcggccctgtccgccctgcagcagcaacagcagcagcaacagcagcagcacagccagacgcagcagcagcatcatcaccagcagcagcagcaacacatgtaccacgccgccgtggctgcccaccagcagcagttgctgcaacagcagcagcagcagcaacaccaccgccatcaccaccagcccgccaacaccagcagcagcagcaactcgcgccacagccatgcggcggcgacccaaacgcaggtcgccgccgcggttgccaacagcagacaacaacaacaacagcaacaacagcagcaacagcagcagcagcagcagcagactgccagcagcaacagcaacgcagcccccgctccatcgccgcagaaggactacagcatcccgctgcacgtggactgcagcgtggagtacgagctgcccaaccagcccaagccgccggcgggccagagagtggagcccctgctgatgatccacccgtgctacttccgcaagatggagtcgcagcggcgcagcccgttcgtgaacaacatgcatgcgaccgcgcgggcggtgagcagcagctcgctgagcagcggagcggccctgggcggaggcggaagcggtgcggcggtggccacggcgcccagcagtagtgccgcgcggcgtggagcccgggcggctacgagcgcccagcagcagcaacaacagcagcaacgctaccaacagcaacagcagcaactgcggcaacagcaccagcagatgtcgcagatgtcgcagcaggcccactatccccagcaacagtctagtctggtccgccagcaccagcagcagcaacagcagcagcagcagcagcaacgtgccagcagcaaccaaagccaacgccaaagccaaagtcagagccagagccagagccatgcagccaactcagcggcggcagctgcggcccaggcctcgatagccgccgcagccgccggccagtgggatcaactggctgcgctggccgcccgcaccgccctcacgccgcaccacatgctgcatccccacagccactacgcggccaagggtagtggcggcggagcagggggcgggaagcgggacgccatgatctccggcagctacggacagacggcggtcgcctcggggaagctgcaacagtcgcaggtgcagcagcagcagccacagcagcaacagcaacactgcctgcctccgccgccgtgggacgcgacgtccatgctgatggaccgctcgccgatggccacagttcctagcaattatcaggccggccctgacaccaatcccatgcgcctctactcggccacgcccaccgccggagcggcctcgggcgggtcggcgtcggtgggcggaggcggggcggtgagtggtgcgggggcgacgggagcagtgaacacggccaccgacaagttgagcggaaagtaccgccagtacttgcggtcccagcggatgcacccgtacgcggcggccgcctcgctcaacttggcagccgccgccgctgccgccggccagacctcgtttgtgccgttcagttcggcggccacggcggtggcggccacgcccacattccagcacctgccgcagatctcctgctacaacgtgtgatgcagcaccagcagcaaccaggacaacggcaacatcagcagcagcaacagcaacttgcaacacatgagacaggcgcctaccaagtacgcgtcgatgaaatagccgcctcaaggaataattaatagatcctcccctaaaacagtactatatatacacacccatcaaagcttttagaatcaaaagtaattaactctaaaaatattaagagatgaaacaaaattctgtctagctgctatgagaaattgttgtccgacggtgagaaaagaggaaatgagcgatctttttttcttttagtaatggtagtaattgataaacgatacaaaaacaaacaacaacaaaaaaaaaaaatgcaaactattgtagtgatatttgttataaaataattttagtaattaatttaatttaaattaaacaaccaacaagaaacaacagcaaccgctctgtgtaagccaaccacataaacaataacaactgcaacaacggcaaaaacaagaactgcaacaacaacaacaacggcagcaacattaaacaaaacaattgctaaaagttacacatacgcatatttaattacaaatcagcaaaatgttacaacaaccatttaccgaaagaatacgaaaatatgaaaggaaaattattaccaaacgatggagagagaagagtaaagcagaaaaaagcaacacaaaaaatacgaataaaaattattcaaaattatgcaacgtaatttgaagcgagatatgcaaaaattaagtaaa

SEQ ID NO: 4374 - protein, 550 aa, DROSOPHILA
MTMAACYANYDMSSLSHGMSALSALQQQQQQQQQQHSQTQQQHHHQQQQQHMYHAAVAAHQQQLLQQQQQQQHHRHHHQPANTSSSSNSRHSHAAATQTQVAAAVANSRQQQQQQQQQQQQQQQQQTASSNSNAAPAPSPQKDYSIPLHVDCSVEYELPNQPKPPAGQRVEPLLMIHPCYFRKMESQRRSPFVNNMHATARAVSSSSLSSGAALGGGGSGAAVATAPSSSAARRGARAATSAQQQQQQQQRYQQQQQQLRQQHQQMSQMSQQAHYPQQQSSLVRQHQQQQQQQQQQQRASSNQSQRQSQSQSQSQSHAANSAAAAAAQASIAAAAAGQWDQLAALAARTALTPHHMLHPHSHYAAKGSGGGAGGGKRDAMISGSYGQTAVASGKLQQSQVQQQQPQQQQQHCLPPPPWDATSMLMDRSPMATVPSNYQAGPDTNPMRLYSATPTAGAASGGSASVGGGGAVSGAGATGAVNTATDKLSGKYRQYLRSQRMHPYAAAASLNLAAAAAAAGQTSFVPFSSAATAVAATPTFQHLPQISCYNV

SEQ ID NO: 4375 - DNA, 4915 bp, DROSOPHILA
gagcatcccaaggaggagcatgagacggtgatccgaaacggcaggctgcttagccagctggcgccgttgcgtgcctttggggactttcgctacaagtggtcccaggaaataatgcagcagaaggtgctgccgatgttcggcgtgcaggcaatggcgccgaattactatacgccaccgtacctaaccgcccgccccgatgtccagcagcacgaattggggcccaacgacaagtttctagtcatcgccagcgacggcctatgggatttccttccgcccagcgaggtggtcagcttggtgggggagcacatcaactccaaaaagatcctcgaaccgatgcgcctgccggaaggcgatacaacgctgcaggaaatctctcagcagctggccgaaagaaagtcagttatcctttaaatgtatgcttgttatttatttatttattaattacgcttttattgcattgcagggctggcctcactcgcaaacccgtagaccaaaacgcggccacgcatctcatccggcatgctttgggcggcaccgactatgggattgagcactcgaagatctcgtactatttgacgctgcccagggacgcggtgcgtctgtatcgcgacgacatcacaatcactgtcatctactttaactcggagcacattgccaagctgcacagcgatgtggatcaaacggaggtcactgcgccggtagcatgatctctgcgagagtgcatatgtgtatatttaacgagcctaaccttcagccgaactagcctaagtgttgcgtttaagtttgtttcatccgccatcggacctcggacgactgctgcgccaaataaatcgcacgcggaaagcgaaaaatcacatatgcaaattgtcttgttattcataaagagcgatgatcggtcgtctcatttgttaataaaataaaaatgacatgaaaatcccagcaaatatgtatatatcaagggttataagcaatcaagaaggtttcttcatatatttatttctcaaatagttcgtgattttgtaaagtagatactattttttcttttaaagcaagtacttatattaatttttgctgtttaaaatttacaagcaattcgtaatgtatataatctaattcaatttaaaacttcttattctataatttacgccaattttcttgttttcaatttagttcggtctataaaacgggggggaaaccaggataatcctaagacttaggtatagatcatctgttgcaaacaagctattcaactttaagaatttcgaattgtgtagttttcgagaatcgatttattttcttttatttccaattacaattgattgtaacgctggctaatatatatgtatatatatttttactcgaatggatggtgtagaggggtgaaggatacagggatccggggtttcgtgggtggaggataaagctaattgaagaacgcggaatccacgaacttgcaaactggtaaacggtacgcatcctaatcctatacatggaaaaaactaggcaactactcagggatcgtattggttgttttttggggaacataactaaaaacaggtgtccctaatccttgccatcctgttcggccgcttcctgccggctgacacagttgaggaactccatctgaatgtgcgtaatctgtgtcttgctgaagcactgcatcttcttcttgagaaagtcaaagaacagatcgagctcatcacgcttggccagtgcctgggccacttgttgctgctgatgctgctcatcctccttgatgagattgttagaactgctggccgccgcactaacggccaatggctggccagatccgcagttcaaggggggcatctgaatgatcgtggccgtcggcgtggatgtgaaggatgtggtattgcacagcgccgctgctggcgtggtagtcacggtagtcgcattcagagaaatggccggcgtgcttgaaatcgtcacactggtactggtcgcctctgttacatccaccagggaaatttgctgcgttgacactgaggaatcatgacgattggttgatccaccgcccccagccgcaggagacgtggttgttaccagcgtgagattctttaccttgccatcggttaccacagtcccaccggttaggacactatttgagccattgcccgatccaccgctggccgagaactgatgctggctggagcgaactgtctgtggctcaatgtccgatatgcaaaattcgtgtgtatcgatgtaatggaaacccttgccgtgggtaacatcgctaccgccgtccacggcgtcacccacaccaatttcgcaatccacatgggcaccgctggcctcctcgtacaggcacacctcttcgtagtccacctcggcgccggttgccccgtcctcgtccagttcgtgcttcacaatatccagctgaccgtcgtggtcgaccacatcatcttcgtcatcgacatcatcgaccacatcgtcatcgtgggcaatctgggagagctcaatgctggagatgctgccgtcgtgctgcgactgatgatgatggtggtggtggtggtggtgcggctggtgatgatgctcctgctggtgatggccatgatgatggtgatggtggtgctgcgatacagtgtcatccgagacgccctcctcgtaggcggtcaggatgaaggtttccgcctcatcgctgaccagggtgatctgcgaggtgccgtgatgtgaggagagcgtggcggtatcgtgatccgattgcccgtcatcgtccatcacctcgtcgtcgtcatcgtccacatgctgtttcaaatgcagcatagctccaatgggcaatgtggtactattcgcgcctccaatgcctccaccggcgccggcaaccccactcgtctcataggtgatctgtgtgttccggtgcgatttcagtttcggctggtacaccttcgacaggaagtccagctccttggcgtagcgccacttggatagccgcccttcgatgtacttgggcgtgcgcagacggtactggtggaaagtgtcccgcaggttcttccacttacgacgcacctcctgcaccgtgtacttgtctggaagaaagaaagaggtagtataaatatgagcggggtttcaaaggaatcgtattccttttacagataattgatacaagctagaacctcttcaaaggcatcacatttatgaaaacgtttctaagtaacgatgaaattatgagttgtgttatagtagccggcgccagaacactagcctatcaatacaatatgcatgtggtatttaaaaccaactttagcggaagcttatattaattctggaagaaggctaatagtcggacatgaagcaggccatgactagcactcacttcctatctgctgggccacctcctgccatccgttgaggacatcggagcggcgtcgctggttcggctgcagtttgtagttgtagagaaccggattctggcgcaccaggttgatcagcgtaaggatgtcgtccgtgggcgcgttgtccttgtggtagcgcttgcgctcttgcgtcgacgaggacatgttgcttcagcttctgtgggtttccactgttgtgctctcccaaatcctgatgatccttatcccgataccaatgctgctcctcacattcaggtgttttgtttttgtttacccacgaaaagagaggctttcgttctcgtcgaaatgcacgcacaaacacatacacaagcgcacttgaacggagccaaacaccagcttatgtaggtgtaggaacacgcacgcacacactctcgcacactcgatgcaaaggatagcgactgtgtgcagcaggatctcctttgtagtcgctacggggcacgaatctcggcaagaatcgagacgccttgtccttggcgttcagctccaattgtgcgaatttgactgcacttgatgctcttgctttgcttttggctgtttttgctgttgcttatttcgcgctagggatgacacatcgcggaattggcgttctctttcgccgtcactgaaaagcaaaagtccgtttccctgtatttataatcctcaattaaaagttacgttcttatacaattaagtcgtatgggaatgatgttctaaggcaaactaattaaaggtttttattttttgagttcagtttttttaccaacactattagaaattagacttatattgtatttgtggcccatataatttttttttattatctttattaatttttgtaacatttaccattctaccaataataataatacaactatttgttggcaaaataatattaataactacatgttaaacatacaaagttggctattacaagccgtgctgatacgtgcactatcgataacaccgcacatgtgcaagcctgcgcttatttttttgtctcctcgctagcaataaaaaacaacacaattgtgtagcttcgtgtcttgttttgctcaatttgccgacgaattgcatgataatgagcacaccggcgaaaaataacaatggaactggactggaggacgtgaatattccgggtcaggcctatctgcgcgaggccctgacctcctgcactgatcccttgaaggccatcgagagttttcaggtttgtttacgttgcaccgaaaaatgggcgccaaaagttcggtgggcttatttatccaaatatcacctgcctttttagcttgagaatggtgtattgctgccttcactgcgccccatgttgcctttactcgatttgcacggcgtgcgtcgactggactttcatacctcgctgatggaggagctgcgcgacaagctgatagctcacatcaacgagatgggccaaaaggagccccgggagcgggacaagaagctcaaggagctgctcgttaagagcttccccgtcgttcgggtgaagtcgctgcggcccgtggtcatggccatattgaggaatacccagcacatcgatgacaagtacctca

SEQ ID NO: 4376 - DNA, 2628 bp, DROSOPHILA
gcaaaaacagccaaaagcaaagcaagagcatcaagtgcagtcaaattcgcacaattggagctgaacgccaaggacaaggcgtctcgattcttgccgagattcgtgccccgtagcgactacaaaggagatcctgctgcacacagtcgctatcctttgcatcgagtgtgcgagagtgtgtgcgtgcgtgttcctacacctacataagctggtgtttggctccgttcaagtgcgcttgtgtatgtgtttgtgcgtgcatttcgacgagaacgaaagcctctcttttcgtgggtaaacaaaaacaaaacacctgaatgtgaggagcagcattggtatcgggataaggatcatcaggatttgggagagcacaacagtggaaacccacagaagctgaagcaacatgtcctcgtcgacgcaagagcgcaagcgctaccacaaggacaacgcgcccacggacgacatccttacgctgatcaacctggtgcgccagaatccggttctctacaactacaaactgcagccgaaccagcgacgccgctccgatgtcctcaacggatggcaggaggtggcccagcagataggaaacaagtacacggtgcaggaggtgcgtcgtaagtggaagaacctgcgggacactttccaccagtaccgtctgcgcacgcccaagtacatcgaagggcggctatccaagtggcgctacgccaaggagctggacttcctgtcgaaggtgtaccagccgaaactgaaatcgcaccggaacacacagatcacctatgagacgagtggggttgccggcgccggtggaggcattggaggcgcgaatagtaccacattgcccattggagctatgctgcatttgaaacagcatgtggacgatgacgacgacgaggtgatggacgatgacgggcaatcggatcacgataccgccacgctctcctcacatcacggcacctcgcagatcaccctggtcagcgatgaggcggaaaccttcatcctgaccgcctacgaggagggcgtctcggatgacactgtatcgcagcaccaccatcaccatcatcatggccatcaccagcaggagcatcatcaccagccgcaccaccaccaccaccaccatcatcatcagtcgcagcacgacggcagcatctccagcattgagctctcccagattgcccacgatgacgatgtggtcgatgatgtcgatgacgaagatgatgtggtcgaccacgacggtcagctggatattgtgaagcacgaactggacgaggacggggcaaccggcgccgaggtggactacgaagaggtgtgcctgtacgaggaggccagcggtgcccatgtggattgcgaaattggtgtgggtgacgccgtggacggcggtagcgatgttacccacggcaagggtttccattacatcgatacacacgaattttgcatatcggacattgagccacagacagttcgctccagccagcatcagttctcggccagcggtggatcgggcaatggctcaaatagtgtcctaaccggtgggactgtggtaaccgatggcaaggtaaagaatctcacgctggtaacaaccacgtctcctgcggctgggggcggtggatcaaccaatcgtcatgattcctcagtgtcaacgcagcaaatttccctggtggatgtaacagaggcgaccagtaccagtgtgacgatttcaagcacgccggccatttctctgaatgcgactaccgtgactaccacgccagcagcggcgctgtgcaataccacatccttcacatccacgccgacggccacgatcattcagatgccccccttgaactgcggatctggccagccattggccgttagtgcggcggccagcagttctaacaatctcatcaaggaggatgagcagcatcagcagcaacaagtggcccaggcactggccaagcgtgatgagctcgatctgttctttgactttctcaagaagaagatgcagtgcttcagcaagacacagattacgcacattcagatggagttcctcaactgtgtcagccggcaggaagcggccgaacaggatggcaaggattagggacacctgtttttagttatgttccccaaaaaacaaccaatacgatccctgagtagttgcctagttttttccatgtataggattaggatgcgtaccgtttaccagtttgcaagttcgtggattccgcgttcttcaattagctttatcctccacccacgaaaccccggatccctgtatccttcacccctctacaccatccattcgagtaaaaatatatatacatatatattagccagcgttacaatcaattgtaattggaaataaaagaaaataaatcgattctcgaaaactacacaattcgaaattcttaaagttgaatagcttgtttgcaacagatgatctatacctaagtcttaggattatcctggtttcccccccgttttatagaccgaactaaattgaaaacaagaaaattggcgtaaattatagaataagaagttttaaattgaattagattatatacattacgaattgcttgtaaattttaaacagcaaaaattaatataagtacttgctttaaaagaaaaaatagtatctactttacaaaatcacgaactatttga

SEQ ID NO: 4377 - protein, 555 aa, DROSOPHILA
MSSSTQERKRYHKDNAPTDDILTLINLVRQNPVLYNYKLQPNQRRRSDVLNGWQEVAQQIGNKYTVQEVRRKWKNLRDTFHQYRLRTPKYIEGRLSKWRYAKELDFLSKVYQPKLKSHRNTQITYETSGVAGAGGGIGGANSTTLPIGAMLHLKQHVDDDDDEVMDDDGQSDHDTATLSSHHGTSQITLVSDEAETFILTAYEEGVSDDTVSQHHHHHHHGHHQQEHHHQPHHHHHHHHHQSQHDGSISSIELSQIAHDDDVVDDVDDEDDVVDHDGQLDIVKHELDEDGATGAEVDYEEVCLYEEASGAHVDCEIGVGDAVDGGSDVTHGKGFHYIDTHEFCISDIEPQTVRSSQHQFSASGGSGNGSNSVLTGGTVVTDGKVKNLTLVTTTSPAAGGGGSTNRHDSSVSTQQISLVDVTEATSTSVTISSTPAISLNATTVTTTPAAALCNTTSFTSTPTATIIQMPPLNCGSGQPLAVSAAASSSNNLIKEDEQHQQQQVAQALAKRDELDLFFDFLKKKMQCFSKTQITHIQMEFLNCVSRQEAAEQDGKD

SEQ ID NO: 4378 - DNA, 3350 bp, DROSOPHILA
accacaacgttgcgaaaaaagttggtctgggaacactgtcacatgcgcgaacaaatttgaaaaagatttttccaacttctttacattacattatttaatttgcactactaagaaacaagtaatgattaaagaattaaaggaattacctgttgttgccagaccgatgaggccaccaatatttatggaaatttccaacaaaatctagattgattgagcacaactacgaaggtgtaaaacaacaatagaaatcgtcgcagctaagttttgggttatctatcaagtggactaaactttgcgaaaaatttaataaacgaaataaagcacatatatgtaaacagccgccaaatatgccgcgaattcttttattgtaaaattgtaaattttggaaaccgtgcagctacgaacgtttgtgtatcacacaggttgcttttttgacaattgcttcaagactcctttgatttaacaaagcggagaaatgtgcataaaaactctaaatcgattagattagacaaaaacaaagcccaagctaacccttgattaaccaaatgcatgccgtccgtattaataaaaacgtttatatttcaagttttaagtatatgtatagcttttcctttcgtatttgtgtatgtggagttatgtgttgtatgagttaggagcgcagaatctcggctacgtatacctcgtgtgactggctatcaattataggggcgaagtaaacataatttggaaagaggggttcaaactcaatcttcactaattaccgtgagtcaccgaactaaatattaacttaaaagcgattaactatatgtaattagaaaaaaaacgcattgtgtaaatatacgtaactgttttggttttttagctaaactagacgattaaacaagattaaagagtcaacaaattggtgtttaggggggaaaaggagtactggtgggtcatacgatacaaatcaatgtacataaacagtattgaaaataatagacaatgaggtcggggtgaatcaacaacatgatgacttttccggctctgctacgacgagattaaagtccagactattgggtcgcgaaaagccagacttgatgccgtcccatccatcctccgccttatattcgccggatcgaatgcgggcgtacacctcctgggtgaccatgcgaaatgcctcctccacattggcaccagaccgggccgatgtctcaacgaaatgcagaccgtgctgtttggcaaatttttgtgcctcctctgtggtcacctcccggtgtccgcccgcattgatgaggtccagtttgcagccgaccaatgcgaaaacggggcggtggggctcaatgtgacgctgtgcctccatcatccacagcggtatgtgctcgaagctggcgtgattcgatatgtcgtagaccagcagcacgccaaccgagttccggtagtaggacttggtgatcgaacggaagcgctcttggccagcagtgtcccacagctggagcttgatctgtgtgccgtccttcatttcgatgaggcgggcaaagaagtcgacgccaactgtgggatcggataactgcaaaatgtaaatattgtgttatttatgattaggtggattcttgggaggcagtaaaaagaaacgcagtttagagctgtaatgcttttgagaacacttttgattccacacaattcatgatatctctatgtttttaaatttcccgcgcagttatttgagtatccctggtcctattttggacttgtgtgttgtttttgctgcctgcattatcaggcgagcacacaaacatgcacaccagcacacacacacactgacaaggtgactaaggcagcatctttttaaaatccactccctttgtctattttttgttgtatctcgcccaatgcaatcacttaattatgtaatgaacgcattaactgcatctcacgaagatcgcacagtgggccaagcgtccaagtacagtggccaaaatcgttggacatacgcacctcggcgaatttgccgtctgtgaagaatttgagcagcgagctcttgcccacggtgctgtcgccgattaaaatcagtcgaaattgatactcgaaaatgggttccaccattccgaagccgaattcgagggatttgtctcttggaattgaatccgcagcaaaaaatctgccttccctttgtaaagtttgatacgcaaatcgttgatttgcttatgctgctcgtttttcttcttatttcctgcagttgtattgcaaatcgaaactttctgttcttcacacgattactggctttgcaatgagatatttccggctgtcgctggtggttgttaaattataaatattcgagaattcaaattccttcgaattttgttttgttttgtgtttttttctcatatgcgtgcgcgtgtgtgtgataatgacaacgttgccagaccagcaaaagtaatcgatagtagccacaatgaaattatttcattaccattattaaacagttatatcttctaaattatttaataaaaatagtgtcctcacatcaatttggcagttttcagattttttaacaagcttagatgtatttttcggcggtacacaaaaactagctagacttggcttgaaaacggtaaccggctaatggcaacaccgccagtctggcaccgccgcccaatagagatggtcaaagaacgcgatttcgcgtgacacgatgaatgcatacaaatgtagttagtttaaattgttctgagaaaatatgacaaaaaaaataaaataatctttcatattaagctaataaatttacaataattacacaaaaagatttggccttgtacagtgctttgacacataaattaagacgtgcgtgttcattttcgttctaggctgtctcgtgcagagaaaaacccatcgctagtacgcactgtattttctttttacgtttgttttccgtgaacaccgtccgcttcgtatttcacagcacacaaatgtacaaacaagccgccggccaatcaaaagcaacagcggaaaataagatccctttgtcagcaaccggcaaccggagtcggtgaatcagccggaggctccgggatacggaatccaccacgttctcctccatcttctttgcctactcctcccccgatttggttacggaaccaatatcattaccgttaattatagccacagcggggcgagagcatatacaaaatctccatatagatgttcaagttcgtgctgaacgacgccgccagctacgtgcgatccaatgtgcgggagttcagtttgaatgcactgcgtctgctgccgcaactgcctcaattgagtccatacgatgtaagatttggggttcctggcaagtgtcattagcaagctgggcagggttcgtaaaa

SEQ ID NO: 4379 - DNA, 922 bp, DROSOPHILA
aacaaaacaaaattcgaaggaatttgaattctcgaatatttataatttaacaaccaccagcgacagccggaaatatctcattgcaaagccagtaatcgtgtgaagaacagaaagtttcgatttgcaatacaactgcaggaaataagaagaaaaacgagcagcataagcaaatcaacgatttgcgtatcaaactttacaaagggaaggcagattttttgctgcggattcaattccaagagacaaatccctcgaattcggcttcggaatggtggaacccattttcgagtatcaatttcgactgattttaatcggcgacagcaccgtgggcaagagctcgctgctcaaattcttcacagacggcaaattcgccgagttatccgatcccacagttggcgtcgacttctttgcccgcctcatcgaaatgaaggacggcacacagatcaagctccagctgtgggacactgctggccaagagcgcttccgttcgatcaccaagtcctactaccggaactcggttggcgtgctgctggtctacgacatatcgaatcacgccagcttcgagcacataccgctgtggatgatggaggcacagcgtcacattgagccccaccgccccgttttcgcattggtcggctgcaaactggacctcatcaatgcgggcggacaccgggaggtgaccacagaggaggcacaaaaatttgccaaacagcacggtctgcatttcgttgagacatcggcccggtctggtgccaatgtggaggaggcatttcgcatggtcacccaggaggtgtacgcccgcattcgatccggcgaatataaggcggaggatggatgggacggcatcaagtctggcttttcgcgacccaatagtctggactttaatctcgtcgtagcagagccggaaaagtcatcatgttgttga

SEQ ID NO: 4380 - protein, 218 aa, DROSOPHILA
MVEPIFEYQFRLILIGDSTVGKSSLLKFFTDGKFAELSDPTVGVDFFARLIEMKDGTQIKLQLWDTAGQERFRSITKSYYRNSVGVLLVYDISNHASFEHIPLWMMEAQRHIEPHRPVFALVGCKLDLINAGGHREVTTEEAQKFAKQHGLHFVETSARSGANVEEAFRMVTQEVYARIRSGEYKAEDGWDGIKSGFSRPNSLDFNLVVAEPEKSSCC

SEQ ID NO: 4381 - DNA, 2606 bp, DROSOPHILA
ttacttaaacggttaccattctgtaggcctgcttatagagcgagtggtctgtaaatcgacaagtttcagtgcacaaacgacgtgttccgccatgcggaacttctgacggttattataaaaatgcctatataagacggaacaaaaacatagaaaaagaaccagaagtggggggaatataatgccagcagatagtagcaaaaagttaaaagaactgaaaggggaaagagggttggaataatttagttcaggcatagttccgctctttgacatcacttcgcttcggaataactttgctgaactctgaatgtttccttccaaccgtcacaaaccaaccagagaacacgccctaaataacgtcttcgggttatttgtacaaatgccctgaaattttctgctttgatgaagttatttgtttagggtcgctgagcgcagaaagctggtgtgggaaattctgattagatatgatcatgtaatggaactttcaattggctatatgttagcccgaccgatcataaatcgaaacggtattttctatttatcattactgaaagttgggtgaagaaagcacaggtttacttactctgtgatgttgttcataccaattttgaatattcattttaatttgaacctttcatttattaccctatattattatccactatattgatttttttaaacatcatcactagccaagtcgatgaaccatactatggactaaaatgtctttcgtcaaatgtagttcacagttcacatccaaaatattttttatttcctcatcatagtttgtaggtaaacagacgaacatttacattgcctcgtagtattgtgccctctgtatccattggtgtttatatttggcaacgaaaagttcatgtttgccacatctgcgccaactttttactttttactttgcgcttctgattccgccttcgtttacgatgctttcatggaagttgtaaacccagaatctaattttatctaaaatgtatgctttattgtttacagatagttcatagccccaacaaaacgaggcccaaacgacgtcacactggagtcacaacacgatctattcttccagaactgagacgagactttccccaacctgtacagtatgtcacatgataagaagatgttggatcgcgaggcagtacgctcagtgatacagcaatggaatgccaatcgattggatctatttgctctctccgagccagacgagagatcctcgtacgcgtcgactggcggagaaacagcagcagcaacagcaacaacgggctggagatgcggtgcccgaaaagctgtcgttcaaggagaagatgaagatgtttgccctggagtcgggggaagataagacgcccaaggacaaactgaaaatatcgcgagcccaacgagatatagacgcggtgcactaagaagaagggatcgttgcttaatgctatgtacatacagaccagaatccacaaagcttacacttcaatatattgggggccaagttgttacgttagctctacataacaaaacacacacatagatatataggtcatgttatatatgtcggaacactttagaaacaaataaacctaacgaatttgcttagcaaggcaataacaatccatagttatcgcgtttcagagttaataaccatacacaaaatgttaactgatttcaattagtgagaatgtcagtgtatatcattatagtctatatatactatgtttatatatacaaaactgtaacgagcctagacatggcaacgaaagcaaggcgagccacatttgtaaagcgttttaaacaagtaactttaaacttaaccttacgattaacaatttgttacatcagattatggcatacgatttatgattagacggcagtgtaaatgagcaaagttagtttagatattcatatacttacctggaaaccgtgcggaacaagaaacgttatatatatatatatatactgtatccattagagagccacaacagcggtaaaacaaatggtccaattattcaattattaaagttatatttacaaaccatgaactaatgagtaatgaaaaatttatagctcacttatatatttttaattactgcaaccattttaaacaccttttgaatgcaagaatggcaaaaccaagagcgtgtaaagttcgaatacgcatagagaataaccaattaaaattacacgataccctaatggctttaaaattataacaaaagaatgacttcggcaggccgaggagtatatacccttgcaacgaaatcagataattttatgaagtataagtccgatacgtcccaaactcagaaccatgttttactgaacctttcatttggacaaaaaatgtatgaaatttcaataaaaactatactaacttaatgtactttaataatcactgcaagggtatatgaaattaaaatgtatttgaaaaccgaccacaaaggtgacaaaatatttttgtgcattccaagtatttcaaatcgaaactaaattctaatttataagacgagatttatttaaaaataaaccgatattttttaaatgattattataaaagtaaaaaataaaatgcaatcgatgcacgaatacattctgtaaaaagaacttcgttt

SEQ ID NO: 4382 - DNA, 6173 bp, DROSOPHILA
tacagatagttcatagccccaacaaaacgaggcccaaacgacgtcacactggagtcacaacacgatctattcttccagaactgagacgagactttccccaacctgtacagtatgtcacatgataagaagatgttggatcgcgaggcagtacgctcagtgatacagcaatggaatgccaatcgattggatctatttgctctctccgagccagacgagaacctgctcttccatggcgttatgcgcttctacttccaagatgctggccagaaagtggccaccaaatgcattcgcgtggcttccgatgccactgtcacagatgtcatagacacactcattgagaaattccgtcccgatatgcggatgctatccgtgcccaactacgccctttacgaagtgcacgccaatggcgaggagcgtcgtctcaatgccgacgagaagccactgctggtgcagctgaattggcatattgacgatcgcgaaggtcgattcctgctcaagaacatagaccaaaagaccactcccatcgagcagacagatctaaactttaagagaaaactttcgaagcgagagaaaaaggagcagaagaaaaaggagaagatggcaaagctgagctctgatccgcccacctcgaatggcagtcatctgggcttgggaaatggtgttggagcatcctcgggatctgcccacatgaatggaaacgccggtggaactggaggcgacagcagcgatgcagtggcaggaaaactgtacacggaactaccagaaacctcgttcacccgatcgatctcaaacccggaggccgtgatgcggcggcgccggcagcagaagctcgagaagaagctgcagcagttccgttctagggatggtggtcccgataccggtggcacgttgaagatttacggcgagagcctctgtcaggacgtgccctacaagacgctgctgctttccatccgggattgtgcgcaggctgttgttcgggaaatgctcacaaaatacggtctagaaaaggccgatcccctgcactattgcctggttcaggtcaacagcgacggaacagaatatatactcgacgacgacgagtgcccgctgtcgatactgatgaaccatccgacgtcacgaggctccatcatgttccatgtgcggagacgtccggcggactcacagccccggaggagaaagaaaaaaccactgggcgcggccaacggggcgaaccacatatccggagatcgggagggacccgtcctggtggaggtgacgcacagcggcgacggcggccggcggattaagttgggcagcgacccggtggaggtggggtcggccaacactaactgcctgcagctattcggaccctcgatccagccgaggcactgcctcatttcgctgctggagggggtttgcaccgtgaccccgctgcacaccgatgccctgacctttgtcaatggccaccacattagtcagccgaccattctgcataacggatcggtggtaatgttcggacgggtggcctcgtaccgcttcctcgattcccccaccgacgggcgctacaacctggctctgtcccaatcccagctggactcggcatgtctctacgaaagccgctcgcccacatccccgggatcctggaatgacgaggatggagccttgagttcgacacacaaaagcgactacgaccaccaccagcaagcaaaccattccagcgcctaccacaataataataacaactccagtgatcatcctctgagcagcacgctgcgggacgtggtggacagcaaggctggacaggatcagggggccaattcgggcaactacgaatatcgagcgtccacacattaccgcccggagttgcagcccacggagcgtgcccacaagctaaccatgttcctgcaccatgtggctaatctggtctacagcgtagtccaggagcagtacacggatccccgaatcctggcattttggatggccaacagctcggagttcctgcacttccttaaatcggatcgccacatcagcgcgtttagtgttcaggctcaagaggttttggccgaggccgtgcagactgcgtttcgcaacctggtcaactgctttcgattggaactctcgcaaactcttaaccagtttctctccgagaacattgatcatgactccgcggcgggtctggtactgactgtgctgggatcggcgatggctcttctcagacgatgccgtgtaaatgcagccctaacgatccagttgttttcgcagctgttccactacatcaatgtcatatgtttcaatacgattgtggcaaactctcagatgtgcacaggtgactggggcaaggtaatgacggagcggcttcagttgctggagctgtgggcagaacggcaaggattggaattggcggcggattgccatttggccaagatcaatcagtgtgctcagtttttgcaagcaccaaaatcctcagtggaggagatccagcagttagcctgctcctgcttccgtttaaactcccttcaaatggcagcgctgctgcagcaagaaaagcttccccgcaacctggttgataccgccataaggatggcggaatctgtggcagacgaactaacccgtgccgatgggcgagaggttcggttggaagaatcgccagagcttcacttggcgcttctgctgcccgacgatggattcagctgtgatgtggtgcggggcattcccaccggtctcgtcgacttcctcaatcctctccagcagcagggcatgtgccgactggcggcccaacccacctccattggcctttggacggtctatatgcatcagtttaatgctcgcagttccagtgccatgtctaacaaacttccgcaaccggaattgcagctcattaagctacacaagaacagcaacggcatgggcttatccatcgtcgcggccaagggagctggtcaggagaagctgggtatctacatcaagagtgtggtgcctggcggagcggcagatgcagatggacgtctgcaagctggggatcagctgttgcgggtggatgggcaaagcctgattggcatcacccaagagagggctgcggactacctggtgcgaacgggtcctgtggtcagtttggaagtggccaagcagggagccatctatcacgggttggctacactacttcagcagcctagtcctgtgatccagcgtggtaatcgccgtatgtccgaacgcgatctgacgcggatgggcggtgccgaatcgaccaaatctctgggtccactgatagccaacaaccatccgaatcacagccttagtcttagccaacatctgaacaacagccacaacaacaccctaggcaatagcaacaatagtagcatcatcaatcccctagctgcacacctgcccaacagcaaatcggtgccggctctgcatcaccacacgggatcgggtaccatatccttggccaattccaagtcacgcagcacgcatagtttgcataacaatacatctggcatgggcggaatcggcggagcagcagcaggaggaatgctgggtcagccaaatggcagccagaacaatgcaaatggaaatggaaatggcaacgagcagggattctatcagaatctcagcgtgtatcgggcgcaaaatcagagccaaccgattttgaacgaaagaccgccgattgccgcacatgccgccatgaacgcttacaatggcagttccccgcttgcaccgcagcagcaaccacagcagcaacagcaatcgccataccagcagcagcagcagcagcaacatatgcaggccaatgctaacctcccgcccacgcgacccgtctctgcctattaccacagccagcagtcggcgcagcagcagctgcagcaacaacagcagcagcagcaacaacattccctgcagcagcaacagttcgcgctcagcagtggcaatctcaatggccagcaacagcaacagcaacagcaccagcaccagcaccagctcaccttgaacaaccgcaccaagagccagcagaacttccagcacactcttcgcatgcagcagatgatggctccctccatgcctaacatcagcaacatgtaccatcaccagcagcaacaacagcaacagctgcccctgcaacagcagcagcagcagcaacagcaacctctgatgagcagcagtcagagcatgcagaatgtgaacgatttcgcaggtggctatcagaatggcagtttggagtacaggcgcagtcagctccatgatccatccacgctctacgaaattcagcagcaacagttgcaacagcaacagcaacagcaacagcaacagcaacagcagcagcaggcatcgccgaattttatagccctgccccctaaaccattgggcagcttacagtctcccaataaaccaaatgttccaccaagtacagcaccaaaaccgcagcaggacaagccgcctctaccgcctacagcaacgcatccgctgttcaaagccacgcagcagattgctccgggaatgaactacgtagccagtacattggatccgccaaagggcagctatgtggcgtccaatcaagggaacaatcgtccccttcacagcggtagcaatccatgggaaagggaggagcgtgagaaggatttagagatgcgtcgcgaacacattcgccagtggcgggagcagcagatatcagagctgtcccagatcgtatcccgttccccaatgcaagaggagcaactgaaaaccctgatactcgagcgcgactttgagcgaagagcacaagaactacaagagcaagaggaacaggatcaggaacagcagtacgacaaggagaacgtccaggagttgttcagattggctggcggcggtcaggtcagtgccatacaaacacccattaccagttaccgacaaacggagataaaactggcggagatgccagacagcaacagtctggtggattcagtgccaccacagccaccagctccaactgcccagccgctgagcagcaacacacagcagcccaagagtatacttaagcacaatcggtattccgaaggcggggttggtcccagtggggcaccctcatcgccatcgaagtcgcagaaatccgcaagttttgcggacgagcgacatctgcacactgagcatccgatatctaatctagcgaaggagcttaatcagctcacaatgcttgataaggacaataacaacgagactctggatgctgttgtgccgccacctccaccgccagaaaggaacagttcttatttgatcatgtcacagcagaaactgcgaggcagcactggaaacgcgacctcgtccatgggcctactgaaaacggccaccagcaatcaggccgcagctgccgtagagattaaaaaggcatctcttctcaacactcaaactaataataacaacaatttgagtgggagcttaaacaacaacaccatgcatggatcaccactcagcgccatggagctaaatgccgcctatgtttcggccacgggaacaggaataattggaggattgggcacaccgcctccgccgccaccgttgatgcaaagggacaacaagcgggtgagcttccatgatgaagagaataattttgtgagcgggaatagccagcaacaacagctgcagcagcaatatattatggataattacggtatggagcatcaggatttggacactatcagagaggatacgagttatctgcaacacaatctcgacgcctccatgctgccatctatgccagccactccagatgctgccctctggaacacctcagtgcaatccactccaggcgtcattggagctcaagaagtgtacagagatcctcgtacgcgtcgactggcggagaaacagcagcagcaacagcaacaacgggctggagatgcggtgcccgaaaagctgtcgttcaaggagaagatgaagatgtttgccctggagtcgggggaagataagacgcccaaggacaaactgaaaatatcgcgagcccaacgagatatagacgcggtgcactaagaagaagggatcgttgcttaatgctatgtacatacagaccagaatccacaaagcttacacttcaatatattgggggccaagttgttacgttagctctacataacaaaacacacacatagatatataggtcatgttatatatgtcggaacactttagaaacaaataaacctaacgaatttgcttagcaaggcaataac

SEQ ID NO: 4383 - protein, 1954 aa, DROSOPHILA
MSHDKKMLDREAVRSVIQQWNANRLDLFALSEPDENLLFHGVMRFYFQDAGQKVATKCIRVASDATVTDVIDTLIEKFRPDMRMLSVPNYALYEVHANGEERRLNADEKPLLVQLNWHIDDREGRFLLKNIDQKTTPIEQTDLNFKRKLSKREKKEQKKKEKMAKLSSDPPTSNGSHLGLGNGVGASSGSAHMNGNAGGTGGDSSDAVAGKLYTELPETSFTRSISNPEAVMRRRRQQKLEKKLQQFRSRDGGPDTGGTLKIYGESLCQDVPYKTLLLSIRDCAQAVVREMLTKYGLEKADPLHYCLVQVNSDGTEYILDDDECPLSILMNHPTSRGSIMFHVRRRPADSQPRRRKKKPLGAANGANHISGDREGPVLVEVTHSGDGGRRIKLGSDPVEVGSANTNCLQLFGPSIQPRHCLISLLEGVCTVTPLHTDALTFVNGHHISQPTILHNGSVVMFGRVASYRFLDSPTDGRYNLALSQSQLDSACLYESRSPTSPGSWNDEDGALSSTHKSDYDHHQQANHSSAYHNNNNNSSDHPLSSTLRDVVDSKAGQDQGANSGNYEYRASTHYRPELQPTERAHKLTMFLHHVANLVYSVVQEQYTDPRILAFWMANSSEFLHFLKSDRHISAFSVQAQEVLAEAVQTAFRNLVNCFRLELSQTLNQFLSENIDHDSAAGLVLTVLGSAMALLRRCRVNAALTIQLFSQLFHYINVICFNTIVANSQMCTGDWGKVMTERLQLLELWAERQGLELAADCHLAKINQCAQFLQAPKSSVEEIQQLACSCFRLNSLQMAALLQQEKLPRNLVDTAIRMAESVADELTRADGREVRLEESPELHLALLLPDDGFSCDVVRGIPTGLVDFLNPLQQQGMCRLAAQPTSIGLWTVYMHQFNARSSSAMSNKLPQPELQLIKLHKNSNGMGLSIVAAKGAGQEKLGIYIKSVVPGGAADADGRLQAGDQLLRVDGQSLIGITQERAADYLVRTGPVVSLEVAKQGAIYHGLATLLQQPSPVIQRGNRRMSERDLTRMGGAESTKSLGPLIANNHPNHSLSLSQHLNNSHNNTLGNSNNSSIINPLAAHLPNSKSVPALHHHTGSGTISLANSKSRSTHSLHNNTSGMGGIGGAAAGGMLGQPNGSQNNANGNGNGNEQGFYQNLSVYRAQNQSQPILNERPPIAAHAAMNAYNGSSPLAPQQQPQQQQQSPYQQQQQQQHMQANANLPPTRPVSAYYHSQQSAQQQLQQQQQQQQQHSLQQQQFALSSGNLNGQQQQQQQHQHQHQLTLNNRTKSQQNFQHTLRMQQMMAPSMPNISNMYHHQQQQQQQLPLQQQQQQQQQPLMSSSQSMQNVNDFAGGYQNGSLEYRRSQLHDPSTLYEIQQQQLQQQQQQQQQQQQQQQASPNFIALPPKPLGSLQSPNKPNVPPSTAPKPQQDKPPLPPTATHPLFKATQQIAPGMNYVASTLDPPKGSYVASNQGNNRPLHSGSNPWEREEREKDLEMRREHIRQWREQQISELSQIVSRSPMQEEQLKTLILERDFERRAQELQEQEEQDQEQQYDKENVQELFRLAGGGQVSAIQTPITSYRQTEIKLAEMPDSNSLVDSVPPQPPAPTAQPLSSNTQQPKSILKHNRYSEGGVGPSGAPSSPSKSQKSASFADERHLHTEHPISNLAKELNQLTMLDKDNNNETLDAVVPPPPPPERNSSYLIMSQQKLRGSTGNATSSMGLLKTATSNQAAAAVEIKKASLLNTQTNNNNNLSGSLNNNTMHGSPLSAMELNAAYVSATGTGIIGGLGTPPPPPPLMQRDNKRVSFHDEENNFVSGNSQQQQLQQQYIMDNYGMEHQDLDTIREDTSYLQHNLDASMLPSMPATPDAALWNTSVQSTPGVIGAQEVYRDPRTRRLAEKQQQQQQQRAGDAVPEKLSFKEKMKMFALESGEDKTPKDKLKISRAQRDIDAVH

SEQ ID NO: 4384 - DNA, 4215 bp, DROSOPHILA
agagcaagcaagtcaaaaagcacctgaccgcttaacttcttattaattacgaaatatttaattttagatatatttcaaattcataggtattaaaagttcgtcacttacacagttttttgccaactttttgagttttgcactgcacatgggaaaatgacaacacaatgtacttgtttctgttattttgtcaacagcatgtgatgcccggatgactctgatctagaaattttaagcaaaaagatggtcaagttttgggaagaatcctgaaagggcacaagaaatatacacaaatatcgaaaagttataaataaatcccattaaaatattatgattcacctgaaagaaaattaaatccattccaagctatggtcaattgtctctgcatagataaaagcaaaagcaattttttaaatattgaaataaacaatatatcaataacgcacttatctttaaaatcaaattatctcattagcaacacattaagttccgacttgttatcttatctcattggacaaactccagaacttgacgtggcccatctgatttcatggttacaacagcaaattacagcaaaaaaaaacatacaacgggaataaaactagagctgatttatttaaattgtttattttttctaaaacctattttatcatctggtttttctttgttggttgtatggttcttgtttcggtacgggtaaattacaatgtaaattaattatttcacatgttgaacatattgtttgggtattaaatattttttaaggagtttgatttgtttggttttctatgccctcacaacatttcggcgccgactctatatgaattctgcataattccttcacgccataaggtaattaaggttgatttaacaaagtttttgttattaaaactaattgtaaatttataagttataaacttttcttaacagtttgttaagaatttgatagcttgtaatatacaattcatacgcatttattatttgttgtctctgcttgcggctgttttcttttttttttttaattatttaattcatttttgtttgtctggaggaaatagctggttgttctaaataaatgcgtacgtttaggaagcaacataaaatgtacagtgatagtttcttgttgtatgtttcttttggatgtgtgtgtgtgtgtgtgtattcagtgaagaaatgtatactaattgtggaatagttttcattcttgtattttgaactccgcatttatgactctgtcagtgggttaaattgatcgattaacaacggacgacaaacagtggcacactggtacataatggatcaaagaataaaagccattccataggatcccagatccctgctggccgcctcttttgcaatgcaaggcattttttatacacacaagcgacagacagattatcataaaaaaaagtttgttagcagatttatatatctctttgtttgttgttgttcttcttcttgttgttagcggatgatgtgaaaaagttacaatggatgggtgtgtgcttggggtctgaggctgaagtagataatggccgtccaaagatccggcttagccgatcatcagcccgcagccgagtctaaagttgttcttcacgtggttcatgcgtccgctcagggctagtgtgaatggcaatggagccagacgcttctccaaaacaccaaagatttgccagttggaatcaattccgcctgaaagagcaaacagttaagttattgggttcgaaaagttcacaaaggatatggtctacgagtatggttatggtttaaatcaactagtataccccactcacctctgaagaccagattcgctttgggcagatcgatctgatacgctaacgtggccaccgactcctgcatccgcagactggtctccacctcggcaccgatctgcagctggtcgctggccttctggtagtagcacacgtgcagaccgctctgacccagagtccccgaccacaccgagcttccagccgtatagcggcccacgacggacataatagctatctgacggccggggacgttcggaccgaactggtaggccagttcggagcccagggcgagggctggagtgactgactggagatattggccaacgaccacgccggagttggtgaatatgctgggattggccaccgtcagcgagagggtgtaatcactaccgcgatagtcggtcgtcagctgtgaggccaccaccttggactcctggatctgtggaatatagaaaaggatataataagtaaagtaaatatatggcttagataaaggtcgatatacaaagaatcagcaaaagaatctaagcttctcactatctactcttttttgagctctattgatgcccaaacttaactagcctaatgttaactggcacgggcggtgtatcacttctgtgtatcgacatgctggtttaagtggatgccttagcatcttccgagcctaatcgcggccagaactcacctgcgaagcgaatttgcagcgcagacgggcagagaactgatggataacattggcgttgaggttgccagccggatcgatgtcgcccaggagcacgggaaaagcttccgtggggctgaactccttggtgcccacataggtggctccgaagcgatatccactgggtaccacattgctcatgttgatggtgtgcgacacctggaagtggttgctcaggcccttgttcagcatgatcttggcgccctcgaaggtgatggcctggatatctgtggcgagtagtgaatagtgcgttgataacatataatatataataacaccccgtccgatgccagcccccgtttatgccccatctcgctcccgcatgttgtaggttatgtcatcataggtgcggaggcctttttgcggggttgttttcggtcggactgactgagatttactgactgaacttcacatacctttgcactttttgtgaagctcctcaacggtgccgggattctccagcgctgcgtccttggcggcggcaagtgagtccaagccttcggcggacgaagaggattcggtcagtgagccggaattagagggcaggggagccggttcctgtaggccgaggcccagatttgaggcgccactgcctggggcgccggaggaagccgctagcacgttgcccatttcgaatgtcccgatgtaatctatgtaatttcaaagccaacacgtttcgatatcggacttctatatcggaggttattatgtctcgaccagtgttaccagatggtaagacagtctttgctccgccaaaagatgtcagtatgatgtatgcctaaaaaagaccacaacgttgcgaaaaaagttggtctgggaacactgtcacatgcgcgaacaaatttgaaaaagatttttccaacttctttacattacattatttaatttgcactactaagaaacaagtaatgattaaagaattaaaggaattacctgttgttgccagaccgatgaggccaccaatatttatggaaatttccaacaaaatctagattgattgagcacaactacgaaggtgtaaaacaacaatagaaatcgtcgcagctaagttttgggttatctatcaagtggactaaactttgcgaaaaatttaataaacgaaataaagcacatatatgtaaacagccgccaaatatgccgcgaattcttttattgtaaaattgtaaattttggaaaccgtgcagctacgaacgtttgtgtatcacacaggttgcttttttgacaattgcttcaagactcctttgatttaacaaagcggagaaatgtgcataaaaactctaaatcgattagattagacaaaaacaaagcccaagctaacccttgattaaccaaatgcatgccgtccgtattaataaaaacgtttatatttcaagttttaagtatatgtatagcttttcctttcgtatttgtgtatgtggagttatgtgttgtatgagttaggagcgcagaatctcggctacgtatacctcgtgtgactggctatcaattataggggcgaagtaaacataatttggaaagaggggttcaaactcaatcttcactaattaccgtgagtcaccgaactaaatattaacttaaaagcgattaactatatgtaattagaaaaaaaacgcattgtgtaaatatacgtaactgttttggttttttagctaaactagacgattaaacaagattaaagagtcaacaaattggtgtttaggggggaaaaggagtactggtgggtca

SEQ ID NO: 4385 - DNA, 1679 bp, DROSOPHILA
taacactggtcgagacataataacctccgatatagaagtccgatatcgaaacgtgttggctttgaaattacatagattacatcgggacattcgaaatgggcaacgtgctagcggcttcctccggcgccccaggcagtggcgcctcaaatctgggcctcggcctacaggaaccggctcccctgccctctaattccggctcactgaccgaatcctcttcgtccgccgaaggcttggactcacttgccgccgccaaggacgcagcgctggagaatcccggcaccgttgaggagcttcacaaaaagtgcaaagatatccaggccatcaccttcgagggcgccaagatcatgctgaacaagggcctgagcaaccacttccaggtgtcgcacaccatcaacatgagcaatgtggtacccagtggatatcgcttcggagccacctatgtgggcaccaaggagttcagccccacggaagcttttcccgtgctcctgggcgacatcgatccggctggcaacctcaacgccaatgttatccatcagttctctgcccgtctgcgctgcaaattcgcttcgcagatccaggagtccaaggtggtggcctcacagctgacgaccgactatcgcggtagtgattacaccctctcgctgacggtggccaatcccagcatattcaccaactccggcgtggtcgttggccaatatctccagtcagtcactccagccctcgccctgggctccgaactggcctaccagttcggtccgaacgtccccggccgtcagatagctattatgtccgtcgtgggccgctatacggctggaagctcggtgtggtcggggactctgggtcagagcggtctgcacgtgtgctactaccagaaggccagcgaccagctgcagatcggtgccgaggtggagaccagtctgcggatgcaggagtcggtggccacgttagcgtatcagatcgatctgcccaaagcgaatctggtcttcagaggcggaattgattccaactggcaaatctttggtgttttggagaagcgtctggctccattgccattcacactagccctgagcggacgcatgaaccacgtgaagaacaactttagactcggctgcgggctgatgatcggctaagccggatctttggacggccattatctacttcagcctcagaccccaagcacacacccatccattgtaactttttcacatcatccgctaacaacaagaagaagaacaacaacaaacaaagagatatataaatctgctaacaaacttttttttatgataatctgtctgtcgcttgtgtgtataaaaaatgccttgcattgcaaaagaggcggccagcagggatctgggatcctatggaatggcttttattctttgatccattatgtaccagtgtgccactgtttgtcgtccgttgttaatcgatcaatttaacccactgacagagtcataaatgcggagttcaaaatacaagaatgaaaactattccacaattagtatacatttcttcactgaatacacacacacacacacacatccaaaagaaacatacaacaagaaactatcactgtacattttatgttgcttcctaaacgtacgcatttatttagaacaaccagctatttcctccagacaaacaaaaatgaattaaataattaaaaaaaaaaaagaaaa

SEQ ID NO: 4386 - protein, 344 aa, DROSOPHILA
MGNVLAASSGAPGSGASNLGLGLQEPAPLPSNSGSLTESSSSAEGLDSLAAAKDAALENPGTVEELHKKCKDIQAITFEGAKIMLNKGLSNHFQVSHTINMSNVVPSGYRFGATYVGTKEFSPTEAFPVLLGDIDPAGNLNANVIHQFSARLRCKFASQIQESKVVASQLTTDYRGSDYTLSLTVANPSIFTNSGVVVGQYLQSVTPALALGSELAYQFGPNVPGRQIAIMSVVGRYTAGSSVWSGTLGQSGLHVCYYQKASDQLQIGAEVETSLRMQESVATLAYQIDLPKANLVFRGGIDSNWQIFGVLEKRLAPLPFTLALSGRMNHVKNNFRLGCGLMIG

SEQ ID NO: 4387 - DNA, 2858 bp, DROSOPHILA
agttttggaacttcaggtgttccaatggttttacaattaactttttccgaaaaccatattttttacaaactgaccaagtggctttcgtgtgttccgaacacacttgacgactatgactaagtcccaatccccgcgagactccgttaccgctggcagcttatcgcctggttttgataataaccaactttttggttttgttttttccccctgttctgttttattttaagaacacctaaaggtgtaaaatattagtttacgactggaaaggaggatacatatttatgtgcatgtacatacatgggcacctatctaattgtctatagtatatgccaatgtctttcctctttttttttgcgtgaatctaacttttaagtgcgagcgttgacttttcgctgggttttctttgttatcccagttcctagttatttactttactaaataccttaaccatacttaaaaggtcagtgcgcatagcttacctatgacaaatgttttttatgatcgaaaaccgagaatacaaagcgataagacagtaacatccatatagggactttctattggcgaaatggcaattgagaatttcgaacttctgaaaggaataggtgacaaatgttttttttttagcaaaatccttttgtatttaccaatggggattattgacgttttgcaaaaaccatcagttgcgtttagttcacaataactttggatgcctttgtgcaacttcatgtgactttgtttcgatttgttttcgattagccccgttttggatttctagtttctcgtctcgatctgtggcatttattcctgcccatttatggccactttttggtccgacagcgttcgcggctgtgttgcaagtgctgatggtgatgcaatcaaaaaggaggaaaatcactcaacaaacataataatatgtgggtacttgtttatttgtgaactcatgctgcaggtttgagtgtgttacgctatgatttagaatagttcctcgggtgaatgagattcattcggagtctaagggaaggtcaaagaaagtggaattttggctcttgggggcgaggcaactggtggcctgctcctcctctggcgcatccacagcatcgtgccaatcctgggaatcgtgctcctcctgctccttctgatccgttagctggagcagacgcatccgcaagcgctgctcttccagttgaatgactgaaggcctaggagcagccacttcgcgaataagcgatggcatggcggtcgtccagtttggcagcagagttaaccccgttgccctgccctgccgctccagacgctgcaactggcggcgctccatggccatcagttcccgcttggcccgggcccgcacctggtcgtcgctggtcgtggtgcagagactcagggccgcaaagatgccggccatgcccaggtagagaaccagtacggtcacaatgccggacgattcctgcagcggctcctcctcctccgcgacgtcgcatgtgggcgtcggtgtccagccaagccaagaggtcacgtggcgggtcatctccatcagttgcgacatcgttctcggttgaatcttgaggcgaagatacaaatatatataatatatgtatggtttatactaaataattatgtcattaaccgatgacaccaagcaaatggtagtttctttacttccttctagggaaatgtattcagtagtttatttttattacagcctagttttaaaaggtaggatgaatgcgctgatatgtacccaattgtaatcggtgtttccaagatgttgtatttcaagattttttggattcggtgcgggcctgcccgaccactcggaatttcagctaggtactgagtgttcgaatccctaatgttttcgaacccccatgacgctttagtatatggcctactgtgtttaaatgttgacttacccagattctatgtgtgagcttaatcatgatgactaaccaaccatatgtatatgcctctcacacagcacgactctgacagagatgggctgatcaacacgcacgagctgaaggaactgatctcggatggctattgccgggacattcccgcctacatcgccgaccagatcctgaagcgcagcgatcaggataacgacggccacctggacttcgaggaattctatgcgatgtccctgcgccacaagtggatggtgcgcaacatgctgacccgctactgtcgctacgttgtgccgccaccgaagcccttagagggcgatgagcccgacggtgcctacgagaagcaaatgtccatctgcccgccgccgctcaccatggtgctcttctcgattatcgagataatcatgttcctcgtggacgtcatacatttccagtgagtagtgatggtacaattggttgtatatgataataacactagtaatctgctatgttcagggacgatcccaactaccaggatcgcataggcgagagcacaagtggaccagcggccaccctgttcatctacaatccgtacaagcgctatgagggatggcgctttgttagctacatgttcgttcacgtgggcatcatgcatctgatgatgaacctgattatccagatctttctgggcatcgccctggagctggtgcatcactggtggcgcgtgggtctggtctacctggctggcgtgttagccggttccatgggcacctcgctaaccagtcctcgcatctttctagcgggcgcatcgggtggagtatacgcactgatcacagcccacattgccacgataattatggtaagtctttgttatactatttgatattattccataattaccttatggtcgccaaacagaactactcggaaatggagtacgccattgtccagctgctggcctttctggtcttctgc

SEQ ID NO: 4388 - DNA, 678 bp, DROSOPHILA
cgaaaacattagggattcgaacactcagtacctagctgaaattccgagtggtcgggcaggcccgcaccgaatccaaaaaatcttgaaatacaacatcttggaaacaccgattacaattggattcaaccgagaacgatgtcgcaactgatggagatgacccgccacgtgacctcttggcttggctggacaccgacgcccacatgcgacgtcgcggaggaggaggagccgctgcaggaatcgtccggcattgtgaccgtactggttctctacctgggcatggccggcatctttgcggccctgagtctctgcaccacgaccagcgacgaccaggtgcgggcccgggccaagcgggaactgatggccatggagcgccgccagttgcagcgtctggagcggcagggcagggcaacggggttaactctgctgccaaactggacgaccgccatgccatcgcttattcgcgaagtggctgctcctaggccttcagtcattcaactggaagagcagcgcttgcggatgcgtctgctccagctaacggatcagaaggagcaggaggagcacgattcccaggattggcacgatgctgtggatgcgccagaggaggagcaggccaccagttgcctcgcccccaagagccaaaattccactttctttgaccttcccttagactccgaatga

SEQ ID NO: 4389 - protein, 180 aa, DROSOPHILA
MSQLMEMTRHVTSWLGWTPTPTCDVAEEEEPLQESSGIVTVLVLYLGMAGIFAALSLCTTTSDDQVRARAKRELMAMERRQLQRLERQGRATGLTLLPNWTTAMPSLIREVAAPRPSVIQLEEQRLRMRLLQLTDQKEQEEHDSQDWHDAVDAPEEEQATSCLAPKSQNSTFFDLPLDSE

SEQ ID NO: 4390 - DNA, 6189 bp, DROSOPHILA
aatgtatgcggctacagggtactgaactgcgattcgtacttgcttttattgcagtgttcgctgcattcattcatttccttctatcgttaaacgtgaaatgcgaaaagagaagggggagaaaaggccaaaaattagacaaaaaattcgcaaaaagtaaaaaagaaattaaataaaataatatatagaaagaaaaaaaaacactgcaagcggccgccagctgctgatgatggtttttccagttttccgagatgcttttatcgcggcgacaggtttccgaaaaacccaactgtgacatgtgtgaccaaggaaacgcgtgttgcagtggcaagtggcaagcggcaagtggcaagtgcacctctgctaaacgagttttcggcgtaaattgatgatttaaaagtcatttactacggaattaatgggaatttaatgcgcaaagcggagattacatcaggcagtcattttagtattcgagcatgggctaacttacacccactcctaattgccgaaataaaccggtccgccaatgattatgtttgtgtctatccgttgcaggcaattaaggaagtgattcgtggccagagctcctcgtggacgttgtcgcgatgcggtgcagcatgcaaccgaacgaaaccgcctgaaacgccgctgttaaagcgtcaacagcaattgccataattgccattggagcagcacagaccaataaccgccggaccaacgagcacatatccaaacatcccaccatcgtcatcgccatcgccattcgtatcgccatcgctatttccagcccatcccagcacccggaccaattcaactggcaacgaaaccggcaacttgccacacgagctgagctatcggcggcaggcacacagattgccgcaaatccagctaaattgtaacagagccgccgcgccggaaaatcaaaaaatcggaaaatcccaaaagccgatacccagaccgaaatccagtggggagatcaatgaacgcggcacgcagctgacagcacttggaatccacttttgcagcagagcagccagcgaagcgtaggaaaagcgaaacggaccagctcgtttgggaccggatcggattgggcggcttcggtgcgttcagcgtttggttttcaagttcaggcggcgctgagcaggaagttgtgcggctgcaccttaattggagccagtgtcattaccactcgacaaccaccattcaccgccgctcatcctgctcgatgtaagatgttagtggccaccgacgaaaacaataccaataccaccaccgccagccggagcacacgcaacacctggagatggagccgcctggcgttggccgttagtctcttcgcctactgctgctgcgcctcatccgcggccacgcccaccacctcggtgaccacggccgcccttctcagcggccaccagctgctgccctggcaaacggcggctgcgacggcggccaccacgccctccaccgcccgcaatctgtatgcgccacaccagagcttcagccgacacgatgacatcagctttaaggatctgcgccagcgcagcgatggcacggtggtgcagtcctttggttcctatcgcaccgctcgtcagtttggtggctactcaaccactgcccagcggcgatcggaccccgccgtagaaatcattccagctccgtccgtggaactgccgcagggtgagctgatcacggtgcccaagcagctggtgcccacgatgccggagaatgtgactcgccagggtcggcgtcgcaactacatgtacataccgctgcagacggagggggagaatggatccgcggcgctgctacaactgcgtcccagtcggaacgccacgctttccgcgctgggacctccggccgatggagtggccgcagtggcccatgaatttggcgccgatctggccacccagggatctggaccggagcagccaccgctggcattggaactgggtcccgagcgaaccgaacgcagcgatcttatggccgccgccagctccacggacaagctggagtacgccgagccggagaacaccagtcgccgtgtgggcttccaatttcccagctacagcctaaagcccgccagtcccttccatccgcaggcctaccgcgaggataaccccatatttggggacaccagtgccggaggctatgagccccagccgtacagcgaagatgcgtctcccgttccgccacccacgcagtacgagcagcacgagacgcggcacacacggcagctctactttgattcggacaccgcgtcctccagcttcgagtttcccggcctggtgagcaactccaagccgcatggcctcaagctctatcgcgacgatgtgaccaagttcggggatatcaatggaccgatcaccgcgctaccgcagcagcgaccccagcgaggcttctacttcggcgacactgagttccgcactggtcctcctgctccggtccgccagtttgggccgcaaaagaacttccaggagtacgtgggacccagcgagtaccagggtacccggaagagccgctactatccctacaagtcgtcgcgcagtccgagggtcgtcttccccaccaacgacaacgtgggcaccaccggacccagtggacccgccggcagcagcggaccctccggaaacggagtctacttcagcgataacattgctttcaggtaagaatatatgaaattaaaacaatattgagtaaaggttgatatataagctaagctccttcggatataagtagatacatatttaattccttgcattccaacagggaccagaacttcggcatcaacgaattggccgccgttcaggatgtgcgcaatgactacagtctgcaggatctggacagcgcctcggaggcgactagcagtccgcagtcggcgagcacgttcaaggagaaaggtaagtgccacgtccccgacccgatctcaaccctctccaccgccacccgcattcggtagggcttaggaagggatcagtcagctgctgggaaactgcttgcactaggccacgtaaccccactcccgaaacccagaaagtctagaatccaacccagaaccaagaacccacaaacgctcacacagaacacaccccgcccgtacacaagaacataccgattgcaactccgattcccattcgacagtcgacatcacaacggacacggagtgccagcaccggggcggcacgtgcgagttcttcctgggctgctggctctccggcggcctcattcagggcacctgcgacggactgctgcgcggctgttgccaccgcacggccaagtcggccaatcttggcagctcggacttcgtcggcaatgccgtagatctcactgatctgccgcaaaagaactacggacctgtgaacaacgaacccagtgagtgtggcagcctcagatcgattgaatgccaaattgattgattccaatccaatccaaaccaagcacgtgcacactaaaccccaacccgtatccaacccccccagtacccagtacccagtacccagtacacccagtaccaagtaccaatactcaattgccgatatataaataagaggcgaaatagttgagaaataatttgcatgccaccaccacccctaacaatttacgtatgttttgtagttcgttttttcgttttgttatgtagctatgcactcgtaactcgcatttgttattgttacactcttgggtagttttcagtgcttaattaagccgcatgtggaccgaagatgcctctaacaacgcacgccagtaaaaaccaagctagagccacccgcgaaggagtcgcctcgcatcgcctatcgaataaaagacagtggagctgaataaaataagtttaattgcccggcatgagcatgttaattaccacagcacgctaatgataattaagccatatattacacatagcttaacggcattacgctccacgtccaagtgtagaccacgacgaaacagagaccccaaatcccatcaagacgcgacgactcgactcgactccactcgactctagaaagctgatctgaacccggcagcttgtttgcctaattgcttgcttggtggtcgtcccgttgttaatgcttccactaaccccatcccagataccccaattcccctacgctaagtgatcctggtgcatggttccaactcatccgactcctctccctttcaggctgcggcatttcgctggccaagcagaccgcccagcggcgcattgtgggcggcgatgatgcgggcttcggctcctttccctggcaggcctacatccgcatcggttcctccaggtgagcatctaggcgctagcttcatccaacctcagtacttagtctcccatgatttcctccccacaggtgcggaggttcgttgatctcgcgacgacacgtggtcaccgctggtcattgtgtggcccgggccactccgcgacaggtgcatgtcacgctgggtgattacgtgatcaactcggccgtggagccactgccggcctacaccttcggagtccgccggatcgacgtgcatccgtacttcaagttcacgccgcaggcggaccgcttcgacatctccgtgctgacgctagagcgtaccgtgcacttcatgccccacataggtgagagcttttccagaaatattgttatataactggtcaaattcgaagttagttcatggccaacctaaatataggacgatataagattacgtgtaaacaacaaagtatttacatctatttgtttttactaacagctccgatttgcctgcccgagaagaacgaggacttcctgggcaaatttggctgggcagccggctggggagctctgaacccgggctcccggctgcgtcccaagacgctgcaggccgtggatgtgcccgtgatcgagaaccgaatctgcgagcgctggcaccggcagaacggcatcaacgtggtcatctaccaggagatgctctgcgcgggctatcgcaacggtggcaaggactcgtgccaaggcgactctggaggacctttgatgcacgacaagaatgggcgctggtacctgattggtgcgtatataatccctatgattctgaaaattaactaatacgattgctatcctttaggtgtggtctctgctggttactcctgcgcgtcccgcggtcagccgggaatctatcacagcgtcagcaagaccgtggactgggtatcctacgtcgtcggactcacgatgaacatctaatttattctcatcgcaatcgcaatcgtatcgcatccgcattcgcatttgcacctgcctgctaagtgggccacagattgttttgtacataactcacttcattctgctccttgctccgctttcgaaccacgccgcctaatttatggttacacaagaaatacaatttaaattaagagacaaattagcgcagtacaagttagcagttaggattggcagtgcgtatctgagagatagatacacacgtgtgcgatatctgtatctatttgtatctgcaagcaccctaagccttaaattaattataactgataattacggtttaatttacttagtcatatgcgctgttatgtaattttaaaactatttatgaactccatttcgtgtgtaaataaattatacaaatattgaaatgaattcgagttgtttatttatagtacttttttagtaatagtattatagttttattaatagtacaagcaaagtccaaatgatatatttttctaattttttgaattcgttgctgttggtgttgcagtctgggtctggaaatggttaatgtgcatgttacttttgcatcggcagacgcggcacatagacatgttgaaagggaaccccagccgcagtccatccatgctccgcatcctggtagtagagtccgcccattccgccatccttcgacagctgctccatcacgcgaaatagggtgaagacctcgtgatagatcttataaaatataactaaagcatacgtaaataattgggatctccgggtcaagatatagtcggcttacccagcacaaggttgaacaccagaagacacattagaaagctcgacaggtcaatgaacagacctgcggtcgcgtagaaaacccccaagtaaagaccaaagccaaaaataacgccatgatagatcagccaaggataaattaggcagcttgagtcctgtcgaggacatatataattatagtgaagctttaaattgaatgaaagtacatatataacgtttg

SEQ ID NO: 4391 - DNA, 2566 bp, DROSOPHILA
cacttggaatccacttttgcagcagagcagccagcgaagcgtaggaaaagcgaaacggaccagctcgtttgggaccggatcggattgggcggcttcggtgcgttcagcgtttggttttcaagttcaggcggcgctgagcaggaagttgtgcggctgcaccttaattggagccagtgtcattaccactcgacaaccaccattcaccgccgctcatcctgctcgatgtaagatgttagtggccaccgacgaaaacaataccaataccaccaccgccagccggagcacacgcaacacctggagatggagccgcctggcgttggccgttagtctcttcgcctactgctgctgcgcctcatccgcggccacgcccaccacctcggtgaccacggccgcccttctcagcggccaccagctgctgccctggcaaacggcggctgcgacggcggccaccacgccctccaccgcccgcaatctgtatgcgccacaccagagcttcagccgacacgatgacatcagctttaaggatctgcgccagcgcagcgatggcacggtggtgcagtcctttggttcctatcgcaccgctcgtcagtttggtggctactcaaccactgcccagcggcgatcggaccccgccgtagaaatcattccagctccgtccgtggaactgccgcagggtgagctgatcacggtgcccaagcagctggtgcccacgatgccggagaatgtgactcgccagggtcggcgtcgcaactacatgtacataccgctgcagacggagggggagaatggatccgcggcgctgctacaactgcgtcccagtcggaacgccacgctttccgcgctgggacctccggccgatggagtggccgcagtggcccatgaatttggcgccgatctggccacccagggatctggaccggagcagccaccgctggcattggaactgggtcccgagcgaaccgaacgcagcgatcttatggccgccgccagctccacggacaagctggagtacgccgagccggagaacaccagtcgccgtgtgggcttccaatttcccagctacagcctaaagcccgccagtcccttccatccgcaggcctaccgcgaggataaccccatatttggggacaccagtgccggaggctatgagccccagccgtacagcgaagatgcgtctcccgttccgccacccacgcagtacgagcagcacgagacgcggcacacacggcagctctactttgattcggacaccgcgtcctccagcttcgagtttcccggcctggtgagcaactccaagccgcatggcctcaagctctatcgcgacgatgtgaccaagttcggggatatcaatggaccgatcaccgcgctaccgcagcagcgaccccagcgaggcttctacttcggcgacactgagttccgcactggtcctcctgctccggtccgccagtttgggccgcaaaagaacttccaggagtacgtgggacccagcgagtaccagggtacccggaagagccgctactatccctacaagtcgtcgcgcagtccgagggtcgtcttccccaccaacgacaacgtgggcaccaccggacccagtggacccgccggcagcagcggaccctccggaaacggagtctacttcagcgataacattgctttcagggaccagaacttcggcatcaacgaattggccgccgttcaggatgtgcgcaatgactacagtctgcaggatctggacagcgcctcggaggcgactagcagtccgcagtcggcgagcacgttcaaggagaaaggctgcggcatttcgctggccaagcagaccgcccagcggcgcattgtgggcggcgatgatgcgggcttcggctcctttccctggcaggcctacatccgcatcggttcctccaggtgcggaggttcgttgatctcgcgacgacacgtggtcaccgctggtcattgtgtggcccgggccactccgcgacaggtgcatgtcacgctgggtgattacgtgatcaactcggccgtggagccactgccggcctacaccttcggagtccgccggatcgacgtgcatccgtacttcaagttcacgccgcaggcggaccgcttcgacatctccgtgctgacgctagagcgtaccgtgcacttcatgccccacatagctccgatttgcctgcccgagaagaacgaggacttcctgggcaaatttggctgggcagccggctggggagctctgaacccgggctcccggctgcgtcccaagacgctgcaggccgtggatgtgcccgtgatcgagaaccgaatctgcgagcgctggcaccggcagaacggcatcaacgtggtcatctaccaggagatgctctgcgcgggctatcgcaacggtggcaaggactcgtgccaaggcgactctggaggacctttgatgcacgacaagaatgggcgctggtacctgattggtgtggtctctgctggttactcctgcgcgtcccgcggtcagccgggaatctatcacagcgtcagcaagaccgtggactgggtatcctacgtcgtcggactcacgatgaacatctaa

SEQ ID NO: 4392 - protein, 778 aa, DROSOPHILA
MLVATDENNTNTTTASRSTRNTWRWSRLALAVSLFAYCCCASSAATPTTSVTTAALLSGHQLLPWQTAAATAATTPSTARNLYAPHQSFSRHDDISFKDLRQRSDGTVVQSFGSYRTARQFGGYSTTAQRRSDPAVEIIPAPSVELPQGELITVPKQLVPTMPENVTRQGRRRNYMYIPLQTEGENGSAALLQLRPSRNATLSALGPPADGVAAVAHEFGADLATQGSGPEQPPLALELGPERTERSDLMAAASSTDKLEYAEPENTSRRVGFQFPSYSLKPASPFHPQAYREDNPIFGDTSAGGYEPQPYSEDASPVPPPTQYEQHETRHTRQLYFDSDTASSSFEFPGLVSNSKPHGLKLYRDDVTKFGDINGPITALPQQRPQRGFYFGDTEFRTGPPAPVRQFGPQKNFQEYVGPSEYQGTRKSRYYPYKSSRSPRVVFPTNDNVGTTGPSGPAGSSGPSGNGVYFSDNIAFRDQNFGINELAAVQDVRNDYSLQDLDSASEATSSPQSASTFKEKGCGISLAKQTAQRRIVGGDDAGFGSFPWQAYIRIGSSRCGGSLISRRHVVTAGHCVARATPRQVHVTLGDYVINSAVEPLPAYTFGVRRIDVHPYFKFTPQADRFDISVLTLERTVHFMPHIAPICLPEKNEDFLGKFGWAAGWGALNPGSRLRPKTLQAVDVPVIENRICERWHRQNGINVVIYQEMLCAGYRNGGKDSCQGDSGGPLMHDKNGRWYLIGVVSAGYSCASRGQPGIYHSVSKTVDWVSYVVGLTMNI

SEQ ID NO: 4393 - DNA, 4864 bp, DROSOPHILA
tatatagctgacaaaaagtaactgacagttgataagagccaataagataaatacccataatttgcaccttcgataatgaaatccaaagaggtatttaaaaaatcgccttggtcaaacgatacgcgatttgttttctttgtaatgatcaacaaagttcaagcaaagtggcttatttatgtgcgagtattttaagcggtaagcccagcttgttaagtgaatttatgagcaaaaggggcaatcaggaccgccgactgtgctttcctcggacagtccggctgctccaagttatttcgccgtggccgcgatttgtcagggccccgaaacacaaataaccaaataactcttggccccgtgctgccgcctgtaattatataagttcaaagctcgggctttcggataattctcggctcgattacacaatgacgatggtaaagatgatgacgatgctggcggttcttggcgaagcggcagccgcagaagagcagaaataataaataaataacaataatgcggatgggctactgttgcctcatcgggcggtcttatgtgtatgttttggacgggcgctgatgacgcccttcagcgatctggtggcttttatgggttctcctcgtgctgggctttggcctgcggttcatacccatgttcgtgctagtgttcgtgatcgtcttcgtttgttgccacttcattttcacttgtgttaactgtttgcctaacggtaaagaactggctcaaattggcgtacaaattcgaaggcgttaatcgccgcagcaaacggaaatggtgtggagcagccgattcgagtcgctgggaccagaataggaatcttatttgctttgtccccccatcatcatcattacttagtatataataatcattgttctgtgctacaattatactgattggtctggtgattaccttgctattgacagtccaatctggtcgtaatatccgtcatctgccctgcatcgttcgcaaatcgggacgctctggcatctgtatgttcgccatcgattgcatcaagcagaatggtacccacctgggcacctgcatcgatcgcttttactttggctcgtgctgcgccatgaaggtgagtaattagcgtcccctcaaaatcctccatagtcaactaattcctctgcataattaccaggaggaagcctcgctctttgcgccagagatcaacgacaacagcattgaccagaacaccatctcccacttttcccacgagtccaccacgctgccaaccagtgccctcttcaagctaaccacagaaagcagcttgtccagtagtagcagcagcggtagcagcaccgcccatcaccacaccaccaacgagctgctcaagaacgtcacccagtcctatctgagcaccgcgaaaccggcacctgttcgcaccaccagcaacggcacgctctcaaccacacgccgcccaccgctggcacacaccacccacaagaactcgcactacgtggtgcgcaccactatgaaacccagtgccgcaccgacaacaacgattacgccaactgttaagccaccgaggaggcgcacaaccaccgccaagccggtgctaacaactgctccgattgtggagcaacgcatcgaaaccacgtcggtacccaccaagtttgtgactttccaaattgtggagacgacgacgccagcggtgaccgaacccactcaccagcaggagacaacaaccactacgaccaggcgacacacaaggccaacgggaagcagctccgtagccagtaggacaaccagcaaaacaacaaccactaccaccaccacaacaacaaccacagcagctccacccacaacaacgagcacgagagcggccacaaccacccaacgtccaacaccaccgctgcgcaccaccacgagcaagccgcacaaaacccattccagcaggaggccagcacctgcgaaaaagccagtgagtacgacaacaaccaccgccagtggaacgcaatccacacggaagccggctgatagtctggccagcggcagcaccactgccaatggcaccacagccaccacattgccagctcgaaggcccgtgactcagacgagcagcagcagtaccaccaccaccagcacaacatcgacaataacaaccaccgtgtttaaggacgaactgcccaagaaccgcaccacaacgaggctgccagaacgcaccactcaagctccgcgacccaggccgaaacccaccggggaaatcgtcaaggtgcccgctctgcttgctgagccaacaacaaccaccgtgacaaagggttcatccagcagcagcagcagttctccaaagccaccagcaagtagcaccactcctttggtaaccaaaaagaagccaaccaccaccaacgcgccaactaccactaccactactacaacaacaacaacaacaaccacaacacctaaacccactcgaagaacaaagcctcccacaacaacaaccactactactaccaaggctacaacaactaccactaaggcgacaacaacaacaactactgcaaaaccactgatcaccacggaaccacccacaagtgcacccctaacaacaaccaccaaaaagaccggcctgataacttggaccgatgtggaggctgagccaccgactaatgccagtatttcgaacgattggcagcctgcaccaccttctaattggttgccactgaccactgaatcaagtgaaacagctgacaaaacatcagcgtccacaggtaagcgtaacaaaaaagaattttaagaacttatatttgacacgagattaaaatacgacaaacccaacgtaaaaggcagcttaataaaggaaatgtttcatattaataatagtttaccactaaataatttaaagattacccctttaaagttatttactaatgcctgttctgcatcctttcacagcaccacccagcgccaccgacaaagtggtcatctcggtggccaccagtgtcagcgaagtggagacccacggcccgggcaagccgcagaagaccacaaagccaccgaaacccagcagcacagccaagcccacaacaacaaccaccgcagcagcgacaaccatagtgaaaaccacagaggcaccagcgagcagtatagaattagcctcatctacatcatcttacacggatctgggcagtgatttggcagccagcagcagcagcagcaccaccaccaccaccagcagtcccacaaccgcagctgaaaccaccgattacagcggcgaagaaccgaacacaacgaccatcgaggctacaggcagcaccaccgtggcacccgccaatgcattggagggcgtcgattacaaagaaggtgagttcgagtgctggagtggcggcgagaaaacccgttcctgcggggagaaatctattaatacctcgtggctgactttggccataagacaaagccaacgtgcgtggccattaaattcaatttgaaggctaaacgctggccttgagccagcatcatcggactgaagaccaagaagcggagacatcttccgagatgtccgaggtgctgtcctgggccagctagctcataaatgattacacaggaagaaagcacagaccaaatcaattgaatagatcaagggaatctatatccagaggttatagtgagctctaaatatctagagtgattttctaatatgggcaaacaaaagtatctaagacttatttgccttcgaagttattagaaaatcaaaatacaatataatcgcttaattaagtgattaaatttaaacccgctcttatagatagttgtatgcgaagagttcttattcttttagatagggtttataccaccaccatgagtgatcaatttcctcagtgcaagaacactcctaagcaggacttttgctagacgcagtcggcaacaatttttacagcaatcatttacaataatgactgcatcgtgcatgggatcgcggcggtcattgtgccgcatgggtcacgttgtcggtcgtcggtcgtcggccaaagcccaccaaaaacgagccaatccgagccagaacccctgctccctgcgtcccgttgaccgatttgcggcggcaaaagcaatcttgatgcacgaatcgaaacaagtcgcgctgcagcggctcggctcggatctcgcttcggatgggatcggttcgagccaagtcgagtttgtggccataaagtaggccgttgactgcctgccttcgggcaggccaaagtcaaggactgagcctccttggccaaagcacattacatttgggcccaaatgactgagtgccaggcggagtgattaaaatgtttaaggccctggcgggcccattactttaattgtgacctgacgcaggcctattaaccaagatcccattctgaatccttcctcttcttgtatcagtttgcggtcgtcgcatgttccccgagccccgaatcgttggtggagctaatgcggcctttggacgctggccctggcagatctcgctgcgccagtggcgcacctccacctacctgcacaagtgcggagctgccctgctgaacgagaactgggcgatcacggcggcccattgcgtggataagtgagtaatccatggactaacccatagacccagtgctcatgagtgttactttcagtgtgccaccttccgatctcctgctgcgcctgggagagtatgatctggcggaggaggaggagccctacggctaccaggagcgacgagtgcagatcgtcgcctcgcatccgcagttcgatccgcgcaccttcgagtacgatctggccctgctcaggtgagttgtttgcccccctgtggtagttccaattaactacaacttccgactccgttctctggcaggttctacgagcccgtcatcttccagccgaacatcattcccgt

SEQ ID NO: 4394 - DNA, 2241 bp, DROSOPHILA
atgttcgccatcgattgcatcaagcagaatggtacccacctgggcacctgcatcgatcgcttttactttggctcgtgctgcgccatgaaggaggaagcctcgctctttgcgccagagatcaacgacaacagcattgaccagaacaccatctcccacttttcccacgagtccaccacgctgccaaccagtgccctcttcaagctaaccacagaaagcagcttgtccagtagtagcagcagcggtagcagcaccgcccatcaccacaccaccaacgagctgctcaagaacgtcacccagtcctatctgagcaccgcgaaaccggcacctgttcgcaccaccagcaacggcacgctctcaaccacacgccgcccaccgctggcacacaccacccacaagaactcgcactacgtggtgcgcaccactatgaaacccagtgccgcaccgacaacaacgattacgccaactgttaagccaccgaggaggcgcacaaccaccgccaagccggtgctaacaactgctccgattgtggagcaacgcatcgaaaccacgtcggtacccaccaagtttgtgactttccaaattgtggagacgacgacgccagcggtgaccgaacccactcaccagcaggagacaacaaccactacgaccaggcgacacacaaggccaacgggaagcagctccgtagccagtaggacaaccagcaaaacaacaaccactaccaccaccacaacaacaaccacagcagctccacccacaacaacgagcacgagagcggccacaaccacccaacgtccaacaccaccgctgcgcaccaccacgagcaagccgcacaaaacccattccagcaggaggccagcacctgcgaaaaagccagtgagtacgacaacaaccaccgccagtggaacgcaatccacacggaagccggctgatagtctggccagcggcagcaccactgccaatggcaccacagccaccacattgccagctcgaaggcccgtgactcagacgagcagcagcagtaccaccaccaccagcacaacatcgacaataacaaccaccgtgtttaaggacgaactgcccaagaaccgcaccacaacgaggctgccagaacgcaccactcaagctccgcgacccaggccgaaacccaccggggaaatcgtcaaggtgcccgctctgcttgctgagccaacaacaaccaccgtgacaaagggttcatccagcagcagcagcagttctccaaagccaccagcaagtagcaccactcctttggtaaccaaaaagaagccaaccaccaccaacgcgccaactaccactaccactactacaacaacaacaacaacaaccacaacacctaaacccactcgaagaacaaagcctcccacaacaacaaccactactactaccaaggctacaacaactaccactaaggcgacaacaacaacaactactgcaaaaccactgatcaccacggaaccacccacaagtgcacccctaacaacaaccaccaaaaagaccggcctgataacttggaccgatgtggaggctgagccaccgactaatgccagtatttcgaacgattggcagcctgcaccaccttctaattggttgccactgaccactgaatcaagtgaaacagctgacaaaacatcagcgtccacagcaccacccagcgccaccgacaaagtggtcatctcggtggccaccagtgtcagcgaagtggagacccacggcccgggcaagccgcagaagaccacaaagccaccgaaacccagcagcacagccaagcccacaacaacaaccaccgcagcagcgacaaccatagtgaaaaccacagaggcaccagcgagcagtatagaattagcctcatctacatcatcttacacggatctgggcagtgatttggcagccagcagcagcagcagcaccaccaccaccaccagcagtcccacaaccgcagctgaaaccaccgattacagcggcgaagaaccgaacacaacgaccatcgaggctacaggcagcaccaccgtggcacccgccaatgcattggagggcgtcgattacaaagaaggtgagttcgagtgctggagtggcggcgagaaaacccgttcctgcggggagaaatctattaatacctcgtggctgactttggccataagacaaagccaacatagggtttataccaccaccatgagtgatcaatttcctcagtgcaagaacactcctaagcaggacttttgctag

SEQ ID NO: 4395 - protein, 746 aa, DROSOPHILA
MFAIDCIKQNGTHLGTCIDRFYFGSCCAMKEEASLFAPEINDNSIDQNTISHFSHESTTLPTSALFKLTTESSLSSSSSSGSSTAHHHTTNELLKNVTQSYLSTAKPAPVRTTSNGTLSTTRRPPLAHTTHKNSHYVVRTTMKPSAAPTTTITPTVKPPRRRTTTAKPVLTTAPIVEQRIETTSVPTKFVTFQIVETTTPAVTEPTHQQETTTTTTRRHTRPTGSSSVASRTTSKTTTTTTTTTTTTAAPPTTTSTRAATTTQRPTPPLRTTTSKPHKTHSSRRPAPAKKPVSTTTTTASGTQSTRKPADSLASGSTTANGTTATTLPARRPVTQTSSSSTTTTSTTSTITTTVFKDELPKNRTTTRLPERTTQAPRPRPKPTGEIVKVPALLAEPTTTTVTKGSSSSSSSSPKPPASSTTPLVTKKKPTTTNAPTTTTTTTTTTTTTTTPKPTRRTKPPTTTTTTTTKATTTTTKATTTTTTAKPLITTEPPTSAPLTTTTKKTGLITWTDVEAEPPTNASISNDWQPAPPSNWLPLTTESSETADKTSASTAPPSATDKVVISVATSVSEVETHGPGKPQKTTKPPKPSSTAKPTTTTTAAATTIVKTTEAPASSIELASSTSSYTDLGSDLAASSSSSTTTTTSSPTTAAETTDYSGEEPNTTTIEATGSTTVAPANALEGVDYKEGEFECWSGGEKTRSCGEKSINTSWLTLAIRQSQHRVYTTTMSDQFPQCKNTPKQDFC

SEQ ID NO: 4396 - DNA, 2978 bp, DROSOPHILA
tacgcttgtataacggaatcgtttgcagacccacatttaggcgggtgaggttcagggtgaagtaagcactggcagccttggtgtgtagcttggtctggccctcggccacgttggcccattcgcgctctgacccaaaggtgaagtggccgccaccgaggctgggaaactgggccagctgctggaaatcgccagctcgtaactgggcacgggcattctcatcgatgggtgcaccatccaggcccaattgctccacatcgtcggtgtcgctgggcagggtgtccagcatgtccctgttccgttgcggtgccaacgatgagcggcctgctccactggactgccaattgccacgcctggccaaccttggctcatcgctcgagtccgccacatcaaccatgctgcgacgggaggtgggtggtggcgatcccgacgatgtggtggagcgcccttgatcctttttatggtgatgattgtactgcttcatgttcctgcgctttctgtaaaggatgggttgttattattaggtgctaactgcgaggtgagtggttacgttgcacgtactccttggatcgatcgtccttgccggacattttgatgggggttgtgtggtttccggggtgttatttatctggtaattccgattcaaaatcggtttgtttattccttcgttcagcgacgcgagtgtgagcgggatggataatgcggcaaacagctgttcccttaactgagcgcagggtggccaggctatattgttgcaacataaaaaagtaacggaaaacgaaaaatataaatatacatattaacaacataccatatgaacattttagtttattacataaataaaatgattgttcaattacataaaaatacatatttaactataaaatctaatatttgtaataaatatttaaaaatatatatataaaactcaaggctacgtggcagccctgtgggaatcgaacagctgatgtcgataactttagacgataagctgccaaaggaaattgaaaattttcacaattttttggctaacgaagcaccggtgatgttggacttcctgacggagctgcgaagcagtggttctagggcggatcagctgcccggcaacatatacaccgagttcttcgcgaacgttatcgaggagcccagggaacatggatgcaagtcagcggatcaggattttacacaaggattctccatgctacgcactttcgataccgaaaatagcaatcaattggagccgccggcggccacggatgcggatgtctggatctttggctatgggtcgttggtatggaagacggacttcccgtacatagaccgacgacgcggcttcgtttggggattcaagcgtcgcttctaccagcacagcatcgatcaccggggtattcccgaacgtcctggtcgcgtggtcaccctgctgccaggcgatcccgcccaggatcgtgtctatggcgtcgcctatcgcatagctgctagtcaaaagggtgctgtgttggaccatctggattaccgggagaagaacgggtatgagcgctgcagcttggagttccacgagtatccgactgacggtgcagaacccatccaagtgatcatgtacgtggccacgcaggcgaacgattcctatgctggtgatgtgtggcaagttccctgtattgcgaggcaaatcttcagctcggccggtcccagtggccccaatcgcgaatacctattcaacctggccgccgccatggatcagctctttccgggagctgtagacgagcatctcgaagaactggttgcttgcgttaagcgttacattgtcgaggatgagccccagttaatacgccatgcgctgttgcatgagatttccggtattctggaggaggaacagctagcggagcaggcacaccagctggagaagcttttggagcgatgtcagaaacctggcggccgcgagtggttgatctacgctgcactgcaagctaaaaacaagtcgtgacaccacaacattttgcaatagaagactactgtttattgtaaataccaagaagcttgggatatttctttttagatgcaccattccaaatagaccaattgcaacgacgtgttatagaggcttctgacgaatcacaattacgattgtgatttcctgtcatgaacattattatttattcattattatatatgaaaacatattttaaatataaatttaaaacaaacatttgtgtgattttatttaaagtgaattgtcttgtgatttgtggtatcattaaacattgaattattaaatatatagtagttataaaaatcataaaatatagagagcacgctctaggccggatagaacgtataaatctatgttgatagtaacattaatatctaatctttaaatttataattcaggaatcacggcattcagatagtactcaatatagcgtttatcagcttttcgaatcaattccaatatttattttatttccaccggtgtaaattaaccatttttcaatacaatggcacgttatatatgaatctaattaggcaagtaacttaaaggattttaattaaaagtttctagatttaatttaattttacggggaataccctaaatagcgaacgtgtagaatatagctgtgctgctttggtctcactgctagaaaatatcgataagattgatatcgataatgcccaagcttgccgttcatcgatggcgcccagtcgtcgaagttttcacagctctaacagttgagacaacattttgagaaattgtcgtttgttttgtcgtgctttttgtttaaacattgcgttgtgttttttgtttatcgcccccgtgtcgatctgatctgattcggttcgccaatccaattggattgggcaagcgccacaaacgttcaacagcggagtgaatcgccatgaaacaggtgggcggggcttaacggtttgcgggggggttggttggtatttagtgggtggttgtgttgcggaatgtgttattgttgctg

SEQ ID NO: 4397 - DNA, 978 bp, DROSOPHILA
attgaaaattttcacaattttttggctaacgaagcaccggtgatgttggacttcctgacggagctgcgaagcagtggttctagggcggatcagctgcccggcaacatatacaccgagttcttcgcgaacgttatcgaggagcccagggaacatggatgcaagtcagcggatcaggattttacacaaggattctccatgctacgcactttcgataccgaaaatagcaatcaattggagccgccggcggccacggatgcggatgtctggatctttggctatgggtcgttggtatggaagacggacttcccgtacatagaccgacgacgcggcttcgtttggggattcaagcgtcgcttctaccagcacagcatcgatcaccggggtattcccgaacgtcctggtcgcgtggtcaccctgctgccaggcgatcccgcccaggatcgtgtctatggcgtcgcctatcgcatagctgctagtcaaaagggtgctgtgttggaccatctggattaccgggagaagaacgggtatgagcgctgcagcttggagttccacgagtatccgactgacggtgcagaacccatccaagtgatcatgtacgtggccacgcaggcgaacgattcctatgctggtgatgtgtggcaagttccctgtattgcgaggcaaatcttcagctcggccggtcccagtggccccaatcgcgaatacctattcaacctggccgccgccatggatcagctctttccgggagctgtagacgagcatctcgaagaactggttgcttgcgttaagcgttacattgtcgaggatgagccccagttaatacgccatgcgctgttgcatgagatttccggtattctggaggaggaacagctagcggagcaggcacaccagctggagaagcttttggagcgatgtcagaaacctggcggccgcgagtggttgatctacgctgcactgcaagctaaaaacaagtcgtga

SEQ ID NO: 4398 - protein, 311 aa, DROSOPHILA
MLDFLTELRSSGSRADQLPGNIYTEFFANVIEEPREHGCKSADQDFTQGFSMLRTFDTENSNQLEPPAATDADVWIFGYGSLVWKTDFPYIDRRRGFVWGFKRRFYQHSIDHRGIPERPGRVVTLLPGDPAQDRVYGVAYRIAASQKGAVLDHLDYREKNGYERCSLEFHEYPTDGAEPIQVIMYVATQANDSYAGDVWQVPCIARQIFSSAGPSGPNREYLFNLAAAMDQLFPGAVDEHLEELVACVKRYIVEDEPQLIRHALLHEISGILEEEQLAEQAHQLEKLLERCQKPGGREWLIYAALQAKNKS

SEQ ID NO: 4399 - DNA, 4766 bp, DROSOPHILA
atttcagctgaacccacgtgttggcattgtttacattcaatagtgctgaccatctgatgctggcctagctaaaagtagctaaatgaaaaggctaaaaatatagctaacgtaaaggttatttatttttaacaatgtttagtttgtttagtatagttgtttagttacattttttttgttcaaaagtgttcatatttgaatactacgatttaaatgtatagagtgtaacgccatacgtttgagatttttcattagctagattcgcctcgaaaattgccaccttggcatgcatgtcgctgaaacagctgttcgctgtactcatgttattttgtgttgttgtgctcgcatgttttatggttttgctgttacgttgatttcattgcaacacaaatagtgcgttaattaaacagattgctaatcgagtgagtgcgaaatcacctggaagtcaaaacaagttttatttgctcattctaatgaacataataagcaatgtttatttgcacagcgtgtgggtcgaaggctgcgtaggtgtgtgcgcgatgtttttgttatcgagcttgtatatctatttatcgcaaacgatagcaactccccgttatacattttgtggcgcaatatttgaatacgcacattttgtaactagatgttatcagttattataattagatgtgttgtgcgtataaaaagtcttatcggtcaattgctctagcctacaatttacaagccacgcacacgcgcgcctgtcgcatatgatctaccccaattttaacgctgtttccgtgccgattagattttgtttatttaccagttttttttttgtcattagataccaccgctcaatcacctgtgagtgaaaactacgagtgagccgaagagccgttcgtcggaggtctacgattccggctctattgatatggctgcttgtctgttgcgctacttagttcgacagagtcgcaagcccagatcactggtcgtcagtagagagagctcccactgtagtagaatgagcacctacagtacggtgaccaacctcagtacagtgaaaatgcagcgcatccagcacctggcggcattccgatcgggtgttagcctggcggaacgcgtacttaatccaccacagcagagtattaatggaaatcatgtctcgggcaatatccaatgcagcagcgataacaataacaaggatacaaatgcagcctttgaggtaaatctaaaacaattcccaagtcccaagttggaaaccaacagatacaatttttaattactttgtcatagttttattacctattacttattaatatcatacctttgatttcacaatcgtagcattatcttttcgatttcaaaaatgagattattctaaatctaaataataaaaaccattcatgtgttttcagaattatgtgtgtgattaatatgaaatttggtattacagtagcaaatgtttcatcttcagtgtgaaatgtttctatatgtcatgctgacccagctaaataccaaattcgtttgttattaattaattaatttcctaccgttttcagttggccattaagcagttaaattccctgcaatcgaacgatgctgccataaggaattcaatgagtaattcccgtgtggataccaaagcggataccattaaatatctggagcggagtggtctgccgctggaaactgtagagcaactgtccttcatccatgtggccggcaccaagggcaaggtatatcaatggcttcaacctgttttcttatggttctcttggctttgctctctcgtgcgttgagctcttgtttcttccaatcagagaattgtggcgaggttgctaatcgctcagttgctgattagatttgtttaggttccaatttgatatttgttttgatcaatctgtttgggtttttgataccctttatgcgtctatcagacgggtatatgtacatatacatatgtatatcaatataattgcagttaatatttaatttacattcatttcgagaactttaaataatatcattatcttcttttggtttgggtaattaattcctttctatataatgaatctaaattcgtactccctggctagtttgtatgtaagaggagtatcatattgtccattgtaatctctcaaatgttttttgtttcaaatttcagtttctccataatttcagccttgacttctctgctttttatttgcacgtttttgtactggttaatgggacacgtccatagataactaacataatcagataaaatcgttgttaaagtggattagaattctgataatttagcacttgactatttgaatgaaaaagttgctgggcttccaacataccttttaattcagaaaaataccatagaaataatgaaattcacataaattgccaatacgacttccctttaagtttttaagttttaagttttattgttattaatgatgatgaatacgtcttcatatagggctccacctgcgccttgacggaatctctgcttcgccatcaaggtttccgcacgggattcttcagttctccccacatcctcttcacgaacgagcggatacgtatcgatggccagttgttgtccaaggataagttcacggagcagttctggaaggtctacaaccgtctgtgggatctgcgggaacatgatcacgacatgcccgcctactttaagttcctgaccatcttgggatttcatgttttcgtcgcagagaatgtggatgtggtcgttttggaagtgggcatcggtggtgagcacgattgtacgaatatcgtaagaaatgtacgcacggtgggcatcacatcgctgggactggagcacacggagctcttgggacgcacactgccggaaattgcctggcagaaggcgggcatcatcaagaccggatcgcatgtctttacccatgtcactcagccggaatgcctggaggtgatacgtcagcggacaaaggagcactcggccacgctctatgaggttccacccaccgaggattactttcgatcgaaggcatatgctccgatttggcagaccttcagtaacttaattcgcctaaatggctcattggccattcaattggcccaagattggttgtcgcagtcgggaaaacagcagcacactcccaacgaggtgaaaatggatccacagctgctggacggactgattagcacccactggcccggtcggtgccagctaatcgaatggcacgggatgcgattacatctggacggagctcacactctggaaagcatggaagtgtgcacggactggtttgaaaaaaacgtgcgagacaggtgagcggagtaggaggagatggtcctataatacataactgattcgattgacttcctcatttgcagtgtcaatccaaagattctgatctttaatcgcaccggagaatccggtttcgcacctctgctaaagctactcaaccgcacctgtgactttgacatggtctgctttgtgcccaatttggccacctcaacgccaaatgctcccagccaggtgatggttcgttttagtcccgaaatgcaattgaatcgggcgaggatcattgcctcagcttggagtgacctctgcgcaacggagcaaaaaaaagatgtgggtcaggtgtataatacgctaaccgacgcttttactgccatcaggcaaagatttccacaagccacagacaatgagggacaactagaggtcctcgtcaccggttccattcatctgctgggagcagctataagtgccctagatcttatcgatgatcccaaatctagaactgataaataagacacattcctaaccaggagaaccggctgaaacactgggattgctattagattagctattagatttagaagtcgaagcaagccacttgcatatcacttagtggaactttaacatgaatcgctgaaagcatcagctaataaatgtagttgtagttaataataaaacaatatttgaaatattgtgtagaaataataaccctatgaagtgttttatgcccatttttagttagcagcaaacttatgattaatggaataaaagtttgcatatatagtgtgtatgccacaatacttactcactaaatattcaaaatgggtgattttaaatccttacggacatcgaacagagttgccaactcgccgacggtgtttcgttgatttctggtccttttacctttttacataccactttggtgcgttttagagctcgtaactcgtgcgactgacgcagatttcaaaggcgacattagactgggccaaggaaatgcgagagctttaagggttgcttttttccccgggccatttaggggtggcccagaatgacagccaatggcgcggcggcaaccctgggcgaagagagagacagcaagctgttgtccacctgctctcccaccgggctaacggcaaacaaaatggctaacgggacagcggaagtcggtgagcgagcgggatggcatgctgctgttttgttgatgctgtgtgtctaaggcaactgattaaataacggttaaatggcagcggccattgcgaaagtttcctttttgtagctacattttttttcactcattttgctgttgttgttgctggacttttcctctgcaaacgtcgacgtcgacgtgggcgctaaactgtcccgtttacagcaacaaatccgcgtaattcacttgtgtgtgtgtgtgtgtgaggggtgaatcctggcgatgttcgctaaaaggattaataaacgttcgacgtttcgcatttcagttgttcatttgactcggcgcttagcggttcagttacag

SEQ ID NO: 4400 - DNA, 1569 bp, DROSOPHILA
atgagcacctacagtacggtgaccaacctcagtacagtgaaaatgcagcgcatccagcacctggcggcattccgatcgggtgttagcctggcggaacgcgtacttaatccaccacagcagagtattaatggaaatcatgtctcgggcaatatccaatgcagcagcgataacaataacaaggatacaaatgcagcctttgagttggccattaagcagttaaattccctgcaatcgaacgatgctgccataaggaattcaatgagtaattcccgtgtggataccaaagcggataccattaaatatctggagcggagtggtctgccgctggaaactgtagagcaactgtccttcatccatgtggccggcaccaagggcaagggctccacctgcgccttgacggaatctctgcttcgccatcaaggtttccgcacgggattcttcagttctccccacatcctcttcacgaacgagcggatacgtatcgatggccagttgttgtccaaggataagttcacggagcagttctggaagttcctgaccatcttgggatttcatgttttcgtcgcagagaatgtggatgtggtcgttttggaagtgggcatcggtggtgagcacgattgtacgaatatcgtaagaaatgtacgcacggtgggcatcacatcgctgggactggagcacacggagctcttgggacgcacactgccggaaattgcctggcagaaggcgggcatcatcaagaccggatcgcatgtctttacccatgtcactcagccggaatgcctggaggtgatacgtcagcggacaaaggagcactcggccacgctctatgaggttccacccaccgaggattactttcgatcgaaggcatatgctccgatttggcagaccttcagtaacttaattcgcctaaatggctcattggccattcaattggcccaagattggttgtcgcagtcgggaaaacagcagcacactcccaacgaggtgaaaatggatccacagctgctggacggactgattagcacccactggcccggtcggtgccagctaatcgaatggcacgggatgcgattacatctggacggagctcacactctggaaagcatggaagtgtgcacggactggtttgaaaaaaacgtgcgagacagtgtcaatccaaagattctgatctttaatcgcaccggagaatccggtttcgcacctctgctaaagctactcaaccgcacctgtgactttgacatggtctgctttgtgcccaatttggccacctcaacgccaaatgctcccagccaggtgatggttcgttttagtcccgaaatgcaattgaatcgggcgaggatcattgcctcagcttggagtgacctctgcgcaacggagcaaaaaaaagatgtgggtcaggtgtataatacgctaaccgacgcttttactgccatcaggcaaagatttccacaagccacagacaatgagggacaactagaggtcctcgtcaccggttccattcatctgctgggagcagctataagtgccctagatcttatcgatgatcccaaatctagaactgataaataa

SEQ ID NO: 4401 - protein, 522 aa, DROSOPHILA
MSTYSTVTNLSTVKMQRIQHLAAFRSGVSLAERVLNPPQQSINGNHVSGNIQCSSDNNNKDTNAAFELAIKQLNSLQSNDAAIRNSMSNSRVDTKADTIKYLERSGLPLETVEQLSFIHVAGTKGKGSTCALTESLLRHQGFRTGFFSSPHILFTNERIRIDGQLLSKDKFTEQFWKFLTILGFHVFVAENVDVVVLEVGIGGEHDCTNIVRNVRTVGITSLGLEHTELLGRTLPEIAWQKAGIIKTGSHVFTHVTQPECLEVIRQRTKEHSATLYEVPPTEDYFRSKAYAPIWQTFSNLIRLNGSLAIQLAQDWLSQSGKQQHTPNEVKMDPQLLDGLISTHWPGRCQLIEWHGMRLHLDGAHTLESMEVCTDWFEKNVRDSVNPKILIFNRTGESGFAPLLKLLNRTCDFDMVCFVPNLATSTPNAPSQVMVRFSPEMQLNRARIIASAWSDLCATEQKKDVGQVYNTLTDAFTAIRQRFPQATDNEGQLEVLVTGSIHLLGAAISALDLIDDPKSRTDK

SEQ ID NO: 4402 - DNA, 3999 bp, DROSOPHILA
cattgcctttcacccactaacttattaatggatgagtgttaacaactgttgtcaatcgaccgtccaaagaaggtctaaatcaagccaaaagtatcaaggtcgtctgtgcagctacaaagtgccaccccaataagtaggcaattatatataacaatctagctcgattctattttaaggccaaaatgatgctatttcagttgagggacgaacagttaccactaagtcgacttagtacgcataacgtaacccacattagaagttatttaaaagctgtttgagactgttcattcgtttgctagaagcttttgcataaattgttttaattacttttcctgggggaagtcatcacgaaactgaatacaattaacaacatttagcaaatgaaaggaaaattcactttgagctttcgtgttctcccaggcaggctcaactttcacatgtattataatttccttttaaaacttgcaaatatgaatattctttaaatgtgcatctttaattgagtttaatgaaatacttgaataagctaagtttccatttcctttaatttttaacgattcttaacttataccttcggcatacattaacgatttttgcttatttggttgatggcttattaagctaacgtgcaaaagtaggcaatatgctaaaattgcataatttattgttacccaccgactttatatgtgagcctttcatcaggccatacaaatggagacacgagagtgaaccaagtctgagaatacataaattaaggcacagccggtaatataataacgctaaaagcaagccgacaattttaatgagctgcccgacggggatatttgccgggaaaacgttaatagaaccgctgatgcgattctgagctggaagacagagatttatatgccccacgctccactcgagcgcttgaacacggaagtttgctcctcccggaggtcagcaatcgactcctgggcgggcatacgttttaattaagcgtgtactcggtttccattttcacagttcatcgggagaaggagagcgggctttccactagtgatgatgtactaacgtgaccactatgagcatttttccgaggtgggcagccatgctgctgctcctgggcctggcccaccagctggacccctcgctcgcggcgtccgcatcctcgttcgcatccggaaacgcctggcagcgcgccctatttggccgggaatcgcgcaacttgatgcaccgcagagccccgttttccggagccgctgatctgggccttgacgaatacctgggcccctatggcgccgtcgagcaggagcagcaccagccgcatcctccgccgcagcaggtgagtgcatgagtggaggttgtgattgcaggtatttgcaggacgaaactacagggtatgtgtacagtaaaacgggatgatgggcaatgtctgcagctaggaaaatggattcgtttatctaacgaagtttttaaaggaaggctgaaaagctatttcgattgtaaattgtctaaaccaacagacaggacaattttcaagatttagttttatttcaagtaattttaatttattagaaaagcatgaaaaaaactcttttactttctgatttaaaaacaatcttttgagcatacgattttaaaattcaaatgaatgtgtgctcttgaaaaatggcaatcttttaatgcatggaaaaaagattcctggcttaagcagctagaggcgactcccaaactcaataaaaatcgcaccactcgaacacatctgaaaacgcatacgccgtgtgggcgtgccacaaatatccgaaggcgtctggcgccgtgttttgcagcaatttgaaattggaacccgtatgcttgtatggttttattggcccactggatcaatggtttcaatcaacggaaatttcagagttcgcgctgaaactcaaattaattaacgcgcaacgagtgtcagcgttattgatagccaaccaactgctgcagcgcagtaaggggatatacatatagcgcatacgcaccgtgcgcccaacaaatgccacactaattgccaccgcactcgaccttccccacagatgcgccaacagaccgaagtttacggaatcgtggagccgctgattgaggacacgccctgtgccgaccgaccctgcctcctcaacgacgattgctgtccttccggagtttgcgtcagcacatacggcggtaagttggtctaattgcacttggtccgctgtgacccaacccactcacttacacttggaatagctaatgctgacaatagctaatgagacaatacttggaatcatcctagacaaacaaaattttaaatatgggattaaaacatttgaaagaaagtggacaccagactgaaactagcattaggatctacttggctattgacctggatcaagagcctattgtactttaaggtgttggaaaggtttctttctatctattgcactatttccttaaaaataaggataaattttttacatcaactgatgctattctacaacccattacaaaaatgttatataaactctatcattttgcagaaggcaaatgcgtatatgtctttgggcgtcagcgagatctgtgccagggacatgcggactgtccgcagggcagctcctgcatgctggtcccccaggagggagcgtggcggtgtgagccgagcgtggaatcgggaggatccacgtcgctgctggagggtatattcggagcgaaggagaggcaaccgctgggcagcgagtgcagcagcagcagcgactgccaggtgatcaagtgagtccgcatagcgctgataagcccaattcaggtctaactgtcccactttccagcggaatgtgctgtcaacagcagcgtttgcaccaccgggcagccattaagctgagctgtggctactttcgcgatgccttcgactgtgtagatatggtcggagcagaggtatggatatagtccaaaaacaaaaatacgaatttgagttatattatattcccgtacagcatcgacgcaactgaagatcgcagttctcgggtagcaaagctcattaaaccgaaggaaagtagccaaacagcaattgaattggattgagtatgaattacttcaatattgaaacatatcaagttgttaaacaaatacatatcaaggtcaaattgctatagcttagagcatttgtatttctataatctgcatatgaatatttgctattactcaaacgatcttagacatctagatgtgtttttagtagagactccaaatatactgactgaggcattcaatgttaatagcagaaagaagagtattccaatgcagttttaccatacttaagcaacaattaaatcgtttcacgtctaaatgtaaatcgaatacaataaaagcattaccaaatatctgcactttcactgaaacttatttggtaacaatatattcgtatttgaatgagagaaaggtaagttaacggatttattcttgggactaatatattattaactcttaaaaatatatatattaaattgagttcaaacaagttcaaattttagtaaaacaaaaacacaactagacgcacctataaactagtgacgaatgcacctgaacaacatagaagacttttgatgtggcgaaagcaccaagtcttatgacccaaaataaacttacataataaattttatgttcttgcccaagcaaacttaatgaattaatagttgaaaatacaccagaagatagtgaataaaaaccgcagaaaattctttacaaatattttcggttgattttatttttgtaattttatttaaagtgccattaaaaacgcagcttaaagctaaaagttagactctgtttacactttcaacgcttttgtttttaacattacacccaagtaaatcattcctcctttcgttcttcaactctctgacattctatatatctctcatgatccaatccattcacgaataatacacattgcaaatgctttcgtccctaactttatggctgagacacttacttcgcttacttgagcct

SEQ ID NO: 4403 - DNA, 801 bp, DROSOPHILA
cacagttcatcgggagaaggagagcgggctttccactagtgatgatgtactaacgtgaccactatgagcatttttccgaggtgggcagccatgctgctgctcctgggcctggcccaccagctggacccctcgctcgcggcgtccgcatcctcgttcgcatccggaaacgcctggcagcgcgccctatttggccgggaatcgcgcaacttgatgcaccgcagagccccgttttccggagccgctgatctgggccttgacgaatacctgggcccctatggcgccgtcgagcaggagcagcaccagccgcatcctccgccgcagcagatgcgccaacagaccgaagtttacggaatcgtggagccgctgattgaggacacgccctgtgccgaccgaccctgcctcctcaacgacgattgctgtccttccggagtttgcgtcagcacatacggcgaaggcaaatgcgtatatgtctttgggcgtcagcgagatctgtgccagggacatgcggactgtccgcagggcagctcctgcatgctggtcccccaggagggagcgtggcggtgtgagccgagcgtggaatcgggaggatccacgtcgctgctggagggtatattcggagcgaaggagaggcaaccgctgggcagcgagtgcagcagcagcagcgactgccaggtgatcaacggaatgtgctgtcaacagcagcgtttgcaccaccgggcagccattaagctgagctgtggctactttcgcgatgccttcgactgtgtagatatggtcggagcagagcatcgacgcaactga

SEQ ID NO: 4404 - protein, 245 aa, DROSOPHILA
MSIFPRWAAMLLLLGLAHQLDPSLAASASSFASGNAWQRALFGRESRNLMHRRAPFSGAADLGLDEYLGPYGAVEQEQHQPHPPPQQMRQQTEVYGIVEPLIEDTPCADRPCLLNDDCCPSGVCVSTYGEGKCVYVFGRQRDLCQGHADCPQGSSCMLVPQEGAWRCEPSVESGGSTSLLEGIFGAKERQPLGSECSSSSDCQVINGMCCQQQRLHHRAAIKLSCGYFRDAFDCVDMVGAEHRRN

SEQ ID NO: 4405 - DNA, 2413 bp, DROSOPHILA
tgccagggtgggttgcagtcgcaggatcagatcgagagccatttaggctggtgtccattacgaactcaatgggggaggctgcaccgggggagattttaggttagtttcgcacctgatccagattaatggaaccgctggggggtacactcaccgcaaacagaggcgccgagcagagcgcccaggaagattagccggagcgcagataacatgttggctattcgcaccgacgatagtgtgtgcgacccgacccgagctattgttattgtttgtgcagcccgagagcttttcttttgttttccacgatcgcacgcacgcacacgcgcgtcgcaagttcaaagtctgtggcctgcaaatgagattgttgtttcgcggcaggacgaggcggggccgcaggagcaggaggagcggcaggaggacacctcagacagccactaattggccccgaactgcgcatttatcgcgtaggacaggcgcccgcgaattcccacatttggcgggggcatggccgggaatatagactggcgattctcacaattagcgaatctcgatgggggcccgcaatgcgaaactcgaactccacactccgcacaagttggttggaaaaactgctctgctctgctttacatttcacggacgagggcgacttttcaggcggattttcatcacgtgattggggcagtggcgcgggggaagtggcactatttcatattccgcgggacagccggcactttcgggtgtctggggcaaccgtttgtttatattaattgctgctattttttcttaaatgtacaattttgtgcagcgaaaaaccgcgctggtgtgtgtggatttgcaaacagtgtgaccgcacctgcagtagtgtgcccaggctggactgcccatgaaaaacacccacccgctagagaagtgcgtaaaaatgcccaatcggttatgtttttatggacaatgatttttgttaaaatattggttgtttccaggatacataaaaaaatttcgatttgttttgtaacagatatttatttgcaatagctgcaggtactgcacccgttcccagaaacccaaccagaaccaaaatgcggggcatacgacagcaaaatgatcatgtccactatttttactgccataacagactgaaaaggttcagaggcggcatgccaggctcagctcccttcataaatcctgcgaaaatgagaattggtcaaaatcaatgtcggtccatttgatattaccccgctgcttcttcttcccagccgcgtgtagattacaaaaaacatgaaccacaacttacccaaatacagcacaagaggcacgaatccccagtggaatccagtctggacgactccaaccacaaatcccaaacgatccttaactccctcggatagcttcatttcgtacggatattgaatttagctccttttgcgaattatgaaatgataacttgtctgactgcaaacgaagtgttggaaaacagcacttttttcgatataaaacagctgacagaaactttttgttaggttactcgttcaatttatattttcttgggatggctttgtcgcaggttgctgggcctgaaataatttaccaatttaaagaatcagtaaaattatttcgaatacagatttctgttggtgtggcaacattgacatttgagcgcaaaatttaaattcgcttctaaaacggtcacaccgttttgccctttgggttttaatctgatattctttaatttatattttccactataaaggtttttaactaccatttcaccgacaagttgtctattggacacatatcatgaaaagaaaaaagtgtgcttggtctgaaaaataccttttcgtatttttaatgatcccgcaatatttttgcatgtgtactcccatcaactttaaagatgttacatttccaaagtttcaaattctgaaagcgttggaaatgcaacaagaatttgaagtaaggaaacttctttttaacgctcaaagttttcgttgatttcttaacaatatgaagcataaaaataaaaaatacccctgctatctctcgcagcaggcaagtgctccgtagatcgatactatcgcagccactcgaagtcccatctctaatctcgagtccctttcgcacttgcccgctactcacatgagttctagatcgtttagttttcttggttttcatttgctcgccaaattttagcaacgttgctggtttaatcggctgcacctgcaatcgcggttaatcagagagcgccgagcactaaagttcccattgccaaacgaaacgtaagtgataaagaacgccagcaatgagcgaacaagagcaaagcgcacgcagtcggggaaaaatcaattgatgttatgtaagctcgaataaccggataccgtgtctactactgttgcaggtcccgatttgctcgatttggaac

SEQ ID NO: 4406 - DNA, 331 bp, DROSOPHILA
gttttgtaacagatatttatttgcaatagctgcaggtactgcacccgttcccagaaacccaaccagaaccaaaatgcggggcatacgacagcaaaatgatcatgtccactatttttactgccataacagactgaaaaggttcagaggcggcatgccaggctcagctcccttcataaatcctgcgaaaatgatgaaccacaacttacccaaatacagcacaagaggcacgaatccccagtggaatccagtctggacgactccaaccacaaatcccaaacgatccttaactccctcggatagcttcatttcgtacggatattgaatttagctc

SEQ ID NO: 4407 - protein, 82 aa, DROSOPHILA
MRGIRQQNDHVHYFYCHNRLKRFRGGMPGSAPFINPAKMMNHNLPKYSTRGTNPQWNPVWTTPTTNPKRSLTPSDSFISYGY

SEQ ID NO: 4408 - DNA, 3542 bp, DROSOPHILA
ctgaaaaggttcagaggcggcatgccaggctcagctcccttcataaatcctgcgaaaatgagaattggtcaaaatcaatgtcggtccatttgatattaccccgctgcttcttcttcccagccgcgtgtagattacaaaaaacatgaaccacaacttacccaaatacagcacaagaggcacgaatccccagtggaatccagtctggacgactccaaccacaaatcccaaacgatccttaactccctcggatagcttcatttcgtacggatattgaatttagctccttttgcgaattatgaaatgataacttgtctgactgcaaacgaagtgttggaaaacagcacttttttcgatataaaacagctgacagaaactttttgttaggttactcgttcaatttatattttcttgggatggctttgtcgcaggttgctgggcctgaaataatttaccaatttaaagaatcagtaaaattatttcgaatacagatttctgttggtgtggcaacattgacatttgagcgcaaaatttaaattcgcttctaaaacggtcacaccgttttgccctttgggttttaatctgatattctttaatttatattttccactataaaggtttttaactaccatttcaccgacaagttgtctattggacacatatcatgaaaagaaaaaagtgtgcttggtctgaaaaataccttttcgtatttttaatgatcccgcaatatttttgcatgtgtactcccatcaactttaaagatgttacatttccaaagtttcaaattctgaaagcgttggaaatgcaacaagaatttgaagtaaggaaacttctttttaacgctcaaagttttcgttgatttcttaacaatatgaagcataaaaataaaaaatacccctgctatctctcgcagcaggcaagtgctccgtagatcgatactatcgcagccactcgaagtcccatctctaatctcgagtccctttcgcacttgcccgctactcacatgagttctagatcgtttagttttcttggttttcatttgctcgccaaattttagcaacgttgctggtttaatcggctgcacctgcaatcgcggttaatcagagagcgccgagcactaaagttcccattgccaaacgaaacgtaagtgataaagaacgccagcaatgagcgaacaagagcaaagcgcacgcagtcggggaaaaatcaattgatgttatgtaagctcgaataaccggataccgtgtctactactgttgcaggtcccgatttgctcgatttggaactggaacggaccatgaaaacaagcaatctcggcctgtacgctttccgtttaaccttcggtcaggtgagcacacgcacattaaaccaggcagccaaacggcagaaacagcatgcgcattctgggggaaacctctgagtttttcggccgggcaaaccaaggaccaccacaatcgtcgttgagaatgcagcgactgcagccgggagacgagtgtctggagtgccagagtgaaggcaggaatcacaagctgcgctacttttacattaatctcgaggagcagctgctgaagtgcgagtccaggagctgtttgtggccacacaacgatgaggtctcctctgatgaagatctgaactcggaggcagcacttcccatcactgctccacaatctgaactttttgaatctcctgctgctacgctaccttctcaccctgcggccttaacgtccaaacctcctccaaatgatgacgaatttatattggaactgctgcagcaattgacttctgccacagaaaccccccttaagacaaatgtgagttccagttccatgccaaatctgcactcgccttcagaggaaaaaccctgcccacaactggagcttcccgacttaagctttctggaggagaacagtaccgtatgcaaggaacccccacaagcattgaaatcagagctgggagtaccttcaactgtcgtcttacccgacagattaataagtccgcccaaggcaaaagcagtacaaactgaggacaccaaagccaaggaacatgtggctcatctgaagggagctacgtcccaaagctggcaaggcaaagctgaaataccattactacccgcttgtgtgaaggcaagtgtgaggatgtctcctagcatcaaatctaaggggtctcccttcagcagtccgcccaagaaagcaaccacccagccgcaaggtcagtcaccaccgtcaacgccgcctgccgtcaatattattatcagtgttccggagttaaacacgggaatgaacggcttgtttctagacgccattaaacgccattccacagaagccaaacccgcgctacgtggcgtagggagacgccctaagcgactggccaagggaaccaccagcagggggggcattcgcacacaggatgtaatgcacttgatcgagcatttggaaaccaccacagaagcgaaacttacgacaccacggacgtaataggctggcatttagcttactcaagtatttgaaataaatttgcatatgaaataatgcatgaaacctccggataagaattcaagttcgtttatttataaacaagtccgttacgctatgtttttttttttttttggcaactcaaattgtggattactaattcgcggcacgcgtctagagcatgttcaagtggacaggagagatagcgctgccgacaagagagcgtgctatcagtggaagtgaactttggaaaggaggtcgtggcaactgcgtcacgcggagatctgtttcaagccgcgattagctgttgagctgcagagactgactgataatgcagttgaacgtcatctaagcgctgtgacagtgattgcgatagtgatgtcagtcacgataatatggcattacatcgaccctttgcaatcagttcaataatcgtgcgaccatgtggggtaatcgcattcgtgtggacggccggggcacttgaacctagttgccaactgccggcgtaaattgtttctgctgcgtagttgcctgtgtgggcgggggccgtcgggcagtgggccaagtttattgtttgtttggattgatatatataaaacgagcgaaaaactaaatttgtctccctatcttatctcccgcaggcgccgacgttgtccacacaggccacgacgcactgcagccatggcttcaccaccagctcgtcgtcgcccaaccgtgtggtgacccgctctgccaccatgctggcgctcttcggcatcgcgctgtcctcgttcagccttaagcaactgctggccaagaagcagaagcaccagggcctgcgcaagctctagaatggagctatagccagaaagattagagcgatgccaacgccaacggttgaagcggcgatgaggagccagagcgccatgtcctgaggtcacacattcgatattttcatcatccgccatcatcgtgtatatttgcctaagttaagtcacccactcaccacagacccaagcggaactcggacatggaggcttgttttgtaatattctgttcgataaactaactgatcggaggcgaggatctgtgcgc

SEQ ID NO: 4409 - DNA, 1423 bp, DROSOPHILA
atgagttctagatcgtttagttttcttggttttcatttgctcgccaaattttagcaacgttgctggtttaatcggctgcacctgcaatcgcggttaatcagagagcgccgagcactaaagttcccattgccaaacgaaacgtcccgatttgctcgatttggaactggaacggaccatgaaaacaagcaatctcggcctgtacgctttccgtttaaccttcggtcaggtgagcacacgcacattaaaccaggcagccaaacggcagaaacagcatgcgcattctgggggaaacctctgagtttttcggccgggcaaaccaaggaccaccacaatcgtcgttgagaatgcagcgactgcagccgggagacgagtgtctggagtgccagagtgaaggcaggaatcacaagctgcgctacttttacattaatctcgaggagcagctgctgaagtgcgagtccaggagctgtttgtggccacacaacgatgaggtctcctctgatgaagatctgaactcggaggcagcacttcccatcactgctccacaatctgaactttttgaatctcctgctgctacgctaccttctcaccctgcggccttaacgtccaaacctcctccaaatgatgacgaatttatattggaactgctgcagcaattgacttctgccacagaaaccccccttaagacaaatgtgagttccagttccatgccaaatctgcactcgccttcagaggaaaaaccctgcccacaactggagcttcccgacttaagctttctggaggagaacagtaccgtatgcaaggaacccccacaagcattgaaatcagagctgggagtaccttcaactgtcgtcttacccgacagattaataagtccgcccaaggcaaaagcagtacaaactgaggacaccaaagccaaggaacatgtggctcatctgaagggagctacgtcccaaagctggcaaggcaaagctgaaataccattactacccgcttgtgtgaaggcaagtgtgaggatgtctcctagcatcaaatctaaggggtctcccttcagcagtccgcccaagaaagcaaccacccagccgcaaggtcagtcaccaccgtcaacgccgcctgccgtcaatattattatcagtgttccggagttaaacacgggaatgaacggcttgtttctagacgccattaaacgccattccacagaagccaaacccgcgctacgtggcgtagggagacgccctaagcgactggccaagggaaccaccagcagggggggcattcgcacacaggatgtaatgcacttgatcgagcatttggaaaccaccacagaagcgaaacttacgacaccacggacgtaataggctggcatttagcttactcaagtatttgaaataaatttgcatatgaaataatgcatgaaacctccgga

SEQ ID NO: 4410 - protein, 359 aa, DROSOPHILA
MRILGETSEFFGRANQGPPQSSLRMQRLQPGDECLECQSEGRNHKLRYFYINLEEQLLKCESRSCLWPHNDEVSSDEDLNSEAALPITAPQSELFESPAATLPSHPAALTSKPPPNDDEFILELLQQLTSATETPLKTNVSSSSMPNLHSPSEEKPCPQLELPDLSFLEENSTVCKEPPQALKSELGVPSTVVLPDRLISPPKAKAVQTEDTKAKEHVAHLKGATSQSWQGKAEIPLLPACVKASVRMSPSIKSKGSPFSSPPKKATTQPQGQSPPSTPPAVNIIISVPELNTGMNGLFLDAIKRHSTEAKPALRGVGRRPKRLAKGTTSRGGIRTQDVMHLIEHLETTTEAKLTTPRT

SEQ ID NO: 4411 - DNA, 7938 bp, DROSOPHILA
tagctgcagacgaccctcgaaatcccatccgaacctttggcaatgcaacacatctcattagtttacggctcgtagcattaggcaatggcaatgtgcaatccgccgccagagacgcattacttattagatttaataaacaaaacaattagcctattgtaatagcgtttgccatttggggaagtgggctgcagaccgaccttgaacgccgccacccgccgccaaaaaagagaaaacatggcggctcaaacaaacgagcctcttgttgggttatgtcactggttgtggcctatttggtggggtgccacaaatggcacaatccctaactgccaggcggtaatttgtacattaggcgcattaagcttaggcagcctgcgttgcccaatgttgctgttgcgcagtgcaactgctgctgttgcaccgcatcaacattcgtatgggtcgctgtatgtcgctgagcggtggcaatgaaatccaaaatgtgtgtcatcgaacggtcagttattattggtaattggctgcgatttggctcggttcgaaaacttctttgcgccgaaagtaaatgtcacgcttgagacgctgttcgatgctgctgctgagtgctgagtggtatgttccgcctgcaatttgttcggcaattgttggttttgctaaaacaccaattcgagttttgagggaaaacgcgacttcctctttggcgtggaatggtgatggtagagaggcgaaattgggtattagtcatggcgacaaaagcagcaacatgcaattgccagttgccagttgagcgacaaaactcgttgccttggccactttcgttttcaatgcgggtctctcgccgtcttagcttggcttttctctcggtccgctctttggtgactattactcaatagtcggagctcggctgggctcgctccgtgccgtaccgctcgccagtcggttggcggtgttgatggcattttgattttgaatttgtcagccgccgtttattaagtgcttcgtcgcgacggcacagtgttcgcgaactgcggatgcatttggacggcgcgagaccgcagaaagcgaagtgtaaaatattaaagatacgctctaaattatcgccaggcctgcacgaccagaagtgaagaagtgtacggtggagaaaattgtggactttattccgtttaccagggcgggcccaacactgcacatcggcctgctatgcaaacgaggcgcgattattcaatcaaaaactcgcgccgctacgtgaattaagtgaaacacaattgcagaaatcagtgacagacgcggcaacaacaagtgtacacaacaaaaagtacgaaagtattgcaaaatgcgcccgccgcagcaactgctcgtgttgctgcttgcaacagtggccgcagctggccacagcagctacaattcggtttacaacgaggtgatcccgccgaagctgaagcaggccatcgaccaggagctgcccaaggaggccaagttcttcgatgagctggactgtgagtattttggctgaaaccgcccttccctcctagcgtcgagtcaaatcgagttcgttgcctaagtctttcgttcgcctggcacaatttgcatattagttaacacgccatgcttaaccttgatcttcgctgctcctccatgtcaagcgcaggccaattcccaattggggaagttgtgaaaccccttttgaaaatcggacttgggcccccggcgaaagttcagcattccgttcttgggcagccaattcatcttgtttaattggactttccaaaagaaagacacgaaagccaattaagaccgagcttaaggtgattacccattaacataaaggcaccaaatgcgagatgtaaactcacatagaaagcctgcgattttgggcaactgtgaatgactatcaaaacgatggccagcctggccaaatattataaatcaaatgccgcagcgtggcggctgcacaagttcaatggcagcagcagctgccacggatatatgtaatacgagtatgagaaaagcaaaagtgtttccacatacaccgatacacggacaggaaaatccactgcaattaacttcaattgcgcactcgcagtattcgaaagtgttaacagcgagccccgtgagtcggccattttcccaaagattatagattatttggtttggccttttatgtaagcagaaaccttggccaaaaatacaaaccgacgacaacaaaaaacaaaaaacaaaaaaaaacgtaaacagcccaattgaagtcgagcaaatcgatggcttggcaacatgttgccggctcgctggcaacaccgctgcgcagccgctctgcgctgctccgattcgatccgatccgataaagttgctctgcaagtgaaatggccacaagcggcgtttcttcgtgtcttcggctgcctttcggacctggctgctcggctctgggcttggcggccgcaaaagcttggcttagttctgagccgattttcccgacgcgcggtcgcctttccgtttgctcgctcctcgacgactgtgtgcgcatgcgtaaagaaagataattccagaggcacaaaagtgaagtgaagattacgcttttcttttcgagcgtcgaaaccgcgcatgcgtgaactgcgccagaaagcgccaaatgataataaaagtgaaatcctttgtgaactagtggcaggactgcagctggtcgcgagccagtgacggctaaaaatcaatcataagccagcaagcgaaagtgccactacccccatcgaaagtgaaagtccgcgtgggacaacccctttcgtttcgcccacttgccatgctgccactgcccaggcactccaaggacacctggctgcggctagtggtcctctgtgccctgatatgtttgtcagcgcccagaagagccgatgctctgggctatcccagtgcccagcaggagcacgacatgctcatcctggacgccttgtcgcggcgcagtggaaccggatactatggcgagaacagcgtgatggagatgctttcccgaagtacttagcctcgaaccatttgacccgacatatgttagacccccaccctgccacctctcaactaatcttgttccccaaccgcccctgtctttgcagtgataccgcagtcgtgccgctttcgtggccacaagttcgagtgcggcctgtccatctcctgtgtcttgggcggcggcaagccgctggatctttgctctggcggcatgatctggtcttgttgcgtggacaaagatctcgacgccgaggagagtccgcacgccgccccggtgaacaacacgagtgagtatcccccaaccgacatatccacatcgatccacctccattccgattcccaaatccagacacacatctgattctgaaagacatttagcctcgattccctgcaattggaaaattgctgcgcttgcagttatgcaactcggtttcgtataatagcgctataaattagcttgcatttcgaaaatgacaacaaattgctctgtgcactagcacacaatctgaagcaggggtctttcggtgccttagggatatatgcaactaaataacgcagaacgcagataaaattgtatttagatagtattgctagtatggcaagcttaacatattccttagtcttgcagttaaacgtatattatcatataatctgaaaacagtttgtatattttacaaaatgatctttaatttttgaaaatatactaagcatgtcattcttcttcaaagaaatttccaaaaccagagatgtataataatatacaatacaaagttaaaactaaaactttatatttctctaatacgcgttttgctattcaatccaaaattaataatatttataatgatctttatcatttttatgtgagctattcttaaattaaatatacctctacaattaattaaaataaaaatggaagtagtaaaccaaaagttaaagttaatatcttaagaggcatttattcttggatgtgatttagtattactttcatcatgagtatgataactgctttctcacccttctaagcctttttctgaaattattttctttttgggtgagaacacaattgtgggaaagttctcatttagtaagaagcccaattcttgaccgcagaatatagctttaatttgatgaaatatgttcacattcctaaaaccaactcgaaagcatactctaaacgctggcttgtggatcgattggcttgccatcaagtgcattgcttctatcgtaatcgcagtggatgcaattaccaattcggcaatagctgcagctagaagaccaaggagacgagccattccacttatatgtattatgccacacacgcatcggtattgcccacggagttttatttatttggttacttcaacctgctgttttccatcttcagctgttccgcagctattttgttgtgctctgtttagttttctagttttctgcctttttttcgaatgcgctcgttacgaacataaaagcaaacctgaacaataacaaagcattacaacatgttatgaataattcttggtggaaaattttgttttccccgtctctcactcgctcatcaatctcagtctcagtcttagactcagcctcaaccttttcttttgccgcaatttaacttaattttgggagtcttttccccacattttgagtcaaccttttcctcgaagcccataaagaagcgggttctgcgtgctttctttggtatttcatgtgtaaagttttcccaaggcgtctggtgacaatgatgaagccaaaaactgaaatccgaaaaccgaaaaccggagtcaaccccgaaatgggcaaaactcacttgcggaaataaacgaaggtgaacgtttttgcatttaaaagtgaaatttttggttttctttctttgtttcacttcgactgggcgccctgcactccatccctgccccaccgaaatctttattattttgtttgctttcaaatgtgggaaaaatcacagcgccaaagttacggcatacccgaatcaggccgagatccgagctctgagctccgagctcctcgaaagtgttaatcaagtcatgacgccgttctgtccaccaaatggctttcggattggtttgaattacgtgcgaaacacccgaacacccagtctttgtcttaatagccccactgaccagtctgagcccaaattttcagctgacataatcgcattcgtatttttattacgaatgccgaccagtttttgggggaaagtctgacaccgactccgttggcaatggtgacctctggagtcgctggccagaccatcatcctgtatcccaattctcacacacaggcgacataatacacttgcatgacatttaccccgacctgtcgacgaatgccaacaagccgcagcaccacctgcaccaccacagtggcaacggcctgtcagcggccccatccacatcgtccacagcgtcctcctccgcacgaccggcttacccaagcagctactacggcaccaagcgaccaacccactacagcggctccaatccctacaagccaggctcctccgctggcggatctagccgcccatcctcctcctcctcctccagcctaaacagctgggagcacgagaccggtggccacctgggctctatcagcgggatcacaaaccacctggacagcttctttgacgccgagtcacaggcgcccttggactccgccggcgcaccaccaccacacgaaccgctgcccaacgcacaggcctttgcggtgggcaatgtcctggaccttaatgctggagaggcagcagacgagtaccaaagtggaggcagtggcggctaccacgacgccagctatcgtccagtgccgggtacaaaaccaccaccatatcacacatctctctttctgtggcaccactgcaattggttcttttaagctgcaccacacaaccactcaccactcactcactatgttgctatcctagtttctgtagatcatttcttgacttactttggtgctctattggttggatcaatgaagttacgcttacttactttatatatatttctattcccaggctgcggcgaggtctacacccgatccaatcgcattgtaggaggacattccacgggctttggctctcatccctggcaggtggcgctgatcaaaagtgggttcctcactaggaaactcagctgcggcggtgcactgatctccaatcgatgggtgataacggctgcccattgtgtggcttcgtaagtacagcaaaaattgaatggaaatcttttcaaagcatacttatatatctttgattccttcgcagcactccaaactccaatatgaaaatccgattgggcgagtgggatgttcgtggtcaggaggagcgcctaaaccacgaagagtatggcatcgagcgaaaggaagtgcatccccattacaatccggcagactttgtaaatgacgtggctctgatccgcttggacaggaatgtggtctacaagcagcacatcatacccgtctgtctgcctccttccaccaccaaattgactggtaaaatggccactgtggctgggtgggggcgaacccgacacggccagagcacagttccctccgtactgcaggaggtggacgtggaggtgatctcgaatgatcgctgtcagcgatggttccgggcagcgggtcgccgagaggccatccacgatgtgagtaaacattggcatagacttaagaccggcataggtcttcccttaaaaaagatctacattgagcaacttcttttcgtccaggtcttcttgtgcgcaggctacaaggatggcggccgggattcgtgtcagggcgacagtggtggtccactaacattgaccatggacggtcgcaagaccctgatcggattggtgtcctggggcattggctgtgggagggaacacctgcccggcgtctatacgaacatccagcgtttcgtgccctggatcaacaaggttatggccaatgacaacgcgtaggcgccaacgcgcaggtgtgcgtccgctgcggagatgcatgccgtcagccaggccatgtgattcctctacgactcggggttgctagtgtgtaagaccgaggtccttggggccttgtatttattttatcatactccacatcctagggttcctcgactcaatcagtccaaccgttcgatccctccacccttcattcgacttcattgcattccacgcattctatttaagttttctatatttattaaacactgttcgaataattcctacatttgcgatccactttcactgacatcgtattgataccaataattatgttttaaaaataaaaacaaaatgtaccaaaataccatggctttttattgacaaacgtctgatgtgaacatcaaagataattttaattacaactttttaaaactttataaaacctgcattaactcgctgaaattcatgcaacagaatttaacttttacattgcaatttccatttgacgtggttcgcgtcttgggtaaataaaaacaagctgcatactttcaggcagcatctcaatcaatatacagatgatgcacaaagaacatgatttcgaaatggtttggaatctgtgtttatcttgttgggcaaataagaaacagaggcagcaaacattagccagaaatgccagaacaggcacgaacatcaaacagagatatcttctgagatagcgcgggaaatccaaaactgggtccatggccgtgcaacaggtgccacatgctgagcatgatctgaatttctaatgagcccgacttccgctggccaccaagcagtaaccaatgaccagtatcatcgctgggcatcaaaactcaataacataatcagggggagaagaatcgaaaaggagcttatcagcagctctcctctctcaccaggcctcgctcttagcatccacattggcatccacttcttcgggcaattggccaaagaatcggggatcgcttggctttccaggcctcagttgctgtggagcagc

SEQ ID NO: 4412 - DNA, 2049 bp, DROSOPHILA
acggcacagtgttcgcgaactgcggatgcatttggacggcgcgagaccgcagaaagcgaagtgtaaaatattaaagatacgctctaaattatcgccaggcctgcacgaccagaagtgaagaagtgtacggtggagaaaattgtggactttattccgtttaccagggcgggcccaacactgcacatcggcctgctatgcaaacgaggcgcgattattcaatcaaaaactcgcgccgctacgtgaattaagtgaaacacaattgcagaaatcagtgacagacgcggcaacaacaagtgtacacaacaaaaagtacgaaagtattgcaaaatgcgcccgccgcagcaactgctcgtgttgctgcttgcaacagtggccgcagctggccacagcagctacaattcggtttacaacgaggtgatcccgccgaagctgaagcaggccatcgaccaggagctgcccaaggaggccaagttcttcgatgagctggacttgataccgcagtcgtgccgctttcgtggccacaagttcgagtgcggcctgtccatctcctgtgtcttgggcggcggcaagccgctggatctttgctctggcggcatgatctggtcttgttgcgtggacaaagatctcgacgccgaggagagtccgcacgccgccccggtgaacaacacgagcgacataatacacttgcatgacatttaccccgacctgtcgacgaatgccaacaagccgcagcaccacctgcaccaccacagtggcaacggcctgtcagcggccccatccacatcgtccacagcgtcctcctccgcacgaccggcttacccaagcagctactacggcaccaagcgaccaacccactacagcggctccaatccctacaagccaggctcctccgctggcggatctagccgcccatcctcctcctcctcctccagcctaaacagctgggagcacgagaccggtggccacctgggctctatcagcgggatcacaaaccacctggacagcttctttgacgccgagtcacaggcgcccttggactccgccggcgcaccaccaccacacgaaccgctgcccaacgcacaggcctttgcggtgggcaatgtcctggaccttaatgctggagaggcagcagacgagtaccaaagtggaggcagtggcggctaccacgacgccagctatcgtccagtgccgggctgcggcgaggtctacacccgatccaatcgcattgtaggaggacattccacgggctttggctctcatccctggcaggtggcgctgatcaaaagtgggttcctcactaggaaactcagctgcggcggtgcactgatctccaatcgatgggtgataacggctgcccattgtgtggcttccactccaaactccaatatgaaaatccgattgggcgagtgggatgttcgtggtcaggaggagcgcctaaaccacgaagagtatggcatcgagcgaaaggaagtgcatccccattacaatccggcagactttgtaaatgacgtggctctgatccgcttggacaggaatgtggtctacaagcagcacatcatacccgtctgtctgcctccttccaccaccaaattgactggtaaaatggccactgtggctgggtgggggcgaacccgacacggccagagcacagttccctccgtactgcaggaggtggacgtggaggtgatctcgaatgatcgctgtcagcgatggttccgggcagcgggtcgccgagaggccatccacgatgtgagtaaacattggcatagacttaagaccggcataggtcttcccttaaaaaagatctacattgagcaacttcttttcgtccaggtcttcttgtgcgcaggctacaaggatggcggccgggattcgtgtcagggcgacagtggtggtccactaacattgaccatggacggtcgcaagaccctgatcggattggtgtcctggggcattggctgtgggagggaacacctgcccggcgtctatacgaacatccagcgtttcgtgccctggatcaacaaggttatggccaatgacaacgcgtag

SEQ ID NO: 4413 - protein, 573 aa, DROSOPHILA
MRPPQQLLVLLLATVAAAGHSSYNSVYNEVIPPKLKQAIDQELPKEAKFFDELDLIPQSCRFRGHKFECGLSISCVLGGGKPLDLCSGGMIWSCCVDKDLDAEESPHAAPVNNTSDIIHLHDIYPDLSTNANKPQHHLHHHSGNGLSAAPSTSSTASSSARPAYPSSYYGTKRPTHYSGSNPYKPGSSAGGSSRPSSSSSSSLNSWEHETGGHLGSISGITNHLDSFFDAESQAPLDSAGAPPPHEPLPNAQAFAVGNVLDLNAGEAADEYQSGGSGGYHDASYRPVPGCGEVYTRSNRIVGGHSTGFGSHPWQVALIKSGFLTRKLSCGGALISNRWVITAAHCVASTPNSNMKIRLGEWDVRGQEERLNHEEYGIERKEVHPHYNPADFVNDVALIRLDRNVVYKQHIIPVCLPPSTTKLTGKMATVAGWGRTRHGQSTVPSVLQEVDVEVISNDRCQRWFRAAGRREAIHDVSKHWHRLKTGIGLPLKKIYIEQLLFVQVFLCAGYKDGGRDSCQGDSGGPLTLTMDGRKTLIGLVSWGIGCGREHLPGVYTNIQRFVPWINKVMANDNA

SEQ ID NO: 4414 - DNA, 7606 bp, DROSOPHILA
tccatttaactcaagattttgtctgattttgctaattaagtattaaatagttctgaaatgaataaattatattctgcaagggtatacaattaaaacaaaaaaatcgcctgctgtctgacaaaaacttaacccactatctcgctttttgtcgcgctttatctctttctctcctctgaagctttgcgctttcttctaggcaaaaacaagatcacccaaaacacctgtccttttcatccacactctacccccctctctgtcgcacccactgttctgctgctttgggaaatagtttcttcgctttgtctctgtctttagaacagatgtttttttttcggaattttggatggttgggttcaggaaaattatttttttgaagaatgtgctttcgagccattactattacctaaaagtcaccttaaataacgtattttatttttccaaacaaattgaaaaccgtgttatcttaattgtgttgaatctctaaagaatacatacatttcagtaagaaatagtataagaaatgttaaaccaaaagaacagaaagtgcacggaacaaaagttcaataggttgcataaaaaccattatatcatctatattttattggaacatcagcttgggatctgtggagaactgttgagacctgtcttttaagtggcataaagtgggaactgttgatgattcttcgctgatgggttcttttctcccaatttcgttttctactctcccgataccaccatatactctcaaaaaaccagaaaccccttttcggttttgcatgatctcttttgttacttcctcgctgagacccttatgtttgtccacattactaattcttacatgtttgtgatccactgtagagctgctgccgatgcggcaccttcgacttatggaggagtggctggaaccgctggaccggtgaccaacactgcggtggctcgtccgccgcgcagacgcactcccttgcagttcagccgaccgcatttggtggcctcgtatgcgatgagtctgctgctgaaggtgaagcccaaatacgcgggacgtggacgactgcgcaacgatgtggaggtggcaccaccacgcatacgggacggtacgagcagcctgctgcgcatgtatcctggtcccttgcagggacgcaagttgcacaaggacaagatcatcagtttctgcaaggagcagatccgactggggcccacaaagggttgcaccgcactgtatgccacgcagaagaagccacagggcagcgtgacgaaataccgtgcctcccatgcgctcatgtggcacctgctaatacttttgctgcgccaaaatggggtaagtaggaatctgatcagatttggatatgatttctaatcattcgttttatgcttattcagtacattgcggacacggatgtgggcgatctgctgctggagaaccagcaagagtatccctatgatcccagcgagttcgaagcagagaacgagccagatgcggatgccgaacaggatgccgctgcaccggcggacaagacagtcgattcggatttagatagcgaatcggcagcaggagttacacctgcggaaccacttgcagcaggcgcggcaactagctcaatcaatggagctgatgctgcaaacgcagcaacgcctctgtcggaacaggcggcaacggacaagttccgcagctatgtgctgcgcggaaatgtcgaggaggctctccagtgggcaaccgacaacggcctgtggacgcatgcattcttcttggccctctacgaggatcgctatgctctcactgacgtagcccagaagttcctcaatcgagcgatcaaggccaacgatccattgcagacactataccaaatgaagagctgccacacaccggcgtgcgtcagccagctgagggatgaacagtggggtgactggcgatcgcatctctccatcctggtgacgaacaagagtcgccagccggagtatgatcgcagttcggtagtggcccttggcgatacgcttttccagcgcggcgacatttatgcggcacacttttgctatctggtggctcaggaggagttcggacgatacgatagctctgctacagagctaactactctgaccgccaatgtgcccaggtgagtaatgctctttatagcttttgatggcccatttacatgtcaaacgttcgattacaggcttattctacttggctcctcgcactacaagcacttcaacgaatttgccagcaacgaggcgatcatcatgaccgagatctatgagtatgctcgatcgctgttcgatccgaagtttagcattgcccacttccaacactacaagttcctgctagccacaaggatcctagattatggtcagcatttccgctgcaccaattatttggaacaaatcgccaggcacatcgaactgaagccggaaagctacgacagtaatttcattcagcgggtaagactctttaaaatagctaccccatatgcgacataatcaattttaaatgtgttttaacaggtttgcggtttggccgaacgcctgcgctaccatgatcccattctcattaatcgtgtctcatttgcgagtcctccgaatgccactagcaaggatagtgctgctgctgaagagaaggcctggttgcgtcagcttagatctctggcctatgtggtgaggtcaaaccttagagagcaccgtttgttaccctgctaattcgataatccttccttgcagcagccccaacaagagcagctgcaacaactgcagcagaatcagcaagtccagcaggagcaaaacgacatcgatcagcagtttgcagaggtgaacaagcaattcagggagctaaacatgcaatacgagagcaacagcaacatggagaatacgctgcagccgcagttgccaccggtggatcaacagccgccgcaacagcagcaacaagttttatcggaatcgtaccaacagccaacacaacaatattatgagccaccacctcaagcgccaaccgaatccgatccctatggacagggccaaccgtcctattatgatcccaatgcggggcagcttcattacgatccaaatgctgcacagcatcaatacgaccagcagcaacctcaaccacagccgactcccagctatggccaaatagagccaggaactgaggcctaccaacctggacaagcaacagcagatccagctgcggttccctctggctacggatacgattactggtcgggcacacagcagccaccttatggtgacgaggtaagtgctggttagctatagtcagccgtccttaaaccctctgtatttccatttgatgaactcatttttttgataaagctccaaagttcgtttaaaaattgtggttttccgtagtcgctttaaagaaatttcagctcccttttataggatataaaataagcatactcttgaattgctatacagagggttaatttgttgcttattttacctttttagttcgttttaagttgatcaatgtatgttatgctttagttttgtattttatgtaattctgtttacgccttaagttttgatctgtcttgaacttgtgttatagccatagaagtaggactcgccaaattgctaacatgtttctaatcacattgcacacacaaaacgaaaatataaacatgcctctatccaaatggaatgcagcccaatgagaatcaagctgcactaaaggatgaagaggaggaggatgaggagcaggatgaacagcagatattgcagtacgctaaacagcagattttgcagcaaaccaagcagcagcagctgcagcaggagcaacatactcgcagcaatggcgccgccagcatcaacaatcgcttcaaatcgaacgctctgaagcaggaacgcagcagcggctcattgcggaaaaggcaagaggcatcacgaacagcaacaatagcagcggcagcagcagctattgctcagataacaccggcaacagttgcagcggcagcgacgccaccagcagcatcggcaaaggcattcaatttgaatgatgtaagtagcttttccagcacaaataaacgacatcaagctaccagcagcagcaacaatcgcagcagcagcaaccaagcagcagcagcagcagcagcaacaaaagctgcagcaatagcaacagtacctgctgcccctaatcaattgctaagttgtagaaagtctaacagccagaatagtccatacttagccacgccaaaaacgcttaccacgcccacacgttttattgccgctaaagcagccactgttacagccacgcccacagcgccagccacttcgacgacaacgtcgacaaccataggtgctagaggatcatctaccaaacgcgtttactttaatcttccgtcgaccattgctgaatcggagcaagagttcgaacatgagctggattatgatgaggagatggaggaggagaacagtatggctctggcgcaagctaaaccaaacgttcatctagcgcgaaagccacatattgtctttaatggaacgtatcccattgatatgccactgacccaggggcagagtcaactcaaaagcaactcgtatgatccggaggccaatgcagatcgtggggatctacagcgctataggaactacatgctccacgattatgttatagatgaggatgccgagggcgaggagcaggccgaagaagagggcgaggaggatgagtatggagatggtgatgaggatttattcccctatgccgacgacgatgagagcttcgatgatggcgattactatacgcatcaactgctcaataagtatgggattataccaagcggtgagaaacagagagtcgagagaacaccggcatccgtggaggcagctacctccgcggcccagccacagcacgtgtggtccatgaaggagctgatagccaatccagccataccacttaactacaagaaaatgtgctccgaagtggagcagagcctcagtcgattcgagaattatttggacagcaaaaaggagcaacaggtgccaccgggagccgcagtgcgcaccttcgacatcgatgcacccactcgaagaggccaccgaagcagcacatccacaaatgctggcttggatcttagatctaagaagaaattgtaaacaaactgactgcagtttgctgttttagacttagtaatacccacaaatgatcagtcagtatttacaaattcaatgagttaggtaacaagaaaataaggatgagcaagtgcatcgctgcttttttgggagctttctgtactgtacctggagcttgtcttagcctgttagcttgtaaatctataactagtcttaatgcgtccctaagcaatatgttatcactaagccttatatacgataattgtgagccagattttttgactgcgccagttactttgaaacgtttccgttgttcattcgatttaactaacccataactactctgttactaaccaacccaaaacactcttacctataatctatgacttatgaataattcgtttgcatcacgcagaagactaattcgttgccatttcttaactccaacctcaattttgcaatccgcacaacagctgcagcaacagacgcgcccggcgatatccatgcccaagtcaaagagctacggagatgaggacgatggtggttccggtggtgtggctgatcctggtcagaaaaccaagcctgtaggctcctctgaggctgcaggcaaacagcaggcgtcgggcaaacaggccaactccggcagcgatcttgggtgagtccaaaatcgaattccaatcaaattgggtgtggtgagaagtacaattcaaggaaaacaaattaatcaaaagcgggagacaaacttctaaatagtatatatcattttgaacacagcgcacctgggaataaaaatgcgggctggtttggcggactctggaacaagttgtcgctaaagccgaagaaccaaatgatcctgccggatgacaagaatccggccatcgtctgggacaaggagcgcaaatgctggacaaacaccgaaggcaacggcgacgaggctgaaagctttaagccgccacccaaaatgagtgatctgggcatggctctgggaggaccacccgctgcgccaatcggtaatgccggattgggaatgggtttaatgcctgtggctaacaatgcgccgggcagccatcaatcagcaccgttgatggatcagcaaacgccgtctcagccgcaaacgtatggcagccccattgattacacggctgctccggcacccgagctgattccaacggtaccatcgccggctccactttctgtcccgtcatctgcaccggcggcattagcggcgcccaatcccgcggccgttcccggcggaccgcagcccaagctgcagtcgaacatgttcaagatgcaacgcaaccgcagtaagtccgatataaagaaattcaaaactaatcggtgtagttaggaatctgaccgacgaaggaacttattcttatttttctttctcattctgcagcgctaaagaactcctacgtggatgtgttcaatccttcgggtgcgccaatgtcggcggcaccggagaatgtgctggcccccatgatggcgccggctgcggtgccccaaggcggttactttgtaccccagcagtaggtaatcaggggagggactggccggagcactactcccgagatatggagcatttgacggaggaggagagtgtgagggtgtgaaaaggattgccccaaatgccaacgagatgtgagttgagactgatggataggttgataggatgatgcctgattgatggggttcctctcttttttgcagcagcagcacttcgaaactacgtaaaaaagaaaggcttttgcaaccgatgaccgctcacacacacacacacgcacacacacacactacaaacacacacagtcatgcattaaatttacacacacatccacacgagaaaagtcaactttccagcaggggaaaagttggtcctacgatattttcaagattctacagtttgttcaacttctgtctgtctgtgctatctttgtgcgtgtccttctactaaattaactcacccaatttaattgcaaagaaaataaaaacctaattttaccaatttgtgcgcatgtgtgcgtgtgtgtgtttgtgtgcgatcgatgtcttaacgtttagtaaatgatttaattgagggaacgatgaagaaagcgatttatgtacgactagcgaattatatatgtaaattttctctatgtaaactatacgccaccttgattcctaaaaaatccctcaatcccccaccctttatatatccacacacgacctcttccccgatttctgtttatatacatgtttcttttgtatgttgcatagtttttatgattattttttgtttagctgtatgaatttgtattcgaagggaggtccagacactaattcggaattcactttgaatatgcattgctgtattttccacatctaaatactatataactgatctatctgtctatataactacgaaagctgatattcgattgatttaagcgtttaagaagcaaatgaattgttctccctggtttctcttatcaatgtattctcctctgtgtttcttttttacaattggtgtgaaatatgcaaatgattccaa

SEQ ID NO: 4415 - DNA, 4260 bp, DROSOPHILA
atgagtctgctgctgaaggtgaagcccaaatacgcgggacgtggacgactgcgcaacgatgtggaggtggcaccaccacgcatacgggacggtacgagcagcctgctgcgcatgtatcctggtcccttgcagggacgcaagttgcacaaggacaagatcatcagtttctgcaaggagcagatccgactggggcccacaaagggttgcaccgcactgtatgccacgcagaagaagccacagggcagcgtgacgaaataccgtgcctcccatgcgctcatgtggcacctgctaatacttttgctgcgccaaaatgggtacattgcggacacggatgtgggcgatctgctgctggagaaccagcaagagtatccctatgatcccagcgagttcgaagcagagaacgagccagatgcggatgccgaacaggatgccgctgcaccggcggacaagacagtcgattcggatttagatagcgaatcggcagcaggagttacacctgcggaaccacttgcagcaggcgcggcaactagctcaatcaatggagctgatgctgcaaacgcagcaacgcctctgtcggaacaggcggcaacggacaagttccgcagctatgtgctgcgcggaaatgtcgaggaggctctccagtgggcaaccgacaacggcctgtggacgcatgcattcttcttggccctctacgaggatcgctatgctctcactgacgtagcccagaagttcctcaatcgagcgatcaaggccaacgatccattgcagacactataccaaatgaagagctgccacacaccggcgtgcgtcagccagctgagggatgaacagtggggtgactggcgatcgcatctctccatcctggtgacgaacaagagtcgccagccggagtatgatcgcagttcggtagtggcccttggcgatacgcttttccagcgcggcgacatttatgcggcacacttttgctatctggtggctcaggaggagttcggacgatacgatagctctgctacagagctaactactctgaccgccaatgtgcccaggcttattctacttggctcctcgcactacaagcacttcaacgaatttgccagcaacgaggcgatcatcatgaccgagatctatgagtatgctcgatcgctgttcgatccgaagtttagcattgcccacttccaacactacaagttcctgctagccacaaggatcctagattatggtcagcatttccgctgcaccaattatttggaacaaatcgccaggcacatcgaactgaagccggaaagctacgacagtaatttcattcagcgggtttgcggtttggccgaacgcctgcgctaccatgatcccattctcattaatcgtgtctcatttgcgagtcctccgaatgccactagcaaggatagtgctgctgctgaagagaaggcctggttgcgtcagcttagatctctggcctatgtgcagtttgcagaggtgaacaagcaattcagggagctaaacatgcaatacgagagcaacagcaacatggagaatacgctgcagccgcagttgccaccggtggatcaacagccgccgcaacagcagcaacaagttttatcggaatcgtaccaacagccaacacaacaatattatgagccaccacctcaagcgccaaccgaatccgatccctatggacagggccaaccgtcctattatgatcccaatgcggggcagcttcattacgatccaaatgctgcacagcatcaatacgaccagcagcaacctcaaccacagccgactcccagctatggccaaatagagccaggaactgaggcctaccaacctggacaagcaacagcagatccagctgcggttccctctggctacggatacgattactggtcgggcacacagcagccaccttatggtgacgagcccaatgagaatcaagctgcactaaaggatgaagaggaggaggatgaggagcaggatgaacagcagatattgcagtacgctaaacagcagattttgcagcaaaccaagcagcagcagctgcagcaggagcaacatactcgcagcaatggcgccgccagcatcaacaatcgcttcaaatcgaacgctctgaagcaggaacgcagcagcggctcattgcggaaaaggcaagaggcatcacgaacagcaacaatagcagcggcagcagcagctattgctcagataacaccggcaacagttgcagcggcagcgacgccaccagcagcatcggcaaaggcattcaatttgaatgatgtaagtagcttttccagcacaaataaacgacatcaagctaccagcagcagcaacaatcgcagcagcagcaaccaagcagcagcagcagcagcagcaacaaaagctgcagcaatagcaacagtacctgctgcccctaatcaattgctaagttgtagaaagtctaacagccagaatagtccatacttagccacgccaaaaacgcttaccacgcccacacgttttattgccgctaaagcagccactgttacagccacgcccacagcgccagccacttcgacgacaacgtcgacaaccataggtgctagaggatcatctaccaaacgcgtttactttaatcttccgtcgaccattgctgaatcggagcaagagttcgaacatgagctggattatgatgaggagatggaggaggagaacagtatggctctggcgcaagctaaaccaaacgttcatctagcgcgaaagccacatattgtctttaatggaacgtatcccattgatatgccactgacccaggggcagagtcaactcaaaagcaactcgtatgatccggaggccaatgcagatcgtggggatctacagcgctataggaactacatgctccacgattatgttatagatgaggatgccgagggcgaggagcaggccgaagaagagggcgaggaggatgagtatggagatggtgatgaggatttattcccctatgccgacgacgatgagagcttcgatgatggcgattactatacgcatcaactgctcaataagtatgggattataccaagcggtgagaaacagagagtcgagagaacaccggcatccgtggaggcagctacctccgcggcccagccacagcacgtgtggtccatgaaggagctgatagccaatccagccataccacttaactacaagaaaatgtgctccgaagtggagcagagcctcagtcgattcgagaattatttggacagcaaaaaggagcaacaggtgccaccgggagccgcagtgcgcaccttcgacatcgatgcacccactcgaagaggccaccgaagcagcacatccacaaatgctggcttggatcttagatctaagaagaaattaagactaattcgttgccatttcttaactccaacctcaattttgcaatccgcacaacagctgcagcaacagacgcgcccggcgatatccatgcccaagtcaaagagctacggagatgaggacgatggtggttccggtggtgtggctgatcctggtcagaaaaccaagcctgtaggctcctctgaggctgcaggcaaacagcaggcgtcgggcaaacaggccaactccggcagcgatcttggcgcacctgggaataaaaatgcgggctggtttggcggactctggaacaagttgtcgctaaagccgaagaaccaaatgatcctgccggatgacaagaatccggccatcgtctgggacaaggagcgcaaatgctggacaaacaccgaaggcaacggcgacgaggctgaaagctttaagccgccacccaaaatgagtgatctgggcatggctctgggaggaccacccgctgcgccaatcggtaatgccggattgggaatgggtttaatgcctgtggctaacaatgcgccgggcagccatcaatcagcaccgttgatggatcagcaaacgccgtctcagccgcaaacgtatggcagccccattgattacacggctgctccggcacccgagctgattccaacggtaccatcgccggctccactttctgtcccgtcatctgcaccggcggcattagcggcgcccaatcccgcggccgttcccggcggaccgcagcccaagctgcagtcgaacatgttcaagatgcaacgcaaccgcacgctaaagaactcctacgtggatgtgttcaatccttcgggtgcgccaatgtcggcggcaccggagaatgtgctggcccccatgatggcgccggctgcggtgccccaaggcggttactttgtaccccagcagtag

SEQ ID NO: 4416 - protein, 1419 aa, DROSOPHILA
MSLLLKVKPKYAGRGRLRNDVEVAPPRIRDGTSSLLRMYPGPLQGRKLHKDKIISFCKEQIRLGPTKGCTALYATQKKPQGSVTKYRASHALMWHLLILLLRQNGYIADTDVGDLLLENQQEYPYDPSEFEAENEPDADAEQDAAAPADKTVDSDLDSESAAGVTPAEPLAAGAATSSINGADAANAATPLSEQAATDKFRSYVLRGNVEEALQWATDNGLWTHAFFLALYEDRYALTDVAQKFLNRAIKANDPLQTLYQMKSCHTPACVSQLRDEQWGDWRSHLSILVTNKSRQPEYDRSSVVALGDTLFQRGDIYAAHFCYLVAQEEFGRYDSSATELTTLTANVPRLILLGSSHYKHFNEFASNEAIIMTEIYEYARSLFDPKFSIAHFQHYKFLLATRILDYGQHFRCTNYLEQIARHIELKPESYDSNFIQRVCGLAERLRYHDPILINRVSFASPPNATSKDSAAAEEKAWLRQLRSLAYVQFAEVNKQFRELNMQYESNSNMENTLQPQLPPVDQQPPQQQQQVLSESYQQPTQQYYEPPPQAPTESDPYGQGQPSYYDPNAGQLHYDPNAAQHQYDQQQPQPQPTPSYGQIEPGTEAYQPGQATADPAAVPSGYGYDYWSGTQQPPYGDEPNENQAALKDEEEEDEEQDEQQILQYAKQQILQQTKQQQLQQEQHTRSNGAASINNRFKSNALKQERSSGSLRKRQEASRTATIAAAAAAIAQITPATVAAAATPPAASAKAFNLNDVSSFSSTNKRHQATSSSNNRSSSNQAAAAAAATKAAAIATVPAAPNQLLSCRKSNSQNSPYLATPKTLTTPTRFIAAKAATVTATPTAPATSTTTSTTIGARGSSTKRVYFNLPSTIAESEQEFEHELDYDEEMEEENSMALAQAKPNVHLARKPHIVFNGTYPIDMPLTQGQSQLKSNSYDPEANADRGDLQRYRNYMLHDYVIDEDAEGEEQAEEEGEEDEYGDGDEDLFPYADDDESFDDGDYYTHQLLNKYGIIPSGEKQRVERTPASVEAATSAAQPQHVWSMKELIANPAIPLNYKKMCSEVEQSLSRFENYLDSKKEQQVPPGAAVRTFDIDAPTRRGHRSSTSTNAGLDLRSKKKLRLIRCHFLTPTSILQSAQQLQQQTRPAISMPKSKSYGDEDDGGSGGVADPGQKTKPVGSSEAAGKQQASGKQANSGSDLGAPGNKNAGWFGGLWNKLSLKPKNQMILPDDKNPAIVWDKERKCWTNTEGNGDEAESFKPPPKMSDLGMALGGPPAAPIGNAGLGMGLMPVANNAPGSHQSAPLMDQQTPSQPQTYGSPIDYTAAPAPELIPTVPSPAPLSVPSSAPAALAAPNPAAVPGGPQPKLQSNMFKMQRNRTLKNSYVDVFNPSGAPMSAAPENVLAPMMAPAAVPQGGYFVPQQ

SEQ ID NO: 4417 - DNA, 5066 bp, DROSOPHILA
cgggaatcccaaattttcctatactcttttgttgcccgttttagtaatatttattttatgtgtaaacaagtctattatatacgtatatttatttacaagttatttgcaaaccagagaaacgactaagtagggaggtataaaacaataatgacttcgttggactgcagatcgccgagcaggctgtgtcagtatccaagaaacaaactagttctagttccgtattcaaataaatgcattatattcaattcgaaaatattgatttttatttctagtttccgttaaaacatgcatgctaaagcacatatgaatattaagccagcacctagaggttatgaataaaacatttttaacattttcctatagttcctagtctaatataaaaaataattatttgttcctcgggttagtgactcgttgatgatttgcgtgaaaactaagtactttaaaagaatcaacagcataacataaactttcggctgtcaaggcctagatactctatacccttgaaaagttatatttacgttaaaatagcttatccaccatccgtaagttcgctgtaaatccccaatctattgaatagtttcttttttcttgtttatgcaaataaatactttaattcccaaaaaataatgttgtggttattaataatattaatattaataagccaacatattatctaaaaatatataatatatggttcgcctaaaattctttaatttctttatcacttctaaaataataaagtgccaaggacagtttccgaagaattgctttagcaattgcatttcattgtagaggcgttaatgtcttgaattacatttttaggacatttatatggacagcacataaacgtgtttcaacatccgaaggttcaaaaaatttagtttcagcttcaaaaatccgcatttgaattttgcgccacatgtgacaaaagtattgcgcagcggcggcaccacagctgcacggatttccgcagcgctgagcgagggtcacactggaagggtaagcacctcacccccccgctcaatgatcaagtgacgtgccaccaatataaccattggccggccaacagcactctttcgactgcggaatgggcatcaacgtcagcaggacggccgacctggggtccaaccagtggctccagcgcttcgtgggccgccagcacatcgcccacgatgacgaggccttctggaacgggctgctcaactacaacattgtgctgccggagaacaggtgagtggagtggaacaggagtggagcaacaacgtcagcagggctaatctcgggcggtttgaaatggtgtgtgtttcagtcaggaccagctcaacctggacagccggctagaggcgctgtgccagtcgttcatcggcaataacctgaagacgggcaactttggctccctggtgaccgtgttcctggagaagaccagcgagctgctgtcgctgtcggaccaggaaagcaacatgcacgtctggcagaccttcaacgcgctcttcatcatccgcagcctggtcaagtacatcaacgagacgggctctgagttccagctgctgcagcactttgaggctatgccgaatgcagagctgctgcaagcggcattggagcagcagcaacagacgccggcggagagcgccaccattgccatggaggccaccgaacagtcggcggcggctgcggttccagtgattgtggacggatctaagtttgagaccttcatcgatgccctggtgaacctaatcgtcgtgattcccgtcaaggagttcacctaccacctgcacctagaggccgttaacatgctgatcaccctgctgtcagtgcatctgtttgcccaacagcccacggacaagtccatcgtgttccggacggtcttcaagtgtcagcacgcaaacgtgctgatgtcggcactgctgcattttgtggcgcgtattgtggaggtgccgcacaccatgtttgggtccagctctgctggatcctttgtctttggcatcgcggagtcgctgctttccatcttcacgttccgtaagcagccagacatactgaaagcgggccaagcagccggcggtggagagctctcgcagcgattccgtacccactacccactggccaaccagagcctgttgctgatcctgatactgactaaccactgcacggcacaggataacgcctatcggactagccttttcagttgcgccgattcaaaggattcaccaaaacagggagctgtctccttccagatcgacttctcggcggtatatgagacattgtgtaccatcgttaccatcgaccaggccacgctgctgctctatctgctgctccatcgcaacgagcgcttctaccggttcgtcatgcagcaacaggacttggagcagttggtgatccccatcctccagacactgtacaacgcccccgatagcaactcacatcacatctacatgtccttgatcgtgctgctgatcctgagtgaagacgagggcttcaacaagaatgtgcacaccatagtaggtcatctgtgcgtgctaatagttgcattactaatcctttctcatccctgtagatgctaaaaaacatcacatggtatacggaacgcaccatatcggagatatcgctgggcggcatcctaatccttatcgtcatccgcaccatacagtacaacatgctgaagatgcgcgacaagtacttgcacaccaattgcctggcggcgctggccaacatgtccggccacttccgcgctctacacccttacgtggcacagcgactggtctcgctgttcgaaacgctcgctcggaagcatacgcgcctggatgcgcagctcaaggagccggccgatagcgcagtgtttgtgaacgtctcgacgaccccggaagacatgctacaagatctgagcgtgctggaggaggtgttgcgcatggtgctggaaatcctaaactcctgcctcacaaaccagttggtctactgtcccaacttggtgtacactcttttgtacaagcgcagcgtcttcgagggcttccgcagtcaccacgccttccaggatgtcatccaaaacatagacatggtatgcgcactagttccgatccgattatgcgatgtgtctcatgctgtcttcgttttcaggttgtcggtttcttctcctcgcgtctgcagcgtgtccaggagcagagaggcgagcttggggtcaatgaagtgctcgaggttatatctaaaggtgccagtcagtggtccagcgatcgactgagagtaagtaatccgctcgatgagttactcactcaaatcgcaggctcacttattctttttgtgtttatcctgcagaagttcccggatcttaagtttaagtacgtcgaggaggacgctcccgaggagttcttcattccatatgtgtggacgttggtctgcaagtacggctgcgtgcacttcagctcggagagcatcaagagcgtgaccacggacatagcctgctaatatttactgctctatcccttcctctcacgcacacacccggctccgctttggtttccaccatgtttcgatgcttctccgtttgtcttctgtgcgggattacccgatctttaagccatataccacgccctaccttttgatccaacccaaaatgtcgaaatgcagtatcaaaaacaaaacaaagcaagagaaatgttgcgctaaataagaggcatgcgcatctcgaacgttgacgacaagaggagacaaagcaaacgagagaactaacgataatacatagacatagctacgcttatactaatgtgtatgttaacaagcaatccggtcggaaattgttgttcaagttaaaatatagcaaccttgaaacatgatcatattttgccaagccgactgcaatgagcatgtttagagggaagttaagctccgtacgcctacagatcgatgttctaatcaatgggaagcagcaaatccaataaaaagtatatatacatattaaagaatcggaatatacaatatatgcaaaatatatttacattttagtctatggtaattatatattgtattgtatttagcaattgaaaacgtcgataaactatatattaactaaagttaacgctcttgtgttttttcttctgtctatggcagcctttagtgttatctgcggaaagcccaaatttatttgggttggtttttatcagaacaagaatgtgattagatcttctttgcaattcgtcatcggaacgtggcagtgttttatgaaaaaagtagttggtcttttgaaatggatttatcattaaaaacgaagttcacttcttggaaagaattcagtgttgagaagtattggttagtcatattacttcaagattcattgggttcgtatttggtcagtttattttaagctaaatatccacatatcccaatgggtattcattatatttcgccaaagaaatatcgccaaacggaagcttcaaatgaagtttcctttattacgtatacgccgggtaaacaatgcttaagcacctcttctcccgtttatcatttccactacgcatacgggcttcgctgtttgcacttcattgtgcatatttgcactatcggctgcaacaacaacgatgatgggctggctgccttgtttattgtttattactactgctacgtttttttcccaccaccagcttcatcggctaaatatgtgactaaaaagccgcgggaaaaacgacgagatgacttttactgcctgcttacattggggttcgttgacttgaacggctgggcggtaaagggggctggacttggaggatgggggctcaatccgctgaaggttttgttgtggtctcgtcgctgttgctgcactcttgtcagctctgcgtacgtgtcttaaataagcaagtacacaaataacaacgcacaggttagtattgcgataaaaattgcatttgttttatcgccgccgaaaggcggaaaatttgttattgtgagcttttcatggcgtgctgcattttaattcactttagcccacaacaaacggcgaaaatttttcaaatttcttttggaccccccttcccccattttgccattagttttccatgctggctaaaaaggtttattgactt

SEQ ID NO: 4418 - DNA, 2800 bp, DROSOPHILA
gggtaagcacctcacccccccgctcaatgatcaagtgacgtgccaccaatataaccattggccggccaacagcactctttcgactgcggaatgggcatcaacgtcagcaggacggccgacctggggtccaaccagtggctccagcgcttcgtgggccgccagcacatcgcccacgatgacgaggccttctggaacgggctgctcaactacaacattgtgctgccggagaacagtcaggaccagctcaacctggacagccggctagaggcgctgtgccagtcgttcatcggcaataacctgaagacgggcaactttggctccctggtgaccgtgttcctggagaagaccagcgagctgctgtcgctgtcggaccaggaaagcaacatgcacgtctggcagaccttcaacgcgctcttcatcatccgcagcctggtcaagtacatcaacgagacgggctctgagttccagctgctgcagcactttgaggctatgccgaatgcagagctgctgcaagcggcattggagcagcagcaacagacgccggcggagagcgccaccattgccatggaggccaccgaacagtcggcggcggctgcggttccagtgattgtggacggatctaagtttgagaccttcatcgatgccctggtgaacctaatcgtcgtgattcccgtcaaggagttcacctaccacctgcacctagaggccgttaacatgctgatcaccctgctgtcagtgcatctgtttgcccaacagcccacggacaagtccatcgtgttccggacggtcttcaagtgtcagcacgcaaacgtgctgatgtcggcactgctgcattttgtggcgcgtattgtggaggtgccgcacaccatgtttgggtccagctctgctggatcctttgtctttggcatcgcggagtcgctgctttccatcttcacgttccgtaagcagccagacatactgaaagcgggccaagcagccggcggtggagagctctcgcagcgattccgtacccactacccactggccaaccagagcctgttgctgatcctgatactgactaaccactgcacggcacaggataacgcctatcggactagccttttcagttgcgccgattcaaaggattcaccaaaacagggagctgtctccttccagatcgacttctcggcggtatatgagacattgtgtaccatcgttaccatcgaccaggccacgctgctgctctatctgctgctccatcgcaacgagcgcttctaccggttcgtcatgcagcaacaggacttggagcagttggtgatccccatcctccagacactgtacaacgcccccgatagcaactcacatcacatctacatgtccttgatcgtgctgctgatcctgagtgaagacgagggcttcaacaagaatgtgcacaccataatgctaaaaaacatcacatggtatacggaacgcaccatatcggagatatcgctgggcggcatcctaatccttatcgtcatccgcaccatacagtacaacatgctgaagatgcgcgacaagtacttgcacaccaattgcctggcggcgctggccaacatgtccggccacttccgcgctctacacccttacgtggcacagcgactggtctcgctgttcgaaacgctcgctcggaagcatacgcgcctggatgcgcagctcaaggagccggccgatagcgcagtgtttgtgaacgtctcgacgaccccggaagacatgctacaagatctgagcgtgctggaggaggtgttgcgcatggtgctggaaatcctaaactcctgcctcacaaaccagttggtctactgtcccaacttggtgtacactcttttgtacaagcgcagcgtcttcgagggcttccgcagtcaccacgccttccaggatgtcatccaaaacatagacatggttgtcggtttcttctcctcgcgtctgcagcgtgtccaggagcagagaggcgagcttggggtcaatgaagtgctcgaggttatatctaaaggtgccagtcagtggtccagcgatcgactgagaaagttcccggatcttaagtttaagtacgtcgaggaggacgctcccgaggagttcttcattccatatgtgtggacgttggtctgcaagtacggctgcgtgcacttcagctcggagagcatcaagagcgtgaccacggacatagcctgctaatatttactgctctatcccttcctctcacgcacacacccggctccgctttggtttccaccatgtttcgatgcttctccgtttgtcttctgtgcgggattacccgatctttaagccatataccacgccctaccttttgatccaacccaaaatgtcgaaatgcagtatcaaaaacaaaacaaagcaagagaaatgttgcgctaaataagaggcatgcgcatctcgaacgttgacgacaagaggagacaaagcaaacgagagaactaacgataatacatagacatagctacgcttatactaatgtgtatgttaacaagcaatccggtcggaaattgttgttcaagttaaaatatagcaaccttgaaacatgatcatattttgccaagccgactgcaatgagcatgtttagagggaagttaagctccgtacgcctacagatcgatgttctaatcaatgggaagcagcaaatccaataaaaagtatatatacatattaaagaatcggaatatacaatatatgcaaaatatatttacattttagtctatggtaattatatattgtattgtatttagcaattgaaaacgtcgataaactatatattaactaaagttaa

SEQ ID NO: 4419 - protein, 699 aa, DROSOPHILA
MGINVSRTADLGSNQWLQRFVGRQHIAHDDEAFWNGLLNYNIVLPENSQDQLNLDSRLEALCQSFIGNNLKTGNFGSLVTVFLEKTSELLSLSDQESNMHVWQTFNALFIIRSLVKYINETGSEFQLLQHFEAMPNAELLQAALEQQQQTPAESATIAMEATEQSAAAAVPVIVDGSKFETFIDALVNLIVVIPVKEFTYHLHLEAVNMLITLLSVHLFAQQPTDKSIVFRTVFKCQHANVLMSALLHFVARIVEVPHTMFGSSSAGSFVFGIAESLLSIFTFRKQPDILKAGQAAGGGELSQRFRTHYPLANQSLLLILILTNHCTAQDNAYRTSLFSCADSKDSPKQGAVSFQIDFSAVYETLCTIVTIDQATLLLYLLLHRNERFYRFVMQQQDLEQLVIPILQTLYNAPDSNSHHIYMSLIVLLILSEDEGFNKNVHTIMLKNITWYTERTISEISLGGILILIVIRTIQYNMLKMRDKYLHTNCLAALANMSGHFRALHPYVAQRLVSLFETLARKHTRLDAQLKEPADSAVFVNVSTTPEDMLQDLSVLEEVLRMVLEILNSCLTNQLVYCPNLVYTLLYKRSVFEGFRSHHAFQDVIQNIDMVVGFFSSRLQRVQEQRGELGVNEVLEVISKGASQWSSDRLRKFPDLKFKYVEEDAPEEFFIPYVWTLVCKYGCVHFSSESIKSVTTDIAC

SEQ ID NO: 4420 - DNA, 2989 bp, DROSOPHILA
gctctatgcgggtttccttgagcgtgcgcaggtcgaagtcgataagctcgtcctgcagtccggccatgaccagacgatgcggtgatagctgcagcatgctcaccatctccttcatgttgttcgatctgcaagaaattgaaacctcactttcggggaatctttgtgccagcgcggtggcttacttgaaggtaaacttgggcagacccctgcggatctgatgacgcagcgaggtctgcgtgagcgccagcactccggagtccagggtggagatgtcgcgcacaatgtcggtggcgtggacctgaaaggatgtgtacttctgcatggagtttgtgtagtacgatgtgacgtggccctgcgggaaggagcgaagattcaggattagtaagcctggcaggctggacgaggaactcacgccctggttgcccatccacagcagctcttcgtagtcgtcgaacgccacgctggaaacgccgaagtgctccccgccgtcggcaagcacgggcacaagctccacatattccggatcggtggtgccgatgttgaatccattgaagctgggcgaaaagtgcccgtttcccggcgcagatcccgcgtcataaacaccttttcaaaaagtaaacagaaaacaaaggagaaagctttagctggcttgcgtgtgtgtgtgcgtgtgggtgagcgttggccccaaagcgaccccttgacccacttagtatgtcttcggaggccccgatggggtcggtgccgcaatacacgtaatccatctgccgcacgccgatgcccacgcgactttttattgtttattttttaacaaatttcgctcaaaactgccagccgtttttgcgttgcaccgattagagtgaccctggcagggctgatgtaaaaatactctcgcttctccgccaacgaactacctgtccaacgctgcgcgacgccactgtgcgtggcaagaagaagcactgcaatgctgcgtagagctgccacgactgtgggatccgcatgtaaaaattacggccagaattgctcaaaattcgcgagaaacaaaagaacaatggccgatctgcagcagattgcaagcaacaacgagcgcgccgaggcgctgatcaactccattgaagccgaggcaagtatttccgcctgccagcgcctgcgaacactcgataacctactgccccccagatttccggcatccagcagcaacttgtggagcgccagaagcaggagctgatcaaggagaacgctgcactggccaaggaagttgaggcggctttggcccagctggtgcagctggagctgcgaaatggcaagaaacagattccggtgcctggagcccggggtttctgcaccagtgcggccccagtagttatgccggcagaggctggacctgctaccgctgcacccgctgccccggctcctaagccggccaaggagcccaaggaaaagaagtccaaggagaagaaaccggccgccgagaagcccgccgccgctccggaggctcccgtcgacgtcggtcgcctggatttacgcgtgggcaagattgtggaggtgggtcgccatcccgacgccgacagcttgtatctggagaagatcgactgcggcgaggcggctccacgcaccgtggtgtccggtctggtgaagttcgtgcccctggaagagatgcagaaccgtctggtagtggtcatgtgtaacctgaagccggccaaaatgcgcggcgtcacctcggaggctatggtcatgtgcgcatctacaccggaaaaagtggaagtgctcagtccgcccgccggagctgttcccggcgacctggttcactgcgagggctatccgcgccagccagacgcccagctcaaccccaagaagaagatctttgagtcgtgcgccccggatctgaagaccaacggcgaactggttgcctgctacaagggcgccgctctccatgttcctggcaagggcaacgtggtggcccaaaccctgaagaacgtcaatgtgaagtgagccaataaacgaaactaaagctttgagccaataaacgaaacatcaccgcctgcacaccatttcagtatcagaacttcattatcattcagtttctagtaccagtgaagagtagctctacaggaatatcggaagctctactgatcattgggattactggttatgtttgattatcgtgcagattctgaggtattcatgtgatattttattttatttcacacgacagcagtacataacgacattaaatttatcattaacaagtctatttatatgtgcataggaagtgcataggagtgcgccattcctacacactttggctggtttaagtgccgtcctcagcgattattgcgctgcgcttgcccttgggtgcggaacacggcaatggaattgctctccaccacaatcgttttggttaggacgtcgtaggcggtgcgattgttcttgaagaagaccatcaacacgcaaatggggaagagcagggtcatccccaggttcttgatcagcgcgcgggcgaaggagcgcatcagcgagggagtctgtggcggataaagcagagccctcatcggctccctctgcggctggaggacgaactgtggaaggggcggcccctgaagcggcatcactgcttccacatagtatatgcgtatcttcatcagcgacttgcccggcgtagccccttggtataggtatgtccacagcgcttcgtagcagcaaacgatgaacttggtcagcatttcgattagcaggaggtcggtggacatcgaaataaaatctagtgatgtgtcaaagaagttcgaaaagaggtcttcttggtccagggtgcgccgaatcacgtcctcatcgaactctatgttgaacaggttgaccaccccgaaggtaatgatgattttcacaatgaaaaggatgaacatatcgatggtctccgccacggcgcgcttccaaaaaggtgacagaacgtactcgtagccgccaagacgctgtatgatatccagctgggccgcct

SEQ ID NO: 4421 - DNA, 933 bp, DROSOPHILA
aaaaattacggccagaattgctcaaaattcgcgagaaacaaaagaacaatggccgatctgcagcagattgcaagcaacaacgagcgcgccgaggcgctgatcaactccattgaagccgagatttccggcatccagcagcaacttgtggagcgccagaagcaggagctgatcaaggagaacgctgcactggccaaggaagttgaggcggctttggcccagctggtgcagctggagctgcgaaatggcaagaaacagattccggtgcctggagcccggggtttctgcaccagtgcggccccagtagttatgccggcagaggctggacctgctaccgctgcacccgctgccccggctcctaagccggccaaggagcccaaggaaaagaagtccaaggagaagaaaccggccgccgagaagcccgccgccgctccggaggctcccgtcgacgtcggtcgcctggatttacgcgtgggcaagattgtggaggtgggtcgccatcccgacgccgacagcttgtatctggagaagatcgactgcggcgaggcggctccacgcaccgtggtgtccggtctggtgaagttcgtgcccctggaagagatgcagaaccgtctggtagtggtcatgtgtaacctgaagccggccaaaatgcgcggcgtcacctcggaggctatggtcatgtgcgcatctacaccggaaaaagtggaagtgctcagtccgcccgccggagctgttcccggcgacctggttcactgcgagggctatccgcgccagccagacgcccagctcaaccccaagaagaagatctttgagtcgtgcgccccggatctgaagaccaacggcgaactggttgcctgctacaagggcgccgctctccatgttcctggcaagggcaacgtggtggcccaaaccctgaagaacgtcaatgtgaagtga

SEQ ID NO: 4422 - protein, 294 aa, DROSOPHILA
MADLQQIASNNERAEALINSIEAEISGIQQQLVERQKQELIKENAALAKEVEAALAQLVQLELRNGKKQIPVPGARGFCTSAAPVVMPAEAGPATAAPAAPAPKPAKEPKEKKSKEKKPAAEKPAAAPEAPVDVGRLDLRVGKIVEVGRHPDADSLYLEKIDCGEAAPRTVVSGLVKFVPLEEMQNRLVVVMCNLKPAKMRGVTSEAMVMCASTPEKVEVLSPPAGAVPGDLVHCEGYPRQPDAQLNPKKKIFESCAPDLKTNGELVACYKGAALHVPGKGNVVAQTLKNVNVK

SEQ ID NO: 4423 - DNA, 4456 bp, DROSOPHILA
aggggggtgttcttgagcgccgacgcagatgacccggacaggcgcttgtcgccgctgccaccggccactccagccaggcccaaagtggcctgggcctgcgtgctcttcttcttgcgcttctggcgctcaagctcctcgtcgatctccttggcccagtccactttcggcggcgagggaggcacccactcgcgggccaggtacttcttgtgctcgtacttggcccggatgaaattctccagcgctgtgtccgtctgcgggcgacggaagccgtccggcagctgcgcctcgtagacggcgcgagcccgcgagtttcccatctgctgcagcgagatcacctgctctggcgtccaagtgtccaggttgacggacttgacgcgcgatatgtgcacgcccagattgcgatggatgccggcgcagcggatgcagagaaacatgcccaggttccaggaggcccagcgcggacctaaggataaaaggtagcattcagtgacagcacataggctcatatcgcagtgcagctgcatgtgtggtgtgtatatccacgcacgcacgcacacagatgtgcgtcaccaagaggcgtatctcttggcggagaagtggaccccattaacatacccttggcatcgcagtccacgcagtacttgttgtcctcgtcgcggagcatctgcgtcaggagggtctggcacttctcctgaattagcttcgtgcgctgtcccgcattcgaggagctcattttggggtatgcttgcggtctgtgaggcctggtttcgatatttgtggcggggcgcaactgtgcgacgtggcgtgggcgacgggtagagttggcggagcttatctctgcttcacatggatatacaactaccagcgaattgaattgacaattttctacaagtttttgctaccgaaaaagtgatgcgtccagtgggaccgtgtggcggtgaaggcagctagcctccctggttgtcactaacgccaagccgtgccatcttgccattcacagggaaccgaagccactttttaaaaaagttgtttacttttacttctgcccacagaacatttgaactcacatttgccggcaaaaatggaaattttgcgaacgaaactagaggcctgcctgctgatactgaacaggaacaatgcagcagctgcaaactggctgaatgtaagtgggggaaacggaccactagccccaggacatcaatcacttgttgctttgaatttcaggacctgtgcgccgtgctattggaattcgctactttggcccacagctccttctgctcccaggggcagtcggagtgctcggagctggtgtgcctctgcctcagccagattatgatctgcattcgccaagtggagaacaccatgaaactagaatgcggcaccacagtctcggtgagtaatttggatctcatccatgcattgcacaatgatgtctaatcctctgaaagcaggtaagtcatcagtacttcctggaccgcattcgctggtgcctgaagcgcctcatgcatctttacagcgaagaatcgagttccgaagcagtagctccggagcgctcgttccttaagctggtggatggcgcattggattgtttggcgcagttcacctcgcacagtgaggaaaacaccgatacctccaactgtccaaagactcccaaggaagtccttccactcagccagaagttgcgcgccaacattgatttgatcttgggtcaatctctgggattcgccaatgtggctttgtctcaggacaagagggctctcagtgccttgtgccaaaaggtgggtgtacatcttctgcagtatccccttatttattcccctcatttgtgctctaggtcatccgggagtgcaatgcctttcaggaggagtgcaaggagtcattcagtgccaactacctgtccacccttaagctgcgggccatgaccatggaacaggcaatttaccaattggaggactttatcaacgatgcgcttttgcgcttggtattcacatgcttcctggacttcgagaagttttcggtagacaaaattagagcgctgttaaggaacagcccagataatgatgatctggccgatgagttcatagcggactttgatgtgaacatagatcgcgccacccagataggcatttttgccatttcctttgcgcccaacttgaaaagtataataattatatataattataaaaaaaaacgcaattaactccagtaccaattccttttcagtgaaaaccataatgcgcagctgtctggcctcctttgaatcactggacaccactctgataccttcactgcaggcccatggttccgatttgcactcggacatcctagagcagcactttaacgaggaggtggccaagttcaaggcagcgcttcaggagatcatcgacagccgcgccctcgttggttgttgcctggagatactgacctcagggataagtgcaacggaaaagcttttcgataagcagcgattggaggacttggttcaaatctctttgctgctagtcgagcactttcagctggaagtcaaccgaaagggtctaagcgaaacgcaggaccgattgggggaagagtactaccagcagttcatccgggtactgcgcgagtgcaaggctattttgatgtgcgcatcccaggtggagccgcagagaatcctcaagcgcttcaagatcttgcgcacgatcttgcgcaaattgcacggctccctgggagctggtaaacaagaggaggaacttcctattcccctggctccccttttagctgatgataccaagggggtaaatgaagacgaaacccatttcactggctataaaacagcccgaagcggcagtatcctctacgacacagagcgtaggaatagagtaactagacgaacggacaacaagctacccacaaataccttggacattaaatcggataaggcaaaaccccatggaaatgttctgagaagtaagtcggctgatgtttagataaatttggtaaggttaccaatgttttgaatgctattttcaggagaaagtttacggactgtcatgttcaagcggcagaatatagctgaaagcagaaagctatacacctccatgagtaatcagtctacggatctacaaatcacaggtacctaaaatgattacatttcctattttataagtttttccattaaatttcgtatatttttagatatactcgaccaactcactggaatgtccaatggatactttgaatgctgaagcatttcaaccatttgtacataactttttatttagtttagtgtttaagttcataccatttaagagattttgcaattcaaacttaacgtacgtcgccacctgaatgtcataggtcaggtcaggcatacacacaaacatgtatgttcctcgggtggcgaagagtatcgcatcggaaacagtttagactgttgtaaaagtagagcaataggttccaataaatatatagacacatagcacacttgtcagcgcatctccctcggtcgattgacctttcaattgcactggacaccctcgttcaacccaacatgtgaagctgtgtgggcaatccctatcgattttccaccacgagcggcagccaggactcgcagtcaacagatacacacggtaattgcttggtaaacagtaagcactcggctatgaaatctctggccggcgataaatttgctctgtccgaagagattgggccaccgccttgttctcccaaacaccgaaaagcaagtgccgtgagtagggacacggatacaaataaccatcatgtggtgccgctggggatcctcgtggtgctctgcactgtgtatctcatggtagccgggatgcagcgcaactacaggcactattttaagccgggcgtggctgccttcgacctgcaccatgcccagccggaagccatggccgacgccgaattggatgtcgccgctccagatgcatcgtgccagaggttggacgttttcggaaaggaatccaatcggaatcaggcagtttcaagaagatcccaaggcaggcccacgaagagaaccaaaaacggcactggaaatggggtcagcaagcaacctcgtcgtttgataaagtccccggaggggcacaagaagaaggaagttggcaagaagagtaacacagcggagcccattatttacctgttcgcccttgtgtttgtctatctgcttctgaaggccgcctcggacatcaaccagcactacaagtcggtaaggataacccgcattccattccctattgccacgtgaataatccttcttcggcagcagaacaaaggggacaagcgactgcgccggtgctcgctgcaatcttatgcccagatccacaagcaggatcgccggtcatcaaaaggtatttcaccaaaatctttgccaaagttttagctcgctgggggccaggtgcctagcctattacaccgtgttaacgagggatcaagtgaattgttatcctataaatct

SEQ ID NO: 4424 - DNA, 2077 bp, DROSOPHILA
ggaaccgaagccactttttaaaaaagttgtttacttttacttctgcccacagaacatttgaactcacatttgccggcaaaaatggaaattttgcgaacgaaactagaggcctgcctgctgatactgaacaggaacaatgcagcagctgcaaactggctgaatgacctgtgcgccgtgctattggaattcgctactttggcccacagctccttctgctcccaggggcagtcggagtgctcggagctggtgtgcctctgcctcagccagattatgatctgcattcgccaagtggagaacaccatgaaactagaatgcggcaccacagtctcggtaagtcatcagtacttcctggaccgcattcgctggtgcctgaagcgcctcatgcatctttacagcgaagaatcgagttccgaagcagtagctccggagcgctcgttccttaagctggtggatggcgcattggattgtttggcgcagttcacctcgcacagtgaggaaaacaccgatacctccaactgtccaaagactcccaaggaagtccttccactcagccagaagttgcgcgccaacattgatttgatcttgggtcaatctctgggattcgccaatgtggctttgtctcaggacaagagggctctcagtgccgtcatccgggagtgcaatgcctttcaggaggagtgcaaggagtcattcagtgccaactacctgtccacccttaagctgcgggccatgaccatggaacaggcaatttaccaattggaggactttatcaacgatgcgcttttgcgcttggtattcacatgcttcctggacttcgagaagttttcggtagacaaaattagagcgctgttaaggaacagcccagataatgatgatctggccgatgagttcatagcggactttgatgtgaacatagatcgcgccacccagataggcatttttgccatttcctttgcgcccaacttgaaaatgaaaaccataatgcgcagctgtctggcctcctttgaatcactggacaccactctgataccttcactgcaggcccatggttccgatttgcactcggacatcctagagcagcactttaacgaggaggtggccaagttcaaggcagcgcttcaggagatcatcgacagccgcgccctcgttggttgttgcctggagatactgacctcagggataagtgcaacggaaaagcttttcgataagcagcgattggaggacttggttcaaatctctttgctgctagtcgagcactttcagctggaagtcaaccgaaagggtctaagcgaaacgcaggaccgattgggggaagagtactaccagcagttcatccgggtactgcgcgagtgcaaggctattttgatgtgcgcatcccaggtggagccgcagagaatcctcaagcgcttcaagatcttgcgcacgatcttgcgcaaattgcacggctccctgggagctggtaaacaagaggaggaacttcctattcccctggctccccttttagctgatgataccaagggggtaaatgaagacgaaacccatttcactggctataaaacagcccgaagcggcagtatcctctacgacacagagcgtaggaatagagtaactagacgaacggacaacaagctacccacaaataccttggacattaaatcggataaggcaaaaccccatggaaatgttctgagaagagaaagtttacggactgtcatgttcaagcggcagaatatagctgaaagcagaaagctatacacctccatgagtaatcagtctacggatctacaaatcacagatatactcgaccaactcactggaatgtccaatggatactttgaatgctgaagcatttcaaccatttgtacataactttttatttagtttagtgtttaagttcataccatttaagagattttgcaattcaaacttaacgtacgtcgccacctgaatgtcataggtcaggtcaggcatacacacaaacatgtatgttcctcgggtggcgaagagtatcgcatcggaaacagtttagactgttgtaaaagtagagcaataggttccaataaatatatagacacat

SEQ ID NO: 4425 - protein, 587 aa, DROSOPHILA
MEILRTKLEACLLILNRNNAAAANWLNDLCAVLLEFATLAHSSFCSQGQSECSELVCLCLSQIMICIRQVENTMKLECGTTVSVSHQYFLDRIRWCLKRLMHLYSEESSSEAVAPERSFLKLVDGALDCLAQFTSHSEENTDTSNCPKTPKEVLPLSQKLRANIDLILGQSLGFANVALSQDKRALSAVIRECNAFQEECKESFSANYLSTLKLRAMTMEQAIYQLEDFINDALLRLVFTCFLDFEKFSVDKIRALLRNSPDNDDLADEFIADFDVNIDRATQIGIFAISFAPNLKMKTIMRSCLASFESLDTTLIPSLQAHGSDLHSDILEQHFNEEVAKFKAALQEIIDSRALVGCCLEILTSGISATEKLFDKQRLEDLVQISLLLVEHFQLEVNRKGLSETQDRLGEEYYQQFIRVLRECKAILMCASQVEPQRILKRFKILRTILRKLHGSLGAGKQEEELPIPLAPLLADDTKGVNEDETHFTGYKTARSGSILYDTERRNRVTRRTDNKLPTNTLDIKSDKAKPHGNVLRRESLRTVMFKRQNIAESRKLYTSMSNQSTDLQITDILDQLTGMSNGYFEC

SEQ ID NO: 4426 - DNA, 3558 bp, DROSOPHILA
cgcagagaatcctcaagcgcttcaagatcttgcgcacgatcttgcgcaaattgcacggctccctgggagctggtaaacaagaggaggaacttcctattcccctggctccccttttagctgatgataccaagggggtaaatgaagacgaaacccatttcactggctataaaacagcccgaagcggcagtatcctctacgacacagagcgtaggaatagagtaactagacgaacggacaacaagctacccacaaataccttggacattaaatcggataaggcaaaaccccatggaaatgttctgagaagtaagtcggctgatgtttagataaatttggtaaggttaccaatgttttgaatgctattttcaggagaaagtttacggactgtcatgttcaagcggcagaatatagctgaaagcagaaagctatacacctccatgagtaatcagtctacggatctacaaatcacaggtacctaaaatgattacatttcctattttataagtttttccattaaatttcgtatatttttagatatactcgaccaactcactggaatgtccaatggatactttgaatgctgaagcatttcaaccatttgtacataactttttatttagtttagtgtttaagttcataccatttaagagattttgcaattcaaacttaacgtacgtcgccacctgaatgtcataggtcaggtcaggcatacacacaaacatgtatgttcctcgggtggcgaagagtatcgcatcggaaacagtttagactgttgtaaaagtagagcaataggttccaataaatatatagacacatagcacacttgtcagcgcatctccctcggtcgattgacctttcaattgcactggacaccctcgttcaacccaacatgtgaagctgtgtgggcaatccctatcgattttccaccacgagcggcagccaggactcgcagtcaacagatacacacggtaattgcttggtaaacagtaagcactcggctatgaaatctctggccggcgataaatttgctctgtccgaagagattgggccaccgccttgttctcccaaacaccgaaaagcaagtgccgtgagtagggacacggatacaaataaccatcatgtggtgccgctggggatcctcgtggtgctctgcactgtgtatctcatggtagccgggatgcagcgcaactacaggcactattttaagccgggcgtggctgccttcgacctgcaccatgcccagccggaagccatggccgacgccgaattggatgtcgccgctccagatgcatcgtgccagaggttggacgttttcggaaaggaatccaatcggaatcaggcagtttcaagaagatcccaaggcaggcccacgaagagaaccaaaaacggcactggaaatggggtcagcaagcaacctcgtcgtttgataaagtccccggaggggcacaagaagaaggaagttggcaagaagagtaacacagcggagcccattatttacctgttcgcccttgtgtttgtctatctgcttctgaaggccgcctcggacatcaaccagcactacaagtcggtaaggataacccgcattccattccctattgccacgtgaataatccttcttcggcagcagaacaaaggggacaagcgactgcgccggtgctcgctgcaatcttatgcccagatccacaagcaggatcgccggtcatcaaaaggtatttcaccaaaatctttgccaaagttttagctcgctgggggccaggtgcctagcctattacaccgtgttaacgagggatcaagtgaattgttatcctataaatctaaatgtatctaccactatgtactgaactagccaatcttctctactctaaagcaccagttttctgactttttcggaaaatgtattgttgtgtattgtgtatctctcgtctgtcctcaatctctatacatctatacatctgtacatcgcacttttcgggctcgattatgcgtttgatatctgtgtttttgaacgacctccactgtttacctcctcttcacctatctgtgaaactgtactgaatccgaatataaggttgtacatactcgaatgtatattactgtcctaagtgtacgtaatcctaaaataaatcaattactatgtgctttcctgtgatcaatttacatacgtagccgtgttagcttgcgtttcatttcctccgttcgattgggcttttacgcaatcctctgcgatcctctctcaccccgaatcccaaactgaccgctctacatttccccaatgcatgccaaaagtggatgagtcccccatcttccggcgcaagcatataatcagcgaggagcgttccgtatctgtggatcgcttcaagtacacgctaaacgatgagggaggcttcaccaggtccgttccgctggttcaggagtatcactacagggtggtatctcctttggccagccgacccagtcagcagcatccgcataagccgggatccggagaagcccgtttcggtaaagagtccccacaacaaagtgacacgtcccataagaccaactactttcttctctagagcctcgtcttaaccgtcgctcctcggttccgatcagcattaactatcaaacggtgcacgtatcgagtccacatcctccggaaatggccaggcgcggctcggtgataagcctcactgggccaccaccagaagtcagtggtatgccaagtggagccgctgatccaaagcggcgcgtccgcatgataaatcgccattgaagtccagaagtccagatgagatcaggacacagcccaacgaaattgcaaagagactacagtattttaacacaccattcggaaacagaaaccgcacacgttgtagtccttcttaatgcgtttcttttaatcagttaattatgttatattattcaagtgttttaaaaaaacgtacaaagaatattcttctcgaagacaccgaatttacgcccacttcggcgggcagccgtttgccgcagcattttgccatcctattgtacattattctacttagggcaagattaaaaaaatcttaggctagcgtagtgtttagtttggaattcagtacctatgatataaccattatctacgaactaactacgaacttgtgatgctcattacaattacaatgacaattacatacagctgggtatgtatctgggttgaaagacctgctgggcgaagcggatgaagagggtgcaagatcttaactacggttgacgcgctactggatcggggtgcggagttatggtcggagtggttggtccctacggctaatacacgtattctacaaggcctccatcttcatcgaattttgcgctagtttctcctattccattaaatattaaaataaattacgtattttaattgcatgtggttgaagttcgtccctgcgccgcattcagctcagctcgttgccctcgtacaggctctcgcagctctcgagcaggcgcagcacgggggaaatgtcgtaggggtagagctggcgcgacacgaggcgggatatctgcaggcgcagccggataagaacgcccatcgcctcgtct

SEQ ID NO: 4427 - DNA, 924 bp, DROSOPHILA
atgaaatctctggccggcgataaatttgctctgtccgaagagattgggccaccgccttgttctcccaaacaccgaaaagcaagtgccgtgagtagggacacggatacaaataaccatcatgtggtgccgctggggatcctcgtggtgctctgcactgtgtatctcatggtagccgggatgcagcgcaactacaggcactattttaagccgggcgtggctgccttcgacctgcaccatgcccagccggaagccatggccgacgccgaattggatgtcgccgctccagatgcatcgtgccagaggttggacgttttcggaaaggaatccaatcggaatcaggcagtttcaagaagatcccaaggcaggcccacgaagagaaccaaaaacggcactggaaatggggtcagcaagcaacctcgtcgtttgataaagtccccggaggggcacaagaagaaggaagttggcaagaagagtaacacagcggagcccattatttacctgttcgcccttgtgtttgtctatctgcttctgaaggccgcctcggacatcaaccagcactacaagtcgcagaacaaaggggacaagcgactgcgccggtgctcgctgcaatcttatgcccagatccacaagcaggatcgccggtcatcaaaagtggatgagtcccccatcttccggcgcaagcatataatcagcgaggagcgttccgtatctgtggatcgcttcaagtacacgctaaacgatgagggaggcttcaccaggtccgttccgctggttcaggagtatcactacagggtggtatctcctttggccagccgacccagtcagcagcatccgcataagccgggatccggagaagcccgtttcggtaaagagtccccacaacaaagtgacacgtcccataagaccaactactttcttctctag

SEQ ID NO: 4428 - protein, 307 aa, DROSOPHILA
MKSLAGDKFALSEEIGPPPCSPKHRKASAVSRDTDTNNHHVVPLGILVVLCTVYLMVAGMQRNYRHYFKPGVAAFDLHHAQPEAMADAELDVAAPDASCQRLDVFGKESNRNQAVSRRSQGRPTKRTKNGTGNGVSKQPRRLIKSPEGHKKKEVGKKSNTAEPIIYLFALVFVYLLLKAASDINQHYKSQNKGDKRLRRCSLQSYAQIHKQDRRSSKVDESPIFRRKHIISEERSVSVDRFKYTLNDEGGFTRSVPLVQEYHYRVVSPLASRPSQQHPHKPGSGEARFGKESPQQSDTSHKTNYFLL

SEQ ID NO: 4429 - DNA, 3066 bp, DROSOPHILA
gtctaactggtatacacaacaaaattaacacattcgctgcgaatgaaggacccacacacctacccgcaccccatttggctacctcgcattttcacccaactccacccaaaagcaaacaattgcaagttatttgtgaaaattttattgtaattacaaaagttttcccatgttgttttgccacgctttcaccctctttcgatgccctgataccttgaattatacacaaataggtttccctccacatcgctatacctattcctattctaactcctcctgcagcttctccggattctgcccctgcttctgcttcagctcctgctcctgtcctacatttcggtctggttcaatttggtatttggggctcgattcgaaagctcagtgtttcagcaaactttatccacttcattatttgctcgtttccattgctgtgtttcgctgtttgcctgtttgttcgccagtttgcattgttggctcgtttcgattttaattgtatctgcgtgcagaggccaccatcgcccacatctcaccaaggaaccagccagcccaatggcctccaccactccaccccaagtactttcgagtatattaaataccggaaagttctcaggtcactgaagggcaaacgtccatggaaaggtggaagggagcaggccaggtgctaaacaggtcagttcggcgagtgcgtgcgggataggaattcatgtaattggcctaaagacgtagccctcacttgatatataaaaatatttattagtatatagaatactcttcatacatttttccataattacatatatacggtgatcagtcatggcattattgacagatagttttccgcctgacaaaaaagtatgacaaatgcccaccaactcctaacataagcgattcatatgatatgaatgcgaagattcggataataaatttagaaaatcattccccgctttttccttaatatcaatgccttataatatgttctgcaacttgtttattgatcacatttctagtcgtagtaaaagttgccacacagccgcttgccgccccttaatcttttgagtggcgttttggagggcacggagtacaagttttgctgatcctcggacatggcgtgtggcaagatggagtaggggtgttgggtcacatggtacctctgacgggcaaagtcctgcttctgctgctcgtgctggcacatctgctggtgacgctgctgctggtgcagcatgcggatatactggtcgtagtactccggctgctgacagagcttctcctggcgcatctgcatctggcgggagtagggaaggcgcgtgcctattatctcggtgggccggctgcacaggggcacggtgtaggtctttttggaccggccactcatcttgattctcggacggtagacgtctccctcccgtccaggtgaagtgcttttcagaggttgatccgctccaccagctaggtgtgccattcctggggacctcttggcgtccacgaccaggatgttcctgcgccgcgggaagccagagtgggaaaatattttggtgggcctcttccgaagcagtgacgattgcttcttgaccttctttcgctccttcttagctggtgatctcgactttggaggcgactccacctgatcctgtttctgcaacttttcgatgtttatagctcccaatttggcagctctcttggttacatcgatccttgccggcctggcccaaaccttccgttccagcttctttctttcacgatccttcaatcccttgatccgcttcggaatacggaactccgagagaccagagggatcgctggccaattgccaggcggagttcattctgggttgctgcatgggttcagctcccacaaagtttgggggagagtaagtcgtatgtctctcctgcgctccggccgctatgggtggcggtgcgaagtactttcgcaatgcggtcctggagtccagtatgccgggccagttgcttgattttaacgatttcgaattcgccatttcgctgttgctcacactaaaaatttggttttgtttcaaggggcctcatacattgccaataatttgatttattttccatgaaatctaaaaaagcactagccaaatggcagatagaagtctaaatgaaaggggacgggatgccaactaaagtcacacttatttattggcctgacctcatgttcggcactcgatggttgtgttttgtgtgtgttttttgggggccgagtccacaatcccgcccaccgaccaccaaccgccgcccaccgacctcagatggacagacagtaaatcggttcgtggcattaatgcaaataagtggaaacacaaatattttcaacgtttttgtggtttgaaccgaacgaacgaactgcggcagaggaaaccttttttttttgtggacccatggccgttttgggacgacagcacgagggtcgatggatcatttccgctctcctggcttgtgtccctgccccccgagtcccttttccgctcccatattccgattccgtatccgtagttgttgccgtgctgtcctgcgaccgtttcctgtcggcgggcgcagttaaatattgaaatttatatttaaaatatttcaaatatacagttaaatgcttggtttcccccctttttttgcgttgccctcgcatttttcactttagtttatgtggagcatgtttaatttatgagaattgctggtccctgttcctgtccacaagcccactccatcgctttgagcccgatgccaatgaatatgaaaaatcaatttgaagtttggggcccgcactgaaggtcaaacggttgtttcgggccttcttaaatgccgacgccaacgaaacgtggcaaatcggtttcaccatcattttgcatcggggggtggttgctggattctggatctgacccgtgtcctttgccctcgaactcggcctaattcgattgttacatttcgccttaatttcctgcaaaagaacaaacatttgtgactcttcttgggcgggtcagtttctatctcatccggtcgtccgtccgctcccctcgatttccaattagcagcagaaatcacctttctgtccttttcg

SEQ ID NO: 4430 - DNA, 1066 bp, DROSOPHILA
gaaaataaatcaaattattggcaatgtatgaggccccttgaaacaaaaccaaatttttagtgtgagcaacagcgaaatggcgaattcgaaatcgttaaaatcaagcaactggcccggcatactggactccaggaccgcattgcgaaagtacttcgcaccgccacccatagcggccggagcgcaggagagacatacgacttactctcccccaaactttgtgggagctgaacccatgcagcaacccagaatgaactccgcctggcaattggccagcgatccctctggtctctcggagttccgtattccgaagcggatcaagggattgaaggatcgtgaaagaaagaagctggaacggaaggtttgggccaggccggcaaggatcgatgtaaccaagagagctgccaaattgggagctataaacatcgaaaagttgcagaaacaggatcaggtggagtcgcctccaaagtcgagatcaccagctaagaaggagcgaaagaaggtcaagaagcaatcgtcactgcttcggaagaggcccaccaaaatattttcccactctggcttcccgcggcgcaggaacatcctggtcgtggacgccaagaggtccccaggaatggcacacctagctggtggagcggatcaacctctgaaaagcacttcacctggacgggagggagacgtctaccgtccgagaatcaagatgagtggccggtccaaaaagacctacaccgtgcccctgtgcagccggcccaccgagataataggcacgcgccttccctactcccgccagatgcagatgcgccaggagaagctctgtcagcagccggagtactacgaccagtatatccgcatgctgcaccagcagcagcgtcaccagcagatgtgccagcacgagcagcagaagcaggactttgcccgtcagaggtaccatgtgacccaacacccctactccatcttgccacacgccatgtccgaggatcagcaaaacttgtactccgtgccctccaaaacgccactcaaaagattaaggggcggcaagcggctgtgtggcaacttttactacgactag

SEQ ID NO: 4431 - protein, 277 aa, DROSOPHILA
MQQPRMNSAWQLASDPSGLSEFRIPKRIKGLKDRERKKLERKVWARPARIDVTKRAAKLGAINIEKLQKQDQVESPPKSRSPAKKERKKVKKQSSLLRKRPTKIFSHSGFPRRRNILVVDAKRSPGMAHLAGGADQPLKSTSPGREGDVYRPRIKMSGRSKKTYTVPLCSRPTEIIGTRLPYSRQMQMRQEKLCQQPEYYDQYIRMLHQQQRHQQMCQHEQQKQDFARQRYHVTQHPYSILPHAMSEDQQNLYSVPSKTPLKRLRGGKRLCGNFYYD

SEQ ID NO: 4432 - DNA, 9137 bp, DROSOPHILA
tccacttgcattgtgtccactttgtgtcagcaatacgaatatgcatgcacatatccttatgggcgacaggtgggagaggtgctgattaaatggctgcctgggggattgataacagccagcaggactctcgatagcatccgctaggcggaaacggaagcaaggttttttttcaaattaatcttgtttacgccaaggaaatattctcagcaattttttcattaccgactgcagcttattttttgcatagtttcgtgtgggtggctcgccggcggatttccatacaaaaacaaacgccccttggcgaggctataaatttattactgaactttaaaataccaagccgcagccagccacttgcccttaacacttctccgcggcgaaaagtcgaacggcagcctgcactttcgcaattatccttgaaaacgctgcatcgagacgcaggacgagtcaggctgaaggagtgactgcaactgcagtcagaaagttgcaggaacgcgccggcggaaatgtgtttttgctgggtgttgagtgactgcgaataatttattagctgcgtgaaaaataatttatgttgagttttcccctctgcttaatatacactttttgtttcccacagtcggtgggcgcgagcggtgcggtgggggcgttggttgggcatcagtttcggatgggcaatcggtcaacagatgcagttcttctaaattaaacaatctgccgcgcagttttagtagcactatgcgcagtttctgagtcactggaagcgggtgactaacttgactaagcacagttttaaaaaatatttttatgtaaaagaaatgtaaaaattatgtagaatacagtgcgtttgaaaagtatttggttattttttaaaataatataaaaacgtttacgttttaatacaaaaatataacattgagccgtatttcccatttattatgcagaaccaagttcagataagttaaagtctgatattttattaatttataattattattattattggagtacaaataagtttcacatttaaaatatgacgagaattgcaacaaaggttaaagaatcctacgcatctaagcgagggcatcgcctctcatcgcgatgacatcctccttctccgtcagttgaattgattagaattacgtttcgagttcgcattaatgattacaactagcaactaggtgcgtttgggctcgggacctccactgtggagcaccgggtggaggcgtcgagggtcgtccactcgcttcatttcgccctggcgctgcgcaaattcgatgcagagagcaccgaccgcggtggtggcgggcgctccaggctgtccatgtggtaacgccgcgtcggcgtggaagagtcgttcttgcggccagtccggctcagggtgctggcactggtggctccattgtgtggtggtggcttcctcggcagtgtggacatctaaaaacataaaaatcattatacaacataatctccacatggtgaagcaactccaagttaataattgaggaaatcccttttgcttataagatttcatagtctataattttaatttattcactgtgtgtttaaataaccggtgtcaggtcaacatctttgcctttgtaagaagatatctatacatacgcaaatgcgtattggcaaacacaaccaaaaatttcaacaactttgttcagatacaaattttcaatcacttttgtccggtggttctcctccaaaaccagttgcaaactataggctcttagcgaacagatgactgaaattatcaataagtgatctccctaattttgaatattaatttcctacatgattggggcgcataaaatatcaatttgttatcgtaaaaatttaaagcatcgcctataatgttttctcgaacttattagggaatgatctgtttactttgaactagtcccactcgatatgatgaaacttacccgcttgttttgctcctgtgagtagttgatctcgtagccctcgctgatgtgtttgggcttccagggggccagcatggagacggacctggaaacggtacgggtcatgggctggaggggcggcggatgctggggtgcctgttgcttgcccttgcgaaggtcatcgcgcgacatggacctccggcgcagattgtatggctgtggaatgtcgcccaccgtggtggcatgcaggtagactacgctgcgctggctatgcaaactggactcgccttcagtgccagaactctccgctggatagcgatccctgcacggagatgggttcatcgattacttacagttgcacttattagtagcttttatccaacccacctgccgtagccgacattctcctggcccaaactgttgagcagtccgcggcgctcggcactccttgccggctttggtggtcccaggagcggacgatcttcgatgcgctggccacgcggtccatccactgttctctccagcgacatggctcgatgtcccgccgtgctgcttctcttatgtcgctccgtaggctctggttccgagccgctctccgagatgtcgtgcagctcgcgggagcgtgagtagtggcgcctcttccggaaatccacctcgtcgctgccgttgtccaggtgctgcatggagctagcccgctgacggctggtaccatttctattgtggccttcaggctggccagccaacgagtgacgataatcccgggctggtggaggaggactgcggtccaggtggtaggcactctgcgagtgcttcgactgacccagcggtggacggctcctgcagatgaaaatgtatgcggtttatatctctagatcgatgttgatccaaatattcctcacctgggcatgctggaggccttggaaatggttggcggattcgagtccagatcagtgtcgccaaagaagcgcagattcttggctggagcagctgtcgtattgcgtttggtccgctttaagctcgatgtggtctcactgtgtccgttcacggatacattgagctgaaaggaaggcgcctaattggttacagctctaatttgaaggaaaaacgctcctacctccttgggactgctcttggcccggcggtccagcgatctgaaccagctagtcttctcgaccttcgcgggtgccgactccttcggcttcaaatgctttttgggcggtttgtccgctggactgcgcttcaccagcaggggactagctttgggcgtggacagtcggcgtcgcagcgagatatcgatagtctgtggatttgaaaaaatttgatataaataaagtgtactttatttacaagtaatatattttacatctctgcacaattttactgactgcaatttaaatataagcttaaaaattgtctaagctatatatatatataagtactactaacattttcaacacacagataccccgaattaacgaccgatgtgattgatattattccctgcacaagcagagttcgatttcgtgggcggtttgctttcgctttcgggtcagaggtcggctcacccactgcctcgcaacaggttgcgaatgtggggcaggtggcctttatgcgcgtagccacgtgggggagtggcgaggtgggaagtgggaagtgggaagtgggggactgggtgccggcacataaacttgttttgccatttgtgaatgcgacagccagtcggctcgatttggccggcccaatgcaactttggcccacttgcggtcgaaactgtaataggtattgggttttggttttgggcatcaaggcagggggcggtgggtggtgggtgatgaatgcttgaggccggcctccccacccgttcaatattggatttcaaatcgaatagagactgcaggtgcccagcctctgatctaaaactttactggtgcactcagcattaagccagagagactacgcacccactaaataatttggtattcaaatatgcccagaacgcgactgcgactcccaatatattttacgactaagttgggggcccataaataagctaacagaattattgacacaacagcggtctctcattcgcgtgtgtgtttttgggcatgtagaatctctggaatgaatggcaagcacttaaagatttctgcggaacacacatcgggcggcatgtttttattggatgcccccatgaataatggcacaacattgtcccgccggagatgctgggtcccgctggccatgccttataaatacctctatcacgcaagcataatttttgacaacggtccgaggcagtggccacaccttggcgtgaaactcctgcaggatgggcatgctcctcccctgcccagccgtaacctaaaaactctctgattataagcgttttgggccgcccacttggaacatccggccgatcgaaaagtggcaacatcctctgggcctcttagacttggccaagaaatccgctgaagcattgcaaattggcttgcagcacgcagtacgcagcagtggcagcggcagcggcagcaactgttgcagttgcaattgcaaattgcgcaatgtgaacagcaacacctcggcggcaacagtagctccaaccgttttgcattggaatctgggcacaaaccgaatccgaatccgcatccgaatccgaatctaagcccagtttattcaatttcccccgcctcgatgtttgtcgtttcgctgtcagctttcttaattttcgagcgcactgacaaacggactgacagagtgacaaactgactagctgcctgaatggcagaatgacagcagctgcgtgggtcttccacttctaaatcttgcacacagatatttctattttctatacacatatatatatatgtatctttcccgatgctcgaccctcgacgcttttgttcttgctcgaaatttatacgacgcctcgtcgctgaattgtttagttttttcgtgttagcgcttttcgttccgtttgcaactctatttggcctgctgtcgtttattacttaagcgtagtcgcgagtatttctttatggtctggtcagcttagcccccagaatcccccagaagagatgtgccccaaagtggatggtgacgtcttgtcttgtcttctaaggctggcaccattttcagttggcctccgacgcccacccgcctgccaagtggtctctgaccggaccaggaagtggatcagcttcgaccggagcagagcaatcgccagaacatgggttgctactacttggggcctactcccacagctactcccccaaaatgtaagacccatcgacgcaagtcttgattaattcgaaattaataatagccgaccatgaccaagtgagccgacgagggtctggattccgaaaacctcagtgatcttgcccagccgccgggttaatgaccccagcctggcgccatcaattggacattagggcaaatgggctggcagttgcagaaaaaatgatatgtgctcatatcatgggttcatttcacatatcattcggctgctaacccaataaatatatacatagttataataaaaaagattcaaatatttagactcgcaaagtatctaaagatctacaaatattttgtgttagcataatactaacttcaagtattgtgaactaagataagcatattaaagaattagtcaatccagataatgtcgtcatattgttaagatttaatgataaaacttacctttggttcgcgtgaggtctcctgtgcggaggtgtgatgctcgcggtagcgtgaccgcatctcctcctctctgaccatgtagcgctccctctcccgttccttctcccgctccttgtccttgtcgcggcgactcaaagtgctgctgttgccgttgctcatctgctcctttttgccactggagacgttgctgccgctgctgcgtccactgcctccattgctgacgcctccgccggagcccgtgaacagctgcttgaccttttcgaagccacccagcttcttgttccgcttcagggtgctggagtcctcgctcttcggggtctgggattgactgtgggacgtggagtgctgctcccgacgacgcagcgtgctggtggccactgggtacttgtccagatgcggatcgaagtgcgagccatcatcgatggatcgctccctgtaaacgtagctgtgctcgcgacgcaggcgcgacggtaccgcctgccgctggaattggcgctgttgggcgctatcccgacgctccttgcgcaggaacgactcacaggcccttatgtcatcgaggacagtgcgtttgcgccatctaaataaggaacatttaggtataaattaaatattatatttagcctacatagtgcgagttttaagatagaagataatcaaatattgggcaaaaaaaatcccttaccttgttgttaagtctccgttgaaggactccttccggaaatcgttctcaatgccagagtcacccttgtcgaagctgcgctgctgcagcttgtcccgcttcaagctgctctgccagtagtcctcccgctgctcccgctgctgggtttgctgggagcgcagttctggcgaggatcggtactgatccgtcaactgagagtcaaggctcttcggctcctgctccagccgatctgccgagttgtagtcccgctcccgttcgccgatgcgctcgcgatgccgcgactcccgcacctgtccatccctctgggtttcccgcacataggtctccttgacgcctccgtgtccgtcgtcgtagtacttggtgtgtcggtagcgagaggttttctccatcctgggcagcgtggagccactgtccacttgggtacgctctggcggaaactcgttggacagctcctggcgcacaggtcggtggaagcgctctggctcccgctccggagtgggtctgcccacttcccgatttctgtccgcctggcgttccagggtggcaccctccccgaaccgccgagtcaggatacgcgtctccagctgagctcgtcgatggcccaactcgtccaagtagggcgaggggctgacactcctgatgacgggcacaatgggaggttccgaccttcgggggaactcctcctcatagtataccttcctgggctcgtaacccaagccctcgtcctcgtcgcttagattgcggggactcagctgctgccatggcgaaggcgaatgactgggcctgctggccaaaggagcgccattggatgtgggcgagtaactgggcctcacatcgctggccctcggcggccgagcaggagcgaactccctctggggtgtgcggacatctcggtccattggcgatcgtcggacttgatcctcgcccagatccagctgggcatatgtgatgccctcgttgggccgaatgtaagaaaaggccggctggctgatcgccggctgcggggagaagcgctccattgacaagcgcttgaccagaccgttcacggtgcggcccttggtgagcggcagacgctccgccggctgctgggagctgtgcatgttctcaccagacttggcctgcagggtctcgatcctgtcgcgaatgcccgccgaaatggaagcacctcccgatgggcctgatgggaggatcggaccgtctagctccgcctgggagcgacttctggccagcagttcgtttaagccgcgaacgctttcattcttttcgcgcggcgtgacggcgtctgatttgcggcgctctcgctcccgaaagtagtccttctcgaagaagtcctcccgctgggcttgctcgatgatggggctcagctgctgcttggactggctggtggcgccttggtgggccttgtcttccgctctcctggctagcttgctgctgcccacatcactcttgctgcgtactaaacgacgagcgccgccgtcctcgaagcgcggatccctgtccaactggctgacattcgagtcgctcttgcgactaaagagcccgaatatggagggccgtttgctggccggtttcttggtggaggcgtcactggcgctgcgggccacgggcttgccctttctgcggcgcgtgggcagggagttgaagtcgctgggctggctctgccgtttctgcttggcccggaaactggggatgttgtcgccgttctcggccttactgtggtgcctgcccgcctgggcgatgaccagagcagcctccttgcggatgtcctcgggatcgatgtccttgggcagctggtggtagctcggctggctactgggctgcgtatcgtactcactgggatgcttgcctggatgggatggaaggagaagaggagcgagattaacttacaattgctgaggcagttccgcgaactagatggcattcatgtaaagacaaattagcacattagccggcccccgatgatgtaatatctggcagccagctgtggccaattcacacttgccaacccgccagctgctagctggtcgctaaataaggcagcccgtcccgtcccgtcccaatccgaccaggccaggccagaccaggccaattcggttcaagagttgcgagaccggccgtctgacaatggatctggcccacgtctgtcgctcgcttctcgagcttctcgagatgctttcggtgcggattgctggaaatggacccgagatacttggatctcgtggaacgcctgctctgtaatcggacgctgtaagcgctaatggccattgaagaggacggggctgctgcggtcccagttgatctatctctcataaagattcctccacttcctcactttttcataatcattattatttaatacgccgaaaacaacagcaaaggggccacgagaacaaaacagaaacagaaatgccaaagaaaacgtgccgaaacgagcatcatcatcgtggccagaacgagatgtgctagccgagatgcgtgatctctccagtcgggcagtcagcccccttttccggccaacgctagtcatcgtacactcagagaagtttgcttgcaaagtgaaaagaatcggtgttacagcaaaatagagctagtaccgtagaccagaataagaaacaatgcaatatagttcaagataacgattaaatttcacaatgtattacactttacactatatcttctcttgccgtgtattttacacacctcaaaagtcatcgcacggtgtcgagatctcagatcatcggaggcatctctgttctgcgctgaccttgccccgagatcaaatggacttctgttgccccacccggccactggccctccgcagcccctgctccacggagttttgtcca

SEQ ID NO: 4433 - DNA, 3949 bp, DROSOPHILA
gcaagcatcccagtgagtacgatacgcagcccagtagccagccgagctaccaccagctgcccaaggacatcgatcccgaggacatccgcaaggaggctgctctggtcatcgcccaggcgggcaggcaccacagtaaggccgagaacggcgacaacatccccagtttccgggccaagcagaaacggcagagccagcccagcgacttcaactccctgcccacgcgccgcagaaagggcaagcccgtggcccgcagcgccagtgacgcctccaccaagaaaccggccagcaaacggccctccatattcgggctctttagtcgcaagagcgactcgaatgtcagccagttggacagggatccgcgcttcgaggacggcggcgctcgtcgtttagtacgcagcaagagtgatgtgggcagcagcaagctagccaggagagcggaagacaaggcccaccaaggcgccaccagccagtccaagcagcagctgagccccatcatcgagcaagcccagcgggaggacttcttcgagaaggactactttcgggagcgagagcgccgcaaatcagacgccgtcacgccgcgcgaaaagaatgaaagcgttcgcggcttaaacgaactgctggccagaagtcgctcccaggcggagctagacggtccgatcctcccatcaggcccatcgggaggtgcttccatttcggcgggcattcgcgacaggatcgagaccctgcaggccaagtctggtgagaacatgcacagctcccagcagccggcggagcgtctgccgctcaccaagggccgcaccgtgaacggtctggtcaagcgcttgtcaatggagcgcttctccccgcagccggcgatcagccagccggccttttcttacattcggcccaacgagggcatcacatatgcccagctggatctgggcgaggatcaagtccgacgatcgccaatggaccgagatgtccgcacaccccagagggagttcgctcctgctcggccgccgagggccagcgatgtgaggcccagttactcgcccacatccaatggcgctcctttggccagcaggcccagtcattcgccttcgccatggcagcagctgagtccccgcaatctaagcgacgaggacgagggcttgggttacgagcccaggaaggtatactatgaggaggagttcccccgaaggtcggaacctcccattgtgcccgtcatcaggagtgtcagcccctcgccctacttggacgagttgggccatcgacgagctcagctggagacgcgtatcctgactcggcggttcggggagggtgccaccctggaacgccaggcggacagaaatcgggaagtgggcagacccactccggagcgggagccagagcgcttccaccgacctgtgcgccaggagctgtccaacgagtttccgccagagcgtacccaagtggacagtggctccacgctgcccaggatggagaaaacctctcgctaccgacacaccaagtactacgacgacggacacggaggcgtcaaggagacctatgtgcgggaaacccagagggatggacaggtgcgggagtcgcggcatcgcgagcgcatcggcgaacgggagcgggactacaactcggcagatcggctggagcaggagccgaagagccttgactctcagttgacggatcagtaccgatcctcgccagaactgcgctcccagcaaacccagcagcgggagcagcgggaggactactggcagagcagcttgaagcgggacaagctgcagcagcgcagcttcgacaagggtgactctggcattgagaacgatttccggaaggagtccttcaacggagacttaacaacaagatggcgcaaacgcactgtcctcgatgacataagggcctgtgagtcgttcctgcgcaaggagcgtcgggatagcgcccaacagcgccaattccagcggcaggcggtaccgtcgcgcctgcgtcgcgagcacagctacgtttacagggagcgatccatcgatgatggctcgcacttcgatccgcatctggacaagtacccagtggccaccagcacgctgcgtcgtcgggagcagcactccacgtcccacagtcaatcccagaccccgaagagcgaggactccagcaccctgaagcggaacaagaagctgggtggcttcgaaaaggtcaagcagctgttcacgggctccggcggaggcgtcagcaatggaggcagtggacgcagcagcggcagcaacgtctccagtggcaaaaaggagcagatgagcaacggcaacagcagcactttgagtcgccgcgacaaggacaaggagcgggagaaggaacgggagagggagcgctacatggtcagagaggaggagatgcggtcacgctaccgcgagcatcacacctccgcacaggagacctcacgcgaaccaaagactatcgatatctcgctgcgacgccgactgtccacgcccaaagctagtcccctgctggtgaagcgcagtccagcggacaaaccgcccaaaaagcatttgaagccgaaggagtcggcacccgcgaaggtcgagaagactagctggttcagatcgctggaccgccgggccaagagcagtcccaaggagctcaatgtatccgtgaacggacacagtgagaccacatcgagcttaaagcggaccaaacgcaatacgacagctgctccagccaagaatctgcgcttctttggcgacactgatctggactcgaatccgccaaccatttccaaggcctccagcatgcccaggagccgtccaccgctgggtcagtcgaagcactcgcagagtgcctaccacctggaccgcagtcctcctccaccagcccgggattatcgtcactcgttggctggccagcctgaaggccacaatagaaatggtaccagccgtcagcgggctagctccatgcagcacctggacaacggcagcgacgaggtggatttccggaagaggcgccactactcacgctcccgcgagctgcacgacatctcggagagcggctcggaaccagagcctacggagcgacataagagaagcagcacggcgggacatcgagccatgtcgctggagagaacagtggatggaccgcgtggccagcgcatcgaagatcgtccgctcctgggaccaccaaagccggcaaggagtgccgagcgccgcggactgctcaacagtttgggccaggagaatgtcggctacggcagggatcgctatccagcggagagttctggcactgaaggcgagtccagtttgcatagccagcgcagcgtagtctacctgcatgccaccacggtgggcgacattccacagccatacaatctgcgccggaggtccatgtcgcgcgatgaccttcgcaagggcaagcaacaggcaccccagcatccgccgcccctccagcccatgacccgtaccgtttccaggtccgtctccatgctggccccctggaagcccaaacacatcagcgagggctacgagatcaactactcacaggagcaaaacaagcggatgtccacactgccgaggaagccaccaccacacaatggagccaccagtgccagcaccctgagccggactggccgcaagaacgactcttccacgccgacgcggcgttaccacatggacagcctggagcgcccgccaccaccgcggtcggtgctctctgcatcgaatttgcgcagcgccagggcgaaatgaagcgagtggacgaccctcgacgcctccacccggtgctccacagtggaggtcccgagcccaaacgcacctagttgctagttgtaatcattaatgcgaactcgaaacgtaattctaatcaattcaactgacggagaaggaggatgtcatcgcgatgagaggcgatgccctcgcttagatgcgtaggattctttaacctttgttgcaattctcgtcatattttaaatgtgaaacttatttgtactcca

SEQ ID NO: 4434 - protein, 985 aa, DROSOPHILA
MHSSQQPAERLPLTKGRTVNGLVKRLSMERFSPQPAISQPAFSYIRPNEGITYAQLDLGEDQVRRSPMDRDVRTPQREFAPARPPRASDVRPSYSPTSNGAPLASRPSHSPSPWQQLSPRNLSDEDEGLGYEPRKVYYEEEFPRRSEPPIVPVIRSVSPSPYLDELGHRRAQLETRILTRRFGEGATLERQADRNREVGRPTPEREPERFHRPVRQELSNEFPPERTQVDSGSTLPRMEKTSRYRHTKYYDDGHGGVKETYVRETQRDGQVRESRHRERIGERERDYNSADRLEQEPKSLDSQLTDQYRSSPELRSQQTQQREQREDYWQSSLKRDKLQQRSFDKGDSGIENDFRKESFNGDLTTRWRKRTVLDDIRACESFLRKERRDSAQQRQFQRQAVPSRLRREHSYVYRERSIDDGSHFDPHLDKYPVATSTLRRREQHSTSHSQSQTPKSEDSSTLKRNKKLGGFEKVKQLFTGSGGGVSNGGSGRSSGSNVSSGKKEQMSNGNSSTLSRRDKDKEREKERERERYMVREEEMRSRYREHHTSAQETSREPKTIDISLRRRLSTPKASPLLVKRSPADKPPKKHLKPKESAPAKVEKTSWFRSLDRRAKSSPKELNVSVNGHSETTSSLKRTKRNTTAAPAKNLRFFGDTDLDSNPPTISKASSMPRSRPPLGQSKHSQSAYHLDRSPPPPARDYRHSLAGQPEGHNRNGTSRQRASSMQHLDNGSDEVDFRKRRHYSRSRELHDISESGSEPEPTERHKRSSTAGHRAMSLERTVDGPRGQRIEDRPLLGPPKPARSAERRGLLNSLGQENVGYGRDRYPAESSGTEGESSLHSQRSVVYLHATTVGDIPQPYNLRRRSMSRDDLRKGKQQAPQHPPPLQPMTRTVSRSVSMLAPWKPKHISEGYEINYSQEQNKRMSTLPRKPPPHNGATSASTLSRTGRKNDSSTPTRRYHMDSLERPPPPRSVLSASNLRSARAK

SEQ ID NO: 4435 - DNA, 3000 bp, DROSOPHILA
atcaacatcattatcatcaacgccgactttgatgcccctcaagttgttttgctagaatcgagcggcgacttttgttgtaatggccctcgagtgagggcattttttggtttttgaatagccccaaagcactcgagccagcgaatcgcgaaccggaactccgcaaaagtgtttttctctttgcatttatcgctgtttttttttctgtttatggttctatctttaatagcagacaggcgcggagatcagagattactttaaatagattagaagcatggatctaattgaggcctgaataattaaatttgtacattaaagtctggctccacaaaacgaacgtaaacaaaaaacctttttatctgggtcacttacgatgtgtcactctttaaaaatatgtcttcaaataaagtcgtttagtttttgtaaattgtatttaacacatcacatagtatactttcaaattgttaaaataattttctgatcattcacatgccatatttcaatgaagcatgtttgaatgcaaaatgttgcagaataacattaagtactcaaataaaaggttgaacccaatgctacgttgtagccaaaattagtttagccgcagcattttgaccaagtgccaagtggcatgtactacgaaaatgcaccactcagcgggttgcagaccaaaaaccacaaccacagcctcacccacaacagaaaaaaaaaacgaaaaatttgggaaaaagggcgggccttgaggggtttgaaaaactattccaaaaactgtttgctggccgcgtctgcctttggctaattaaacggccaaagcaaacaaaacaacaacaacaaccaaaatctcagcgaagagaaaaaaatcggcaaaaaccaaaaaaaaaaaaaagcaagaagacgttgaacagaaaacaattaaaaccgagcatggaatgtttgtcggagtgtgagtgtttgatggcggggctataaaatcaaatcgctccagcggattcgccagcagttgccgttcgagcgttcccagatcgagaattcgccaccataatccatctatatatcatattaattttttttttttcaagtgacttgtgtgatctgtgatttttgttgaaagcgcgaaaatgctgcgacctctgttgaccgttgcccttgtacttttcggcttttcctcggccattttggccggtcgtcttagccaacggtatttgcccactccgcaggcgagtcagctgcactaccatggtgtaagtggccaaggacaggctcgtcctggcgcaggacattcctttggaggcggctccagctaccagcgacagcaacaaccacaaattcccatcgttaggagcgattataacagcgacgccaatggcaactacaacttcgggtaagtttttcactagtgaagaaaaccgcaatatcgaaacatcgaaatccataaaattcgacaatttgaacttgaagttaaaagtgctaatggagtcatattctttcacagttttgacactggtaatggtattcaccgcgatgagaccggtgagttccgcggtggttggccccacggatcgctgggcgtccagggatcctactcatacactggggatgatggcaagcagtacacggtgaactacacggccgataagaacggattccatgccgaaggtgcccatctacccgtttcgccctcggttcccgctgctccagctgggtaagatgtcaaataagtagaaaggataaagaaatcccaacatcagtgcttgttaatttctaaaattatcgatattatcgatacttttatcgatcgcactgtcaatgttattttttttttgttcatttcttcctttgaaaccacttttcttagctatgaatattaaaccttactaaatcttagacgcagctcttatggcgctggtggatctggctaccgtggatcggcttcatcgcatgtcccagctgctgctcctgccacccgatatctgccaccaggatatcgccagcgcaggcactactaagtgatataatcgatgagatggacaggagcgcctacgagccagtaatctgctattaacactgtaaatttcaataaattgacacttcttttggtaattttggaaaacattatggtactttaatgatttctccataagctgaatatttagaagagagaatatttaaaactaaatatgccagcaattacaacagatgccctttaatccacagcattaatttataagctatacacaaaaaaccatagcgaaacactacgacaatcgagaaaccgcctttgtagctaatttaagtgaacaacttctgagctccgcccataaaaaggctgccaaaagaacacattgccacgcctctttgctgttccgatttttttttgtggactttgacttttggccaaaaaccgaaatatagtaagtgctcaatacaaaagcacagccttgatggaaggggtgaattaatatgcagttaagcatttgaggtctgcaatcaaaacaagctaagtccccgcttttgccacgttacaaacttttttgcgcccttttcggaaacaaaaaaaaaaaaaaaagaaaaaagagtcaaaactttttggccattgtcgcctggcattaatcataagtaaagccaacttttgccaacgtctgaggctctgtttatttttgtctgcaacttaaagctttgagttaaggactctcgaaagacaaaatgagatggcgaaacacaactttaatgggaaaggataatgaggttttagttttaaaagttgtagaaattgtataccgttgtaaactttgtttttttttcttgttataattttattaaccccttacagaatctataacgtacatacacatattattagttaaatataattggtttagatacaatgtgaaagtatctaggatcttctagcttaaaaaaaatgggattacttattatttaaaagttcccaaaaggtaaataggaaaaaaccacaaccttttcaaatgtaaatcctcctttacgatt

SEQ ID NO: 4436 - DNA, 706 bp, DROSOPHILA
ttcgagcgttcccagatcgagaattcgccaccataatccatctatatatcatattaattttttttttttcaagtgacttgtgtgatctgtgatttttgttgaaagcgcgaaaatgctgcgacctctgttgaccgttgcccttgtacttttcggcttttcctcggccattttggccggtcgtcttagccaacggtatttgcccactccgcaggcgagtcagctgcactaccatggtgtaagtggccaaggacaggctcgtcctggcgcaggacattcctttggaggcggctccagctaccagcgacagcaacaaccacaaattcccatcgttaggagcgattataacagcgacgccaatggcaactacaacttcggttttgacactggtaatggtattcaccgcgatgagaccggtgagttccgcggtggttggccccacggatcgctgggcgtccagggatcctactcatacactggggatgatggcaagcagtacacggtgaactacacggccgataagaacggattccatgccgaaggtgcccatctacccgtttcgccctcggttcccgctgctccagctggacgcagctcttatggcgctggtggatctggctaccgtggatcggcttcatcgcatgtcccagctgctgctcctgccacccgatatctgccaccaggatatcgccagcgcaggcactactaa

SEQ ID NO: 4437 - protein, 197 aa, DROSOPHILA
MLRPLLTVALVLFGFSSAILAGRLSQRYLPTPQASQLHYHGVSGQGQARPGAGHSFGGGSSYQRQQQPQIPIVRSDYNSDANGNYNFGFDTGNGIHRDETGEFRGGWPHGSLGVQGSYSYTGDDGKQYTVNYTADKNGFHAEGAHLPVSPSVPAAPAGRSSYGAGGSGYRGSASSHVPAAAPATRYLPPGYRQRRHY

SEQ ID NO: 4438 - DNA, 2320 bp, DROSOPHILA
gggcaagtgaatgggcggtggcagttggatggcaggtggatggtgggtggtgtgcgaatctctttcaaaacgtgtagtgtcagtcaaagaatggtggcatatgggtggctggtgtgttggattgtttgagcatacgctcaaattaaaagaccgagcagcaataggaaatccagtttgaataattgacggtttactctgcctagacaaactttatgaaaatgtaatagtgcctaaatgaattgatttcgaaagcttcgtaaagtgcgaggctaaggaaatttaatatgccacttggaatattttaggaaaatagtttaccaagacaagatacaaaaaaccagagacagtgtcaaaagtatcgaatatcagatacctgttactccgactgcttccgtgagtgcacacgagctccacctagtggttatttttcagtaactgcttatgacgctctgatgttatcaaagataaaacgcccaaatattttataatcaatatagcttttgaagtcagagtgtgaatcagatcgctatatgttgacttataaattcttaccatccaagttaatttttcgcaaaacgtatttgttttggcgtgtccaaaatgttattaaatttagagctcaatctatacatttttagttaattatagctatgatatgatgaccttagtgacatttgagagatattctggctaattttttcaaatttgtttttccaattaaacagcaaaatgatggctcccctttggagttattttgtcgttttaatatattgtatatgcgatcagatcgggtcacacgcaattacgacattataaatcagattcgagcgagcaaaataatacagaatggcattattaacatacaaactgattttgccattttgttcactgcgatggttaattgcactggattataatctcttgggaaccgcagttgtgctgtatgactataaaagaccacatgtgttgttagtttactagtttcaaattcaacatgaagcagttcgcattgttcagcatcttccttctaattctggctgtgggtttggtaagagttgaagggttttcaatcatccacttggcctaaccagaggttttccaggcacaaatgccgctgcaggtggccgcccagggccaaaatggacattcgcagggacagccgccaagaccgccaaatggcaatggaaacggcaaccagcagagtggacaaggacaaagcgggcagaacaactagaactgggatatttctggagggggacacacacctcctcgccactttcccagttacttaaataaacactttccccagcaaactaaaaacttcgtttcttgaaccccgtaagcttagaaaggcaagctcgatattaatggtcaaagggaaaagagaaattcgagggtagaatcttaaagcaaattgaaatcgaagggaaaataacatgactgaatagatttgtcatcttaaaggctctgaaaacttccactatcagttgaaaatataggcccgcgtttctgtttatgtatgtgactaaaaaaaatgttatgttttacacaagttcttagagccatattgttttacaattgttatacactttttttgtatattcattctcctcctcgctttgtgtatttgcactgcgtctgggccaagccaatttggaaaactttattaataaagtgcacaaattatgagcatgaaactcacccctcaaccccgcgcacatggccataggtccattccggctgatgagccaggaaaggggttacaaaggggtttcaatgccgggctattcggagcgatggaaacctacaaagcgcaacttcttcagcgacttgtgttctacattctgtgaaaatgcaaatgcttattactcgtaccaaaggagctgtgccgccaggcagtgcataattgcattatgactgccggagtctggatgcagctaaccctctgttcaaagtcgccggagaacccaatcccctcccaaccgacatcccttgcaattcccggaaaaacaccttctaagccgctctacttcagcaactgaaatgcagccatgtgtgaatgcacctcggagactaaccgaaaaagttatgctatcgctatcagtcaaaaaggatacatactatacgtacatacatacatatgtatgtacatatgtagagtctcacagggaagggaagcactgaaaatggccattattatcccttattttaaattaaagtaaattcttccagtcctcttgttaactatgattaatagcaacaaatgaaatttacattttagacttggagtggtattacaaatgtcataaaataggaaata

SEQ ID NO: 4439 - DNA, 266 bp, DROSOPHILA
cagttcgcattgttcagcatcttccttctaattctggctgtgggtttggcacaaatgccgctgcaggtggccgcccagggccaaaatggacattcgcagggacagccgccaagaccgccaaatggcaatggaaacggcaaccagcagagtggacaaggacaaagcgggcagaacaactagaactgggatatttctggagggggacacacacctcctcgccactttcccagttacttaaataaacactttccccagcaaactaaaaa

SEQ ID NO: 4440 - protein, 41 aa, DROSOPHILA
MPLQVAAQGQNGHSQGQPPRPPNGNGNGNQQSGQGQSGQNN

SEQ ID NO: 4441 - DNA, 2263 bp, DROSOPHILA
tcggacaccacctccttcagtttcacctcctccagacagccccacagcttctcatcgctgtactcgtcgaagggatccaaattgtatcgcatggtaccggagaatagcacaggctcttggggtataatcgagatctgtcggcgcagatcgtgcagacccatctgtcgtgtgtccctcgtgtctataagcacggatccatcggtgtaggatagccggaagagggcgttaatgagcgaggatttacccgctccagttcggccgactatgcccactttttccctgggctgtatgacgaagctgagcgacttgagcacattctctgccttggcattcggtgtgtagcgaaggtttagttccttaaagatgatctcaccctgttctggccacgtcttgggtggcttcttgtcgtccggagcttccaacattccttccggctcaatgctctcgtactctaccactcgttccacggctgtcatggtgttctccagctcggcggtttgacgtactccccactgaaccatatcgatcagtcccatggcctgtgggtaaccaaaaggtgattggcaggtgatagtgactgctttagtgtaatggcttacctgtgttatgaccagaccaacatcagctccgttgcccggaggaaaggcaaagaaactaagcgttatgatcgatatataaatcacgcatatgcagttcatacaataaccaaatgcctgcgatgtacttatgtacatgaaaaatgcagagctgtgcgcatcctggtagctgtcgaactccttctccagaacgcgctgggcatccaaggctcggatggtggttaggccattcagtgaagcagccaaatgcgagtaaactggtgatcgatctgtacaaatactaagtttctatcgatactgaatgcattcaatgtaaggaattcgtacttatagcttctacgcgcttcaagtccctcgaggttttcagatataagttgcgcagatgatagaaaattacggacagcatgagtgttggaaccaacagcagcgggttgacattggctataacgatgattattccggctagccaaagcgcaatctgcatcacatccaccagaaccacgggaaggacctcgtctacttggctcatgtccttggtaaaacgatttagaatgcttccatgcttattaatgctaaagaaatgcatgtcagctcgagtaactctattgaagatggtgttgtgcagtcgaatagatgcttttttggcgatattgaataacagaaatgacgacgacaaattcatgataactgacaatattatgatcagtgtgtatttgtatacatccatgcttttcgattccatatcctccatttcgccatggccagcagcagtgctctccttcttgacccttgaaaatataaggagtttataccaattaggcttaatcagacctgttataccaacttaccagtaagtaaggaagtagtcaccaccagttacagccacctgggccaacacagagctgctcagcatgacaaggaaagccaccaatccacctcccgcctggaaatacttcctgtacagagccaaactaatgccacctgattcctggcgctccacgtgctcctttcccgagctggaacctccgacggtctgctcggagttttccttgatgggagttacttcgtttttattgtcgggagaattaaggttcaatggttcttgctcctctgtctttgctttatctgtctttgatagacttcccagaccagtgataaggcccgttttgagtagcgactcatagtcgcccagtgctttgatctgtccattcgccaagatcacaatctgatcgacgtgcggaaggaactgctcttggtgggtaaccagaactacggtgcttccgcgtagatgaccccgcacgcactgatcgaagagatgacgtgctacgctggcgtctactgcgctcagtggatcatccaggaggtagatggacgccttccggtatacacttctcgccaaactgatcctggccttctgcccacccgacagggttgctccgcgctctccaactatagtattatcccttaagggaagcagatcgaaatcccgctccagggcgcacttctttacaacctcttcgtaccgctggctatccatcggttggccaaatagaatattctggcggacagtgccggagaagagccacgactcctgggaggtgtaagacaaggagccatttacttgcaactggccggaattcgctttcagctcgccgagaatagcctgg

SEQ ID NO: 4442 - DNA, 263 bp, DROSOPHILA
atgagtgttggaaccaacagcagcgggttgacattggctataacgatgattattccggctagccaaagcgcaatctgcatcacatccaccagaaccacgggaaggacctcgtctacttggctcatgtccttggtaaaacgatttagaatgcttccatgcttattaatgctaaagaaatgcatgtcagctcgagtaactctattgaagatggtgttgtgcagtcgaatagatgcttttttggcgatattgaataacagaaatga

SEQ ID NO: 4443 - protein, 87 aa, DROSOPHILA
MSVGTNSSGLTLAITMIIPASQSAICITSTRTTGRTSSTWLMSLVKRFRMLPCLLMLKKCMSARVTLLKMVLCSRIDAFLAILNNRN

SEQ ID NO: 4444 - DNA, 2685 bp, DROSOPHILA
aggagctggagcgcgaggagggactgcgggaggagagcggcgtctacaaggtgcccgatatgaccatggacgagacgctcaaggagatccgcgagatagccaagcaaatccgtggcaagcgcttcgagctgcgcgacgaaaagcgactgtcgtcgcgaaagaacaagccagtcatcccacgaaacaagcagcccaaggtgcgtgaccgttccgtacagaaactggtgtcgacgatggagggcctcggtgtggacatgtccggcagcgagaacgccaacttcaccaagtccgtggtggatctgcgtcgtggccaggtggcagttggctccaagaaggtgcccatgcagccgctgctcgacaaggagtcctctgcggtggtcaggaagactggtcagcctctgaagcgggcgccgtcgcgcgacacactgggcatcaagaacttggccattcgcaagaaggcgcaaattatggccaagcgggatattgccaagaaggtcacaagcaggggtctcaagggcgaggcggatcgcttcatcggcaccaagatgccgaagcatttgttctccggcaagcgtggaaatggcaagacggatcgccgttaagcgccgcagccttggctggttaagtgattctacctggtgggctcgcctgctcctctgtataaactaagcgtctatctttatccctgaaaaacattttcaatacaatattgtatttttacaaacaaattgtttatttttcggggaccacacatcacacactcagtaaactttggtggaatttttgtatcataaaaagcaaagagccttgacttctggaaaagtttatataaagagagagacctgaaaagcatgtgcattactattgtctttagcacaaacaaagtttacccccatggatatttgctcgtttcttacttcaccttggcaacgtggaagtttgtttggtttttaccaattttcttgtccaatgagtaaaagttgttcggcacagcaacatcatgtccaaagccaccacaattaaggaggctctgaagcgctgggaggagcgggagcagcaaaattccctgactgccaaggttattgatctgcaattccagtggccacccatcgagaaaatggacagcacattgggtacgctggtgcagtgcgagtgagcttaaaagttcttagttcttcgaggaaaatgaactcctacttttctgtttcccctgcaggagaatcagtatgtccacgaatatgattgagaagatattcggcttatcgggcatgaagtgcctcaaggtattgtccttatcacggaactacattaagcagatatccgggctggtaaggacgaattagataggttccattagcacatcatttgcttctcttatgtaggaagcggtggctgaaactctggaggagctgtggctcagctacaacctaatcgagaaaattaagggtttgactggtctgaaatgcctgaaggtgctctatataagcaacaatttgatcaaggactggtcggaattcaatcgcctggccgagatcgaatctctcgaagatctagtggtggtaggaaatcccctatccgagggattggacgagcccacttggcgggcggagtgcatcaagaggctgcccaccatccgcaaactggacggagaaccagtcgtgctcaacgaggagccgcagctttaagtctgatggccattcggtttatatggatgacggagagattgggttttccatgcgaactttcatagcagaaaacaaaaaaaaaaatcttgaaaaatacacaacatgtactattttagaaatcagtttcgtctttagatttttatttaaaatattagtttatctaactggtcagttggactagtaagtattgcggccttaggaggattcaaatgtctgcaatgaattgtaaattattcattaaaggattcatttttagagaatactaattaaatctaacctcttgggcgattttcagcagtccctcgtagctggctcgacccgactgattgaccaagttgtggaataccttggaatccgatttggtcatcagttcatagggcgatccaaactccacaacacgtccagcatccataaccatcaccttgtcggaatcgatgatggtgtgcaatcgatgggctattgtcaaaacagtgcaatccctgaacttgctgcgaatggtggcttggatgaggccatccgtttgaggatccacattggccgttgcctcgtccataacaaggatgcgattctctcgcagaatggctctggccaggcagaccaactggcgctgacccacactgaaattggttccgccctcgctgattttgctggccaggccatcgggcagatcggacaccacctccttcagtttcacctcctccagacagccccacagcttctcatcgctgtactcgtcgaagggatccaaattgtatcgcatggtaccggagaatagcacaggctcttggggtataatcgagatctgtcggcgcagatcgtgcagacccatctgtcgtgtgtccctcgtgtctataagcacggatccatcggtgtaggatagccggaagagggcgttaatgagcgaggatttacccgctccagttcggccgactatgcccactttttccctgggctgtatgacgaagctgagcgacttgagcacattctctgccttggcatt

SEQ ID NO: 4445 - DNA, 567 bp, DROSOPHILA
atgtccaaagccaccacaattaaggaggctctgaagcgctgggaggagcgggagcagcaaaattccctgactgccaaggttattgatctgcaattccagtggccacccatcgagaaaatggacagcacattgggtacgctggtgcagtgcgagagaatcagtatgtccacgaatatgattgagaagatattcggcttatcgggcatgaagtgcctcaaggtattgtccttatcacggaactacattaagcagatatccgggctggaagcggtggctgaaactctggaggagctgtggctcagctacaacctaatcgagaaaattaagggtttgactggtctgaaatgcctgaaggtgctctatataagcaacaatttgatcaaggactggtcggaattcaatcgcctggccgagatcgaatctctcgaagatctagtggtggtaggaaatcccctatccgagggattggacgagcccacttggcgggcggagtgcatcaagaggctgcccaccatccgcaaactggacggagaaccagtcgtgctcaacgaggagccgcagctttaa

SEQ ID NO: 4446 - protein, 188 aa, DROSOPHILA
MSKATTIKEALKRWEEREQQNSLTAKVIDLQFQWPPIEKMDSTLGTLVQCERISMSTNMIEKIFGLSGMKCLKVLSLSRNYIKQISGLEAVAETLEELWLSYNLIEKIKGLTGLKCLKVLYISNNLIKDWSEFNRLAEIESLEDLVVVGNPLSEGLDEPTWRAECIKRLPTIRKLDGEPVVLNEEPQL

SEQ ID NO: 4447 - DNA, 20856 bp, DROSOPHILA
ctccctcgttcttatccttttccatttccccctcatgctgagatattggactccttcgtctcctgccggtgtaaccaattcccacattataataactgcagttgtagcccaagccagtcttccctccacacgaatcatcgccctgggggacatgaatatagcaatcctgccagatatcttcctccgatccgggatagtggtcaccatatgcgttcgtcgattgcgctcccgcgtattcaaatttggggaccggcagccattcactgatgtgtcgcagcttcagttccaattgcagatctcctatgtttccgctcacgcgataaactccagtgcgctttatgtctctgcttttttgcatgattcgccgatgattattttgcccagtaaatttttagtttctttattcaaacctcaaagaatgtaaatgactggccttctttgtttgttttccattttgttatgttttgtttatggtttttgaattaccgttgcccaggtaaccaatcgattatataccgaaaaccaactattgttgccgtgacaaccatgaaggccgataactgtctttgaaatatgatagctagaaaatagccgaaattatattagctgctcaataagatttttataaatttaaattgtacaaactgtaatttattcatttattttattatagccacaaatacaatgtcaattagattggaaataataaacatacattacacagctagcactgaacatttttaagttgtatattttttatttaataacttacaaataataattaatgctttgtttccaaacgaaataattcagaatggtgaatggattcaaatccaatttcaagcgagatagctaaatctagctagatagctgcactgtcgccagccctggaacataccaactccgcttcggtatattcgataggcttatcgattgctcgcgaagctttgccgctgtgtttgtgttatcgtcggccgctttatgcactccacattcctcgtttcattttggccgccagttgtgttttcgattgctctgcgtgctggtcgttcctccaagtctgcaattctgcacaattttacaattattcttcgcgcgtactccaactccccattcatccgtctgtttgtttggttgtttcctttcttcgttgcaccttttgcgcgcgcgcaaccgccgataaacagagaaaagaagaaaaggagaaattctgcaacaaacactggaagtgcaattttaagtagacgatcccgtgaatgttttccagttgaaacatttactatcgtttcattttttttttaaattttgttctgttaagtgttgaaaaaaaagtttttgcagccacagcaaactaaaacttttcatcaaaatgcagcagaaagtcgaagaggttagtaaataataaaaacataataataagttaataatatctaagatcttggtgtatatgaaatcaagacagactgttgaaaatacatgctatgtttgtttgttcttcaccaaatgaagaaagttttaggtaatttcagaagcattaaaaagacattaagtaggaacctaaaagtaagcaaaaactagtgcattttatatttcattactgaggaaaagtcttattacatatattcgttaatgttaaacaataacattttacgattatagtttacgaaataatcgttaatttccagcagatgattacattagatttgcagtttatgaagttgttcttgtattttctcttactttttttttttggtttttgattttactccacccattacccattctcctatctcctttgcttccctgcattctcctgtatttcattgaacttagtacgcccccgatgctgcgctgcttctgctggcgtcgctgccggcgtcgctgtcgctgctctgccgtgacgttccattgactgattttcccgactttccgcagaaaaaaaagagaaaaaaaagagaaaaaaaaaaacgaacaacaataatgctttggccacaattgtaaaatggttttgtttggtttttcatttacatgttgttcttgttttgtttttcttcttctgttgcccacaggtgtgcatgtgtgtgtgtcccccattgttgttgttattgttgctggcgctttatttgcacagttggccgctgttttttttttgcgtgtgttttattgtgtttaatatatttttggacccgtcttgatcttttttcttgagggccaaaaccaaagtcatggtaagagctgtgaaatttgtgatcgccattgttttggtctacaattctcgtggtgctcctccttctctttctctggctgtctttcttcgcttccttctcttgtccacctctttcgacgatggagaatttaggccttaagtccaaaagtgtgccacaaatgtcattttcgataagaaatctcttttaaaatcatccacatcatgacacacaaaaatttaatatataatatagatctgcagaccagcacagagttgaactaaaaaactgcaaatgacacagaatttagtatcaatttgaaaaattataaagttgaccggtagtaagaatttgactaataactttattatttggttgcattatattcaaaatcttcaaaaataaaattacgctatgtttaaaagctttaaaatccatataaagacagtctataaacaacgcatgtttttcaatgtatagctgtcaaaaatatgaaatatggttacctttaagaagtgccataacagctgtttaagcagcttacttaacagcccagaaccccccacaaaaaaaaaaaaaacagaatgtttcatattgaaaacctaaacgagatgagacacggaaccgcagagccagaaaaatgcctttttcggcccggccaatgccagttgcaagtaaaagtcgaaaaacctgtagacacaagacatcgcagaggggaccattgagccagatgactgtccatgacccaaataaaatgcctcgagaatcgcaatgaacatgtcgacaaatgatcgagatgggtgaaggggggcggccgatgcaagggggagaggggcggtgaacgggggcagtgggagctccatggtcaagtgattgagactggccgattggccatggcagcggattgagctcgaggatctccatctaaccgatggatgcgattcgattcaggccaagctgaagatctccactccatcaccagccgaaagcaaaaatctaaaatccgttaaaagacgactccaattcctgattatcttcaatacactcagttttacaatagatatttgcatctttactattgaaagttcagttaagaacgaataaagattcgaataaacgaataagtaataggtaaccaaagagaggatcttgtaatcttataattgaaatctacctaacgaatatattaattaatatatagtcaaaaatgtatatacgaacaagctggcttactccttctttaaccataaatttcttaataattgccttttgaccgaacatctccatttgttttccccctcattttcttgaaaaaaaaaaaaactttttcccaatatgagtagaagaaaaagccccaaaaaccggttagaatttgatgcatcatttctggtcgttgctggtctattaaaatttcgctttttttgcgcattgcggacgcagacggcggtagtaagattttcacgtcgatttttcccgtttgccaattgaaagtaaaaatgcccgaaaaccggtcagccaaataacgaaaaaccgtgagatcctgacagcaactttatgataaatgcctaatgaatgttttaatgcagcttcgcagtcaatacaaagtttgtaatagaaaatggaaattacccaagtcgaaaaacataaagataatgactgaggggcgaggagaaaagatgagatgggctaactgctcttttcaaaattatccaaagtggctagaagaaaattggtctagtggacagaaggcagaaggcgtatcggaatgaaatgcaaagaacatcaaaaaatctaaaaactcaaatcttggaacccaagagaccgatgtaattacaccataaacgcagatggtcagataaaaagaggggatagccgaaagttagcttttttctttagcaggtgggagatggcccaaagtcaaagtcaggctcaaatgaaaaacgcaaacagcagacgcaaagtacgctaaaaaaaataaaaaaaagaaaacttgaaaaaaatgaaatgaaataaaataaaaacaaaacaaaacccgaaacttgtcgtgtgtcgatcgccaaaggggcggaggtggagaaggtggaggtcaatgtctgggttcaacgactcctgacctctggcaatctgaaaatgggggggaaaaaaaacaaacagagaaaatcccaaaaacaacggttgttattgaagcactcaagccgaaaagatgagagatattatctcaaaaactggagcagttgaaggtatccaaagcgaagatatggaaaacgaagcagagcaaatgtatctcaagagtcctacacaatcgaataagttaattatccactaactatgggcggctaaactaaactagatcgtaagctagtctaagctgcaaatggagcttgccaaatcaatgccattaaacgtttaattcacttcattcatagcccctattttattctttctattttatggtatttgtatttgatttcatttgaatgataactggaatcgaaaccataaatagataataaatttgcttacaaaatatcaatcattttaggtcatcaaaaagcgtattagaacagtgattaattaacgattcagcatgataggtatataaatcatttgaagatgaaccataaaatactatgtttaatgaaccataaactatgacaaattatctaaaactcctttcaactgacaatccctatattagattaccttaaaaaaaagctcataaattgtatttcttaaacgctctaagcatttgttaaatccgcaatatttttttaagtaagccttctgggaaatcccaacgtttttcttttttttctgggaactttcaattgcatcttggcgtccaaatcttttcgagatgacgagtgcaacggggctgctgcctatgaccacaaacaatggcaaataaaacaaatattatgcatcataaatttcaccgacgacgaaacagaaaaccagtttttatatattttttttttcttttattcagttctggcaatgaactcaaaaggcaaagacccagaccgagacttttacacatattttttgttgtaacaaataataatattggaataaagcgaaatgctctgcgattacgaaatcgaaataagccccaatctgaataataatagtaataatacacgcacataaaacatttcgttggccgattagaaattcaaatgtggctaagtccaatttctgtttcgttcccggtttttttttttttttttttcaatgaaaagtgaatgtgaatgcgatgaccgttaggactgaggcaagcatttaactgccccacacacaatgcaatgttttcctttatatattcagctctgttttcgaaagtgattttgaactacattttatgcggcaatccgaagcgaacaaaatgaaaccaagccaaagcaaagccataacccaaaacctaataccaccaccaatagatagcaaatattttactatagcgcgttgcttaattgatcgatcgcagctcgtttaccgttggccggctgatataattgccggccgcaagtcgattttataacttcgaatcaacttgacgtggccagaaatcaattagccatatagccgtatataaaccataacccaaaaaccgtgtcaatcaaagtgaaagaagtcatcgcaagtcatcgattatctcacagatacagattttcccgattgcagacaaacataacacataattgctattaaattgttcgcaattagtaagtcaattgattgtaccacagatacctacgatatcgaattgattcgatgtcattggctataattttgccgcgacttactgatccacgatcgtcgattagacgaaattgatttttcgtcatggcgcaagaaaattatcaatgtacactgaacagtaagtaaaggaaataggacactccatagattttaatgggcaatcttgagttctgtttagaaattattttacatttaagaaggcagaacattcggctgtctgcttaaatcgtatttttgaatattcattgggaatatttccccacattttcccctagaaaaatatttatttttcaacgtgtggctaaggaaaatcggtgatcagatgatgaaagatgcattactagtgcccagatcgattccattcttttctcatgatcgcttcgcttcgaaagttgttttctcaaatcaactcggaatcaactcaccccatcctcagcaccaagtcatcgaagaagaacgtgcaggagaaataatgagattttatattttctctattctagaaagtttttttcctcttcagcacagcctgacctttttttttttttgttcttcaattttctcgcttattgtttttccaagttgctcagatttgtttttccgcagcgaaagaaggaacttgccaagatgcaagttcattgcggcagatgacatgcgtatgtaaaagtacatatgttcataacttgcagtttttcaattaccatttgattgattgctttcggggagataaaagtgtttcgtcagtgtgagaaatgccagttggagatggccttgttggccaagataaaacagagtttctcatgggaagttaagtgttctaaacaaacaaaaaaagtgtttttgcgatatttccgctaatatcatggcatagcaagtgatatttgtaataagttaatatttctgaaagaactgatcaaccttcaataatttgttatcaatttcgaattcaaagtcgaaaaaccaaaccccacgacttctgacgactttaaatcatactggcaaagataaaaatacgacatattgttttgttgcggcacgtcatggaaattattggaaaactttcgctcaaccaaaggttcaatgtgtcgacttcccaggcattttactcataactgacgctcccatgccaaaccgaaaagaaacaaaacactttccttttccccccattgtctggggtattgataaaataagccaccgtcctctaaaaaaggagaacccggtgacctaccacaacttttttttgttggttttttcgttttttttttttttttgtttcggcaatgtgatttgcatggcaaccttaacccattggcaccgatgtgcgcactctctctttcaattagcccaacactttttttcacaggcttctggaaatcgagtcatgtaaatgccagtcagccagtagaaatatcaattagattgccggcagaagagccgctttcgattgcatgtcggatcgcctgggtgggcgttagcattatgctggtggtatcgtatgtgtattgttttatatatgagacggtgtattatggcttgtaatggagttagatcccctcccgatgcattttgtttgctcgacttactaacattttgtgctactttacattttttgccatgatgcattgcacttcggttggctgactgactgatgggttggaatggaatggaatggtatgggatcggatcggatcggatcggatgggatctttcttttcacacaactctgtcgggtggctttttatttcaattggcttttgactgcgaaaatttgaatgaaagcgagagaagcaagtgtcaatggcagacgttggcaaaagcgtgtcgcaatttccaccagcaaaaccatctgaaaaaaccaactaaacaatgggccgtgactgtactttctccaaattcaattattattgaaacgttatagtatggaatattatggtacggtacggttttatatggcatggcgtgagagtcgccaaattgatggtaccaaagtgcaaaatgcaattgtctcggcccgtgtagccgtaagttcaattgaaaacttcaacggatggtatatggttagatattattgtgttggctctatataagtcaaggctctattgacttgcggctaacattgaatgataagcgtcattatcaacaatatatatctacgataagaatattgaagtttgtataccatggacatttcacaacgaaagtctgctaaagctttcaacatttgcaattcatcaatgtcaaggtgttatatacacaaattggtgggcggggctgtgggctaattagcatatggctggcattaagtgacgcttgataagagccattagccggaaatgttgtatatattgtaatattttgggaagccactaaatctttcatttttatacccattgaaatggtttcagtgtttcttcttttaaccttaacacagccggtttaatcagttgttttttttttttttgcaagaaataatggaaacatagttatttctactccgatttaaatatcatttatgtgcacaacgcaaaaaaaaggcaaacttataaaaaatattaacaacaacgggcttttgacaaagaaatcagcgactttatctaatcgaaaagttctgttggcaaagcaatcgtattccacaaagagaactatatttttccgaattcttacctagatttaaaaaaaaaccagcccagatttataacctattaataatagaagtgatatcgtactaacctgccgttccttacaacaatgacgatgaaggtatatctcgggaccacaaaaaaaaagaatagtttgaaaaaatttccagcactaatgactcaatttgttaactgaacttgactgtaaatatgtatatatcgataacgaaatgatagctgataaggcttatcagtcgtaactttcctgcatatattcataagcccatggtgtaaatatggaatataaacacctgcaaggggtgccaaattcctcagctcctcctaactgaacccaactaccgataatattgcagcaggctgttgttaaaaccaccagagtacaggtggtgcttattctgctggtggtgttgctcgggtgctccaattggttggttggtggtagtgttggtggtgctaaacaaacgaaataacaagtggggaatgtcggcaactggagcaaaggaaactagaaaccagataagatactttggccgaaaataattaatcgaaaatgccgttgccaattataaatggctaggtgacacattcactgcagcagcagcagagtgtcttttagcggcccgagtgcttccccaaatgttattgaagaagcattggaacagtatctatatatatatatatattagtaccgaattgattgatatcacccattatcttgattatgacttggtttgtccaagagaagtggttgatatggcaattacttcatttttgtggcgcccccgggtggaccttaaatactatcaaacttttatcgattgctctgtagctattcagtaatagaaactctttgtgaatatgttttccactgtggattgcataaactgcaatctgaaatcgaagttgcaggtctcgtgccatcgagtttatgaccgccttcccgtaatgaagccatttccacagtgcgggcatttccgctgccacctgcttctgcaaaatgcctcgaatgccgtttgtccgttgtgttgtttttcttttttttgcatttgcttaacaatggtcgggtgtttaacggtcgacgcattaccattgccactaagtatcgtcacatcggttgtcacacagacatagtaacataaataagccagcggagacagttggcccccatccatttcgagtggagcatatatgtatgtacatataaatgtgtataaaacaagagtcactaactttgcatatgcattggagatttttgcctttcgcgtaatttatatctgacaagatttggcaattgtctctccaagtttcaacactcagaaaacgacgtatccaactccattttgttccaaaggcgtgggaaagacattcccacatttgttatgcttgttataagtacatttaactaaattagagacagatattgttattgtttcaacactcagcttgtttttttttttttagctggcgaattttgtgaaggtgttggcggtttacgtgtcatttgacctagtttctcgacagagtttgttgggaaaaagctctaacgaggtagctaaaaacaagcgttttcacaaaaatagtctgcgtttgttgtaaaaagatcaaccgcttaaaaaaaatgaagaaataaaagtacaaatatttagagttttatgagtatagtactgcattaatccataatctataaatgatttatgaccactatcaatggcttcaccttgtcattgatttgctgctagccaatgtccacgaaacttatctatttgcactatcgcgaaaattctaggaagtgcatactgttagcctggaaaacccggaaaagttggtgaaaggcaacagcttaaaatttccatagcacatggtcttaataagtatgcacaacctttcacaaaacaaccaaaaaaaaaataaatgaagaaaatggaatgcaaggtgttaggggagttggaaaaaaatatagaaataacccagcgacgataatgataatgataatttttacgatccatgccaactgacggacagcggacaaacggacaaaatatgacgcttataaagtgcagttagcatccaaaccgtttaccgttcgttggcagtggctaagcggctgctaaatgtcataaatgcggacaatggacgggcgcatttcattcataaaaaaaaaagaaaataaaataaaaaaaaatgggggaaaaagaaaaccgtgcccattcagtttggctcaagttcagctccagtgggcgtgtggacttatcgggtgggtggggttattcgaatgcttaacggtcaactgtctaagcgggaaaatgagccaaaccgttcagaaaacgcggaccattgtcacgtcttaagtgttggcactttctcaaggcagtcagtgaaatggtttcgcttttaatcaacccaaaaactgagctaattcgcgcctgtcactgctgatcttgccactatgtagttacctcccatcgatctctgtttgttccgtttccaggtttgccaaaaaaccaaaaaaaaaaaaaaaaaaaacaacaacaagactaaaaacaaataataatactgaaaaagagcaaatagctcgaatgcgaacaaagcaagtcaattaactttgcccgtgtatcttgtatctgaatcgcgtctgtttgtccccatccatagaaagaatcttgcggttgtcgtgcctcaccgacaaagtgtttcgcaaatatttgccattgtcttggcttgaggtacatatttcaatcagcagccggcgacacaatatgaaacgcagcttcaattacagcagacagcaaaagacatggcaattacaaaaggcccagatatgtatgtgcactccagcgatctgatttggccaaaagaacaggcaacagatgcccagataatacaccgaaaaaaaataatgatactaaacaccttagagcattatttacaacataatataataatattgcgctctatttataatgaaatgggtatgaactgcaaatcagtatatatatcacatatttctctcagtgttctctgcatcttttacgtgcttcgtggagcgccccaagttcaacacgcaactgtttgctgcacttacagctgcacatacatgtgtctctacacggcttgttctttgcgtccacagttctcaacagttcagcagtttttctcctcggctgtggcgcttactttatttgccacgccgcgtgtcaatggcccagagaccagctgccaccttgccacttttgctttgggaagatgttcagctgccgctgcattttggaagtgaacagatgacataatgctcctacattttatcatatcatttggtacgagtaacatatatgctgggcacgttttgtgggtctggtcaatcggcatgcagctctgctctagtctgcattcgtatgacataatttgtttttgtttctttatttgtttggctttttgttttagctgtttttatgccttttggctttttgttttatatgtttttatgcctttttggctttttgttttatctgtttttatgccttttggctttttgttttatctgttttgccctattgttatggcattttttgcggcacatagtggcgcggatcgcatatttggtgctccggttgagtggccaggccacatttttccatgggaagttggcttgcaaagccagatgttgtaccttttttttgctctgaataattattaatcatttctttcttaaattatagagtatttgcccaatcaatacccccattgaatttcgaacgtagtatacagactttcttgttttttaattaaataataatataagtaaacgctgccttaactttaaagaaatttgtttgccttgagcttgcagcttgggtcaataaaatagggttttttttttttcagttggccaagttgccggactgaatcatccatccattgagctgagtgctctgcctcccatctcagccaggcacttaatttaatgaccgactaactaactaactgtccggggccaataaaagccggccaggaccgacaaccgaatccaaattaatggccaaacaatccgcaatcaagccgccgaatgtaacgagacggaattgaaaaagcaaactttagttcgagcccctgatttggccaggtcacgcatagttggcaaaaaaaaaagctggaaaacctggaggggctgggaaataagtgatcgaatcgacgggcttttttttttttgttatcagcactcgcccgtttcattccacctcccatctagccatttattcggttatcgcaaattcattttggttaacacacatatgtgtaggaaccttttataggaacctacccatcatataagataaggttcgaattaaaagcaacacgaactatatatttgccagcgaattgcgcaaaaagccaatatcgttttggccccatttcccaacaatcccacccacaatcctgggctcgcctccccgccccctttgtgcccattttggccatctatttcggcctgttttcgcgttgttgaccaatttgtttggtttttttttttgctaatggagcgcccaaagctggggacgtgactatggccatcattttgagtggtctcttggtcttttggtctgttgatttttttgttgccttgctttgctttttggccaacattttcttctgtggcatggcaaatccacaagtctaatgaccagccatcgccataacggaccattcttaatggtattggtaatgctaatgatatggcgtcataattgacacatgctccaagtgcatccgccttagatttccaccggcgattatctccgtctccgtagctttggttatctctctttttttccccctctagaccaaaatatatagtgtgtggatcacgatttgctataggtacgtcaaaactgggtcgatcggatcgtggctaaagctcgttcagccagagcagtgttcagttgggcaaaaagataatggcattggcaaatacctacgatcgggagctacaagcatgcattcgtgggaattgaaggtctatggttggatatatatgaaaacagatctttgggttagattaaagaagacttggtgccaaatttaaggccagaaaagcaatttctaaaactttgtatcaatttaagtagctattgatttcatactaatgaacttacttcaatatttcgcatagaagaaaagaacaaagaactttcaaatattttcgaaacaatcccttagtaatttaacaataacataattatcaaatgtttttaacttgagataagaagaaaaagcggggaaatgaatcaacttaaaaaacaaattttaaatgtgttatttttaaatattcaactaagtttttgagtacgcttttattagctaaaatgctgctgataagattttagaaatttactaagcaaattagtaatttattagtaatcactttttatgaaattaaacaaatgatgatgacaaatttaccatgaagttatgaaactatacagtattaacacaccacgcatttcaatcatttcttttaaacactggttttaagtaaagttttagagatctttaataagctgatcctatcacgaaatgattaatcagtttattctaagcacaggatatgactacaatcttttttttggcatcttgtgattttcgctttgaatctgtggttttaaaatggcaaaaagtgttaaataccgcccttcgtttgcatattcaatgtattgttttgggtttttgtacctttagttagtttttttgtttttttatatgggttcgcttcttctttgttgatttgtacaatttttttttttgcacgcttcagctgcatatgcggcggtcactgaggaaaacgctaaatgaattgccccaaatacgagtgttgtacgcgatgatcacgaaggcgatgatgacgataatgatgatcgttatgctaatgctgatcgctcgcctggaaacgacgtcagcagagccagcagcccaagcagagcagagaagataacactgcaagaaaaatgtgcgagcatcttgtaacttgagattagcttaatgggaatacatagagaaaattcgtacttgtttttttttgaatttttataataacaatcatagttagttacatagtttaactatccttttttaatattgctaagaacctttctaaatttgtctctgtgtagtattgcccgaagtggatcagttgccagacagagatagcgcgctatgatgagagggagagggaaagtggggggcgcggagaaagagccacagtcacggtcacgtttcttgtcacgttctcccgctatttttacgtttcttctcttgtttctcctcttctgctgttcgtaccctctaatttcaccaatttgggcatacagttttccttatgcataagctaattgatttcccatttgaggttgctcaagccaaaggtggcttaaataattcaatctttagaaactttctaggtaatttatgtaacttgtattgcttattctgttctaaactgcagcactatatgtgcttttaatgtacattttagtcgagaacttacagtttttgggcgtaagtacggagtatagtagttaaataccatatcatttattataatgctatttgttttaattttgacttagattttagtaatgggtactttaaaatccccatcatcactatctggttcttatttgtttcgcttttcgttactcatgttttgttgttcccctcttgccaatttgctttctgcctcgttgctgatcttgttgttggccgatcttgtcgtggcagcaacggcagcaacaaattgcgcccaagtctttggcttatttgcttgttgcctgctttttgctgtttttcagctggctgcctctgttcacgcgaccgacccattgggcgtttgaccccggcgaatgtggcatgcaaatgggttcaagcttggacaagagccgcatgccattcgcatttgcagagttgcattcgcatttgcatttcccccttgcggtaaatttgctggaaaaacgcgcgccaaaagtgacagccggtcgaggagcagctgtcaacttgactttaggcagctgccgccaaaagttgccgctgtcattgcacttggacggcagcaacaagtagcagaaaacggaagtatcgtacaactttttacattagtttgccgcattttgggtatatgtaggtataccctttcttttttactaacacatgcaacaaataggggaaggaagcaaccgcaggaagcgcttcccattggcacttttttaattaaactttgaaccctcggcatcacattactgtttgtgtacaaattaatatgcacaaaaaccatcgacacttggggtctctaaaggaagtacttacgatattaagttaccttgccgaaaatgaaaacaaattggttaataaaaagtgttctcttgcttgagcaagaaaaatattggtatttataataagaaattacttcaaagtgccttgtatttttataattttttgtgtaccttagagtatttgctacttcgaattccatcgtcagtttttccctgctgtgcttttctcccagcttatttttgttttgaagtaagtgaaaacgacgtcgttaaacgcacattttgatgccattcgttgtcgttttgggtgcctagcccaaacaattgagtgaaaatctgcatcgaatcgatgcgttatgggcggcaacagctacggacagtgattttttcatactatgactccgaactgcgacacaatatttttttttatttcgacttagaccaagcaaaacaagacaataaagcggggaaaagcaaaaaaaaaaataaaatgaagcataaatgccgcattcgctcatggcgagcacttgctgactgcaaaagactggcactttctaatgcgacaacgatgcggaagccaactgacgacactcgactgccggcagcagcaactgcagcattgcagcaacatcaacgcaacagcagcagcagcaaggcaacacacctgccagagcaacctcaacatcaacaacaatcaatgcgagcacccacatggcgatgtcacagaccccacagaccctaaatgccaccaaatggcaatgcggtgacccgaaaaagctggcctatctgccctcgaacaaccccaagtggagtccctcattttcttgaaaataaacctccaccttttccccggaaaatcaagtaatatgcatatatgtagaaggcggataaggtggaggccctgtaagtgcttcgagtctgactgcaggggaagtatttagccatcaagtagatgctgattgctgtgggaatgttcttattgcgcaaaaaggtctgaagtctgagtaaaagcagacagaaaaaccctaaagacaactttaattgtaaatgaatggaaaaaactgcgcaattcatatacaatttgtaacaattatcaatgttggaatatttttatatcataaaatcgaacacattagcatttttaatcttatcttacagaaaaatgtcccattcttacatttacctaggttggttacttttttattattatttttaacgctgaaatagtttttattacataaccacgaaaacaatcgtatgaacacatgaaaatacttatctctttggcaaaatttcccattctatacatttttaaaggggtaattcgtaaaattgtgtaaatatttcaactttcgataagccagcatgtgattttaagcataataattgttagggtgcgttatgagtcactatttatgattataataaaacttacaacatttcaaaacaaaaaaaaattaatatgactgctaaaagttggttagttcagaggaaattgcttgtcactgtaaaattcttttttaattaggcaacaaaaattcgtctatttatgtatttatgcagaatataacaaaacctcgctgaaagtgagactgctaaacacttttactctctatgcgatgctttgtcatagtttcgcatattttatatagagaaaaaaaaatagcaattcaaaaaccgcgatacaaaatcgtcaacgaaccgtagagaggaatcaccaaaaccaactaactttgttgtcgatgtcacgcacaataatcggcttaggttacgcttgggtccactctaaaccactcatcgaacattactatgggccaccccgaaccactctgtaacacattgaaccacacgccgtgtgtggttttcgggcggatcatttgggcagcacgatcgaagccaatcggattatgcaaacagcggatttgtctcctccgatttcgctcaaagatgcaatccacggatgcgggtgtatcttgtgtatttcttctgtttttttttttttttttttgtctttgttgtaatacggcatgcaactctttcgatttgaagcggatcgaaagtgaatggcactcggatttgcggcatattcgattacattcaacttagaagtttgaactttgtagggtaattcgatcacttccaccgctttgggttaccaactgcactcagccaaagtttcttctttcttcagtcgaacgaatgtatatgtatgtatagaacatagttgttaatgatttcttgaagttagaattaatttcagtgcattattttgtatactcctcaaagaggactcaagcacctgttttaaatccacttcttgtgttctttgtgctcgcagaaaatcgatcccctgacacgcattcaggaggagatcaaggaggtagtgcggcgcgaggaggagtaccgccagctggccacactgtcgtccagcgcctcgatcacttccgcttcgccggatttcgagacatacacggttaatagtaactttgagccgaaactgcagcaggatgatgagcacgatctggtcgaaagtccagatcaggaccagggcatgctcgttaccgcccagccggcggccgtgcagaccacctcgctcctgctgcccatcgacgagctgtccaacacaccatcgctggcctccagtgtgaatagcgccaaggaggagagcctcgatggccagcactcggatgattcgggcatttcggcctcctcgcagagcaacatcctcatcactgggatcaccacgaatgtggccaagcagcagccactcaaactgaccgtggtgacgcgtcaggagcagcgttacattgggcccaactgctataatctgacacctgaaccgccacagcagaagctgatcacccgcaccatatccacgccccagctgagtggtctgccccagaagcggcagtttgccttcggtggcgccaccaagggtgtgatgcagcgcttcattgcctcgcatggcaagttgggcaacactagcccgctgccggctgcatctccaatgacgttgtccctgggcgccgccaatggtaatggcggcctaaatgtcaatggccagatcaacaatatcagcagcagcaacaataacaacaacaacaacaacaacaccctcaagctgaacactcgcacagccatggctttcctggagtctggaggttccacgggcggcatcaactcgtcatcggcggccctatcgtcggcggctatcgaacgcgactcggaaggcaggcccctgcgacgaggatatgtccccgttgagcagaagattcagcgtgagctgcaggatctgaagtcacgcgaatcggaattgaagcgtctgcgcaagatcaacaggcagaacacactgaaggcctccctggacaagctgtgagtctatctgggactttctgtttggattgcatcgtaaaccaattctgtgaaaacttccggagttttaaagcatacgaccaccagtgggatatcaactaaatgtttgtgtatatatattttgcaggcaactcagcacagatgatgaggccgatgcagatgatgatgatgaggactccgaggtggagcactgctatgggcccggaaaactgcgcaatgcccagtccacacaggaacttgataggaatgggtgagtatgccagagtaagcacttaaaagagagattttaacatattaatccttacagaaacgagcaggacatcgttcacaagccatcgggtaatcgcagtctgaacgcaaccgcctatatagccaatggaatcagcaatggcaatggcaacggcatgcgtccggcgatgtcgctggcccagctctgcgatctgacgccggaggaggcgccctcatcgcgtggactcatcgcccagtgggagaatctgatcaagaagaacgccgaggtgggaacggtcgaggcgatcatctaaagaatgtgggtcgggtacccttgcagaaaacggcaaaacaaaaaagatgaaatacaaaaacatacacaccaacgacctggtgcagagcagaccaaattatttaatatatagtgtccacactaacacacttgatcctctcacttctccgagtccacgtccacgtccacgtcaacgtccaggtccttctccttcttctccctcttcacctgcgaaagctgcttatcaacgaattaatcttaatgccaatcaatgggaattgaaattataacgaaattgaattgcctgtacttaaagcgatttatatgtgttatttgtaatgtgtacgtgaactgttcgagaaatctattgtatataaataattcttcgtgtttccagtgcgagtacagtcgacttgcttataatttattacaaatcaactttatatataccatatatgaaagtatataaacaaaatactatatgtacgaaatcaatatgagaaaacgattaaaaaaaataaaaaaaatatttgattgatatttgaccattgatattttaaacacactcaataatgagacacgaatcatttttttttggaaatttatcatatttatttttattcaatacatttcgtttctttcgtttgttgttgttgcggtttctgtttgttaagttcttgttacgtattcgctctgtactaattgaattaatcagatattagggtgccgtagatagagagcgcctctagtttggagtacaagtttcggttagagtaagccggttgttcatcatcgtccgcagacctaaaagtacaatttttatacacaacaaaaacggaagcgatcgacactcagcgaatttgcactacgacctcatggttggcaggtgtaaacggtgcccgagtgctgcgataatcttggaattttggtttggatttttttttttgtttggtagtttgtttggttgattggttttttctgttactgctacggaagcctcaaaatacattgttatgtacgtc

SEQ ID NO: 4448 - DNA, 1782 bp, DROSOPHILA
tttcattttggccgccagttgtgttttcgattgctctgcgtgctggtcgttcctccaagtctgcaattctgcacaattttacaattattcttcgcgcgtactccaactccccattcatccgtctgtttgtttggttgtttcctttcttcgttgcaccttttgcgcgcgcgcaaccgccgataaacagagaaaagaagaaaaggagaaattctgcaacaaacactggaagtgcaattttaagtagacgatcccgtgaatgttttccagttgaaacatttactatcgtttcattttttttttaaattttgttctgttaagtgttgaaaaaaaagtttttgcagccacagcaaactaaaacttttcatcaaaatgcagcagaaagtcgaagagaaaatcgatcccctgacacgcattcaggaggagatcaaggaggtagtgcggcgcgaggaggagtaccgccagctggccacactgtcgtccagcgcctcgatcacttccgcttcgccggatttcgagacatacacggttaatagtaactttgagccgaaactgcagcaggatgatgagcacgatctggtcgaaagtccagatcaggaccagggcatgctcgttaccgcccagccggcggccgtgcagaccacctcgctcctgctgcccatcgacgagctgtccaacacaccatcgctggcctccagtgtgaatagcgccaaggaggagagcctcgatggccagcactcggatgattcgggcatttcggcctcctcgcagagcaacatcctcatcactgggatcaccacgaatgtggccaagcagcagccactcaaactgaccgtggtgacgcgtcaggagcagcgttacattgggcccaactgctataatctgacacctgaaccgccacagcagaagctgatcacccgcaccatatccacgccccagctgagtggtctgccccagaagcggcagtttgccttcggtggcgccaccaagggtgtgatgcagcgcttcattgcctcgcatggcaagttgggcaacactagcccgctgccggctgcatctccaatgacgttgtccctgggcgccgccaatggtaatggcggcctaaatgtcaatggccagatcaacaatatcagcagcagcaacaataacaacaacaacaacaacaacaccctcaagctgaacactcgcacagccatggctttcctggagtctggaggttccacgggcggcatcaactcgtcatcggcggccctatcgtcggcggctatcgaacgcgactcggaaggcaggcccctgcgacgaggatatgtccccgttgagcagaagattcagcgtgagctgcaggatctgaagtcacgcgaatcggaattgaagcgtctgcgcaagatcaacaggcagaacacactgaaggcctccctggacaagctgcaactcagcacagatgatgaggccgatgcagatgatgatgatgaggactccgaggtggagcactgctatgggcccggaaaactgcgcaatgcccagtccacacaggaacttgataggaatggaaacgagcaggacatcgttcacaagccatcgggtaatcgcagtctgaacgcaaccgcctatatagccaatggaatcagcaatggcaatggcaacggcatgcgtccggcgatgtcgctggcccagctctgcgatctgacgccggaggaggcgccctcatcgcgtggactcatcgcccagtgggagaatctgatcaagaagaacgccgaggtgggaacggtcgaggcgatcatctaa

SEQ ID NO: 4449 - protein, 470 aa, DROSOPHILA
MQQKVEEKIDPLTRIQEEIKEVVRREEEYRQLATLSSSASITSASPDFETYTVNSNFEPKLQQDDEHDLVESPDQDQGMLVTAQPAAVQTTSLLLPIDELSNTPSLASSVNSAKEESLDGQHSDDSGISASSQSNILITGITTNVAKQQPLKLTVVTRQEQRYIGPNCYNLTPEPPQQKLITRTISTPQLSGLPQKRQFAFGGATKGVMQRFIASHGKLGNTSPLPAASPMTLSLGAANGNGGLNVNGQINNISSSNNNNNNNNNTLKLNTRTAMAFLESGGSTGGINSSSAALSSAAIERDSEGRPLRRGYVPVEQKIQRELQDLKSRESELKRLRKINRQNTLKASLDKLQLSTDDEADADDDDEDSEVEHCYGPGKLRNAQSTQELDRNGNEQDIVHKPSGNRSLNATAYIANGISNGNGNGMRPAMSLAQLCDLTPEEAPSSRGLIAQWENLIKKNAEVGTVEAII

SEQ ID NO: 4450 - DNA, 4518 bp, DROSOPHILA
acaaacgaatctatgtatatacactgagtgatattagtagtaaataaaatggctaaactaacgatcaaagttttaatgtgttttaattgaggaataatatggatggggatatttatatatatattttggctttgtaataaaatgttattgcaagcaattgttgaaattttattcagcatcgttacaaaaaaaaattcgttgtttcagaataaagttaagttttattaactgaaaatgaatagtttgtttactgttttataagcatggcatatacaattttccaacttagatacagaatctattattacagattatgattttgttcgaatgcctaaaagcatgcaacaaacgtatgaaattcatctgcatctacatataaatatataaattaaagcgatatttaatgacttctagttaaggctcttagcagcagacaagtttgcttgataaattcgttatgtatatggaatttaaaacttttttaaaaacggaatagagtggtagccaaatggtcaaagttatgacattgctcatacgccacgttgtacacacttttctcaaaataatgcctgccaatgcttaactttagttcgtaatatgtatatgattggtaatatctctatattatatacatataaataattaaaattcaaagcgattgaaacttgtgcagaaattgcagacaaagaaccgaatctaacgctatttttggaatgcaaatctggactcgatatgtagggaccaacgtaggctgtccagagataagctgttgcggtgcagtagcaacagatgttcgtggcgagcacctgagatacacccgatgatccctgatcccgtcgtcacagatatgttatttccgattaccgcgggaatctgtggctatataagcagacccgtgggcgtcggtaaggcaacagtctttaggcattggatccatcaagtgcatccgatccggagcagttaaagttgagtgtttcgaacaaaagaaggagtttccaggatgaagtttgccatcgcattcctggcttgtgtggccgtggtcactgcgaccgcttaccacaagacccacgacatcaaggtcgctgacaaggcgttcctgatgaagcagaagttcctcttcgagatcgtctaccgcgtggaggatccgctgatgttcgaagagtacattgcgatgggaaagcagttctatttcgacaaggagcactacacggtaagtgggagaagaaagcggattccgagtggtcagtaccacaaaatgcaccttcaattcttcgcagcacttcgatctgtacatggagaagttcttcgaggcccacaaggcacacgctttgctgcccaagggcgagttctttggcgccctggttaagcaccatgccaagcaggcacgtggactcttcaacttcttctactacgccaaggactgggagactttcatgaccaatgtggccttcgctcgtatgcacttcaacgagggcatgttcgtctatgccctgaccctggccgtgatccatcgcgatgatttccatggactcgttctgcccgccatccatgagatcttcccgcagttcttcttcaacagcaaatttgtgatggaggccgagaaattcgactatgagatgtggatgaagactagcctgtacgaaaaggagtatatggatgtgtaccacaagattccaactttctcctcatacgaacatggatacaaacaaggaatggcatacggatacggtaagacacacggacatggacagacatatgaacacgaatttggcagcatgtaccagaccagcgactacatgtacatgaaggacttcaagacatggcagtggtggaagctgatgggtctgggcgagcactggtacagtgagagcaactacatactgcgcgagaacatctacgagtacaaccaggaaagcaactggctgacgatgatgaaggacgtgaagaagttctacatgccggtggactatagccgcgatctgtacctctacaacgaggagtccaagctgtcctacttcaccgaggatctgggatggaacagctactggtactacttgaacatggactactccttcttcctggacggcaagacttttggcctgcagaacgatcgtcgcggtgaatggtggctgtacaatgtgcaccagctactcagccgataccacatggagcgtttgtcccatggcctgggcgagattcctcagttctcctggttccaccagatcgagatgggctacgatccacaattgatctactacaacggcattggctacagctatcgcaagaactactatgaactggagacgtacggcaactttgagatgctggacaagatcaccggcttccagcaacgcatccagaacatcgtcgaattgggctactaccagacgaccgatggtcatatgatcgatctgcgcaaaccggagtccattgagatcatcggtaatatgctgcagggcaatgtggatgccattgacaacattttcttccaattctggtacatgctggcccatatgtacttcgccgatacccactactatcagatggaggtgtaccccaatgtgatgctaaacttcgagacaatgatgcgggatcccatgttctatatgttctacaagtcgatcgcacaggtctacttccagttcatgcaccatctgcccaaatacaccaaggagcaacttctcatgccgggcgttacactgaagcatgtggaggtcagcgagctggttacctacttcgatctggttgacttcgatgtgaccaacatgctcaacggcaagatggtcttccacgagggtcaattcttgtgggacaagtccttgtttgcccgccagatgcgtttgaaccacaagcccttcagctacacctacaccatcgattcggccagggatgagaaggtggtcattcgcgctttcctgggacccaagttcgatgagtacggcaggatgatctcgctgacggacaaccgcatgaactttatggaaatcgatgagttcacctataccctgaaaacgggcagcaacctgatcaccaggaagtcaacggacttcgcttggaccgtcaaggatcgcaccacctacactgagctgtactactacacgatgatggcgttcgatggcaagtatgattacccgctggaccttactgagccccactgcggattccccgatcgtctggttctgcccatgggctggaagaagggcatgcccatgcaaatgttcttcatggtggttccatacatggcgccacagcacgagcagttctccacttttgactacacctactcgtgcggcatcggatccggagctcgacacgtggacagcctgccttttggatatcccttcgatcgtgaaatcaacgagtacgagttccacgtgcccaacatgtacttcaaggatgtgaccatctatcatgcggatacaatggagaagtactataactacaaggaatacaccaactacggtcacttcgattactccttcttcaacgactactacaccaagtacttcaagttgtagatctgataacattccgattttgaccatggatcgattgtagttagtaagcatagcaaaaagtgaaataaactttcgaaaatccaacgtattcagatttctctgttcagcttgtcaaagggatcgttagatagctggttcaacttagccaagctatgataataaccgacaatggaggtctttgcaaaacagtttttgctctacattgtatttctagcaaaaagtcgattttatatatttcttgtccaaaaagaatcaattttttggcataactttagaaataataatttcaatctagaatgaaataccttgttgatctcggtattgaaattcccaatcgaactactaggaaaaatgcgaaatgtagttttttgccattttttgcaaattttgatgatgaccccttacaaaaaatgcgaaaattggtctaaaaataaattttcctaagtccttcaaaaaatgatagggatcgttaggattggtaattagctgctcaaaacagttatattgtcatctatatgacaaattttagcgatgttatgacgaaaattccgtttgtaaaatcaagtttttggtaaaaacccgtttctttcaaatttcggtcaataaataatccgtttttttgccacaacttttaaaataatggccccaatatggaatgtcatacctcgttgagctcgttatttaattccaaatcgaactgtgtccaaaaattggaattctattttttcgccattttttgcaaattttgatgatgcaaaatttacaaaaaatgcaaaaattgtcaaaaaaataaattttcctaaatccttcaaaaagtgatagggatcgttagcattggtaattagctgctcaaaacagttattctttcgtctatatgacattttatagagaagttatgacgaaaattccgtatgtaaaatcacgtttttcgcaatacccgtttttttagaatttccgtcaataaataatccgtttttttgccacaaatttaaaaataatt

SEQ ID NO: 4451 - DNA, 2370 bp, DROSOPHILA
atgaagtttgccatcgcattcctggcttgtgtggccgtggtcactgcgaccgcttaccacaagacccacgacatcaaggtcgctgacaaggcgttcctgatgaagcagaagttcctcttcgagatcgtctaccgcgtggaggatccgctgatgttcgaagagtacattgcgatgggaaagcagttctatttcgacaaggagcactacacgcacttcgatctgtacatggagaagttcttcgaggcccacaaggcacacgctttgctgcccaagggcgagttctttggcgccctggttaagcaccatgccaagcaggcacgtggactcttcaacttcttctactacgccaaggactgggagactttcatgaccaatgtggccttcgctcgtatgcacttcaacgagggcatgttcgtctatgccctgaccctggccgtgatccatcgcgatgatttccatggactcgttctgcccgccatccatgagatcttcccgcagttcttcttcaacagcaaatttgtgatggaggccgagaaattcgactatgagatgtggatgaagactagcctgtacgaaaaggagtatatggatgtgtaccacaagacatatgaacacgaatttggcagcatgtaccagaccagcgactacatgtacatgaaggacttcaagacatggcagtggtggaagctgatgggtctgggcgagcactggtacagtgagagcaactacatactgcgcgagaacatctacgagtacaaccaggaaagcaactggctgacgatgatgaaggacgtgaagaagttctacatgccggtggactatagccgcgatctgtacctctacaacgaggagtccaagctgtcctacttcaccgaggatctgggatggaacagctactggtactacttgaacatggactactccttcttcctggacggcaagacttttggcctgcagaacgatcgtcgcggtgaatggtggctgtacaatgtgcaccagctactcagccgataccacatggagcgtttgtcccatggcctgggcgagattcctcagttctcctggttccaccagatcgagatgggctacgatccacaattgatctactacaacggcattggctacagctatcgcaagaactactatgaactggagacgtacggcaactttgagatgctggacaagatcaccggcttccagcaacgcatccagaacatcgtcgaattgggctactaccagacgaccgatggtcatatgatcgatctgcgcaaaccggagtccattgagatcatcggtaatatgctgcagggcaatgtggatgccattgacaacattttcttccaattctggtacatgctggcccatatgtacttcgccgatacccactactatcagatggaggtgtaccccaatgtgatgctaaacttcgagacaatgatgcgggatcccatgttctatatgttctacaagtcgatcgcacaggtctacttccagttcatgcaccatctgcccaaatacaccaaggagcaacttctcatgccgggcgttacactgaagcatgtggaggtcagcgagctggttacctacttcgatctggttgacttcgatgtgaccaacatgctcaacggcaagatggtcttccacgagggtcaattcttgtgggacaagtccttgtttgcccgccagatgcgtttgaaccacaagcccttcagctacacctacaccatcgattcggccagggatgagaaggtggtcattcgcgctttcctgggacccaagttcgatgagtacggcaggatgatctcgctgacggacaaccgcatgaactttatggaaatcgatgagttcacctataccctgaaaacgggcagcaacctgatcaccaggaagtcaacggacttcgcttggaccgtcaaggatcgcaccacctacactgagctgtactactacacgatgatggcgttcgatggcaagtatgattacccgctggaccttactgagccccactgcggattccccgatcgtctggttctgcccatgggctggaagaagggcatgcccatgcaaatgttcttcatggtggttccatacatggcgccacagcacgagcagttctccacttttgactacacctactcgtgcggcatcggatccggagctcgacacgtggacagcctgccttttggatatcccttcgatcgtgaaatcaacgagtacgagttccacgtgcccaacatgtacttcaaggatgtgaccatctatcatgcggatacaatggagaagtactataactacaaggaatacaccaactacggtcacttcgattactccttcttcaacgactactacaccaagtacttcaagttgtag

SEQ ID NO: 4452 - protein, 789 aa, DROSOPHILA
MKFAIAFLACVAVVTATAYHKTHDIKVADKAFLMKQKFLFEIVYRVEDPLMFEEYIAMGKQFYFDKEHYTHFDLYMEKFFEAHKAHALLPKGEFFGALVKHHAKQARGLFNFFYYAKDWETFMTNVAFARMHFNEGMFVYALTLAVIHRDDFHGLVLPAIHEIFPQFFFNSKFVMEAEKFDYEMWMKTSLYEKEYMDVYHKTYEHEFGSMYQTSDYMYMKDFKTWQWWKLMGLGEHWYSESNYILRENIYEYNQESNWLTMMKDVKKFYMPVDYSRDLYLYNEESKLSYFTEDLGWNSYWYYLNMDYSFFLDGKTFGLQNDRRGEWWLYNVHQLLSRYHMERLSHGLGEIPQFSWFHQIEMGYDPQLIYYNGIGYSYRKNYYELETYGNFEMLDKITGFQQRIQNIVELGYYQTTDGHMIDLRKPESIEIIGNMLQGNVDAIDNIFFQFWYMLAHMYFADTHYYQMEVYPNVMLNFETMMRDPMFYMFYKSIAQVYFQFMHHLPKYTKEQLLMPGVTLKHVEVSELVTYFDLVDFDVTNMLNGKMVFHEGQFLWDKSLFARQMRLNHKPFSYTYTIDSARDEKVVIRAFLGPKFDEYGRMISLTDNRMNFMEIDEFTYTLKTGSNLITRKSTDFAWTVKDRTTYTELYYYTMMAFDGKYDYPLDLTEPHCGFPDRLVLPMGWKKGMPMQMFFMVVPYMAPQHEQFSTFDYTYSCGIGSGARHVDSLPFGYPFDREINEYEFHVPNMYFKDVTIYHADTMEKYYNYKEYTNYGHFDYSFFNDYYTKYFKL

SEQ ID NO: 4453 - DNA, 4384 bp, DROSOPHILA
gttaatggcctccttcatggcctggacatcgtccagtgttttgccagatctctgatctttgcctgtgtagaaactcctctgcgtttgatgtccaaagctgaaggccttgacgtagggcaaacttttagtttcctctatcacctcgtccacctccatggaattgggtttgcttttgccttgatgcttctgtttgcccctattcttgctatgatcaaagcgatagtttgccggaagcttgtgcgttatgatgcagtgatccttgcgctgccgggcagtatgaaacttgatggtgcactcttccagaaagcaggaaaacatgggcttgtcaccgcgctccacgctggcggcaaaatagcaatcgtgctgttcggtgatgtgcagatccagtagatgggcagtgggcagcatttttcggcattctacgcagctgtagctctgctccttatctatgttgtccctgatcctagctgccgccgcatcctgctcgcccaagatgtcatcgatgtccacgagaacgccgagtttcttgaagggcgccaaactgggtgcaggcggatccgtgggctttatgaatcccgctggcacttcgcttagtatcctgatgatttgctctctggagagaagtgctactcccgcagcttccgaatccattttgtttgtgttgccaaaatgttttgttttggttcctacgccagtttcaacatgtttccactgtactgcctcttggaagatgtgattttgtttaatttatataaaaattaaaaataatttccttttgaattgaaatagtaatacaatttttgaagtgcatacgtaaaatagacataattaatgaattgaaatactcgctcatattttagatggatatatttctatattaaacaactgcaattaagttgaaacatcttaaatgcctttgaaatgatgccacatcgccagacttagttacgcgggctggcatcgccgtgcagcacatgtgaacctaaactggttccgcccgagaaccggttctttttggaatacgaagctgacaccgcgtggtgtttttgctttcgattccgcatttattttcctttcgacgcgtggaaaataaacaaatcctgccaagatgagtctgtacaacttcaaaaagatcatggtggttccgccagcaaaggtaaggtgtacccagcagcgcccgtcccgcggagcaccccttgaagcaaagacataacctcactggaggtgtttaccaatatgcgcaatatgtaaataatattttattttttgccctttccacaggacttcatcgacattatgctgtcgaagacacagcgcaagaccccgacggtggtccacaagggctacaaaatatccagaatccgggcattctacacgcgcaaggtgaagtacacgcagcagaacttccacgatcgcttgtcgcagatcattcaggactttcccaaactggacgacgtgcatcctttctacgccgacttgatgaacgtgctgtacgacaaggatcattacaagctggcgctgggtcaactcaacacagccaggcatttggtggacaagtgagtgccaaagtcacagatccccaaacgaacaaggttcgattaactattctattttttatcccgcagtgtggccaaggactacgtgcgcctgctgaagtacggtgactcgctgtatcgctgcaaacagttgaagaaagctgccctgggtcgcatggccaccattatgaagcgacaggcctccaatctgacgtatctggagcaagtgcgtcagcatctctcgcgtctgcccaccatcgatccctattcgcgtaccatcatcatctgcggtttccccaacgtgggcaagtcctcgttcatcaacaagatcacccgcgccgatgtggaagtgcagccctacgccttcaccacgaaatccctgtacgtgggacacacagactacaaatatctgcgctggcaggtcattgacacacccggcatcctggatcatcccctggaagagcgcaatgtgatcgaaatgcaagccattactgccttggctcatttgcgcgcctgcgtcctgtacttcatggatatctccgagcagtgcggacactccttggaggaacaggtcaagctgttcgagagcatcaagcctttgtttacaaacaaacccctcatcctggccatcaacaagatcgatattctaacaccagaggatctgccagaggagcgacgagcgattatcaccaaactacaggaggacaagaacattcccgtaatgctcatgtccaccgtacaggaaaccggtgtcatggaggtgaaaaccgaggcatgtgagcgtttgctctcgtaccgtgttgaccagaagatgcgcacaaagaaggtggacaacatcctgaaccgcttgcatgtggcgatgccagcgccgcgagatgacaaacttcgtgcaccctgcatcccagaaaaggcctcggcgcgcctgctacagaatgccgacaaggcagagcgcaagcgcaagctggagaaggagatcgaggaggagatgggcgacgactacacgctggacctcaagaagaactacagcgaaatccccgaggaggagcgctacgacattattccagagttctggcagggtcacaacattgccgactacatcgatgccgacatcttcgacaagctggaggagctggagcgcgaggagggactgcgggaggagagcggcgtctacaaggtgcccgatatgaccatggacgagacgctcaaggagatccgcgagatagccaagcaaatccgtggcaagcgcttcgagctgcgcgacgaaaagcgactgtcgtcgcgaaagaacaagccagtcatcccacgaaacaagcagcccaaggtgcgtgaccgttccgtacagaaactggtgtcgacgatggagggcctcggtgtggacatgtccggcagcgagaacgccaacttcaccaagtccgtggtggatctgcgtcgtggccaggtggcagttggctccaagaaggtgcccatgcagccgctgctcgacaaggagtcctctgcggtggtcaggaagactggtcagcctctgaagcgggcgccgtcgcgcgacacactgggcatcaagaacttggccattcgcaagaaggcgcaaattatggccaagcgggatattgccaagaaggtcacaagcaggggtctcaagggcgaggcggatcgcttcatcggcaccaagatgccgaagcatttgttctccggcaagcgtggaaatggcaagacggatcgccgttaagcgccgcagccttggctggttaagtgattctacctggtgggctcgcctgctcctctgtataaactaagcgtctatctttatccctgaaaaacattttcaatacaatattgtatttttacaaacaaattgtttatttttcggggaccacacatcacacactcagtaaactttggtggaatttttgtatcataaaaagcaaagagccttgacttctggaaaagtttatataaagagagagacctgaaaagcatgtgcattactattgtctttagcacaaacaaagtttacccccatggatatttgctcgtttcttacttcaccttggcaacgtggaagtttgtttggtttttaccaattttcttgtccaatgagtaaaagttgttcggcacagcaacatcatgtccaaagccaccacaattaaggaggctctgaagcgctgggaggagcgggagcagcaaaattccctgactgccaaggttattgatctgcaattccagtggccacccatcgagaaaatggacagcacattgggtacgctggtgcagtgcgagtgagcttaaaagttcttagttcttcgaggaaaatgaactcctacttttctgtttcccctgcaggagaatcagtatgtccacgaatatgattgagaagatattcggcttatcgggcatgaagtgcctcaaggtattgtccttatcacggaactacattaagcagatatccgggctggtaaggacgaattagataggttccattagcacatcatttgcttctcttatgtaggaagcggtggctgaaactctggaggagctgtggctcagctacaacctaatcgagaaaattaagggtttgactggtctgaaatgcctgaaggtgctctatataagcaacaatttgatcaaggactggtcggaattcaatcgcctggccgagatcgaatctctcgaagatctagtggtggtaggaaatcccctatccgagggattggacgagcccacttggcgggcggagtgcatcaagaggctgcccaccatccgcaaactggacggagaaccagtcgtgctcaacgaggagccgcagctttaagtctgatggccattcggtttatatggatgacggagagatt

SEQ ID NO: 4454 - DNA, 2190 bp, DROSOPHILA
agaaccggttctttttggaatacgaagctgacaccgcgtggtgtttttgctttcgattccgcatttattttcctttcgacgcgtggaaaataaacaaatcctgccaagatgagtctgtacaacttcaaaaagatcatggtggttccgccagcaaaggacttcatcgacattatgctgtcgaagacacagcgcaagaccccgacggtggtccacaagggctacaaaatatccagaatccgggcattctacacgcgcaaggtgaagtacacgcagcagaacttccacgatcgcttgtcgcagatcattcaggactttcccaaactggacgacgtgcatcctttctacgccgacttgatgaacgtgctgtacgacaaggatcattacaagctggcgctgggtcaactcaacacagccaggcatttggtggacaatgtggccaaggactacgtgcgcctgctgaagtacggtgactcgctgtatcgctgcaaacagttgaagaaagctgccctgggtcgcatggccaccattatgaagcgacaggcctccaatctgacgtatctggagcaagtgcgtcagcatctctcgcgtctgcccaccatcgatccctattcgcgtaccatcatcatctgcggtttccccaacgtgggcaagtcctcgttcatcaacaagatcacccgcgccgatgtggaagtgcagccctacgccttcaccacgaaatccctgtacgtgggacacacagactacaaatatctgcgctggcaggtcattgacacacccggcatcctggatcatcccctggaagagcgcaatgtgatcgaaatgcaagccattactgccttggctcatttgcgcgcctgcgtcctgtacttcatggatatctccgagcagtgcggacactccttggaggaacaggtcaagctgttcgagagcatcaagcctttgtttacaaacaaacccctcatcctggccatcaacaagatcgatattctaacaccagaggatctgccagaggagcgacgagcgattatcaccaaactacaggaggacaagaacattcccgtaatgctcatgtccaccgtacaggaaaccggtgtcatggaggtgaaaaccgaggcatgtgagcgtttgctctcgtaccgtgttgaccagaagatgcgcacaaagaaggtggacaacatcctgaaccgcttgcatgtggcgatgccagcgccgcgagatgacaaacttcgtgcaccctgcatcccagaaaaggcctcggcgcgcctgctacagaatgccgacaaggcagagcgcaagcgcaagctggagaaggagatcgaggaggagatgggcgacgactacacgctggacctcaagaagaactacagcgaaatccccgaggaggagcgctacgacattattccagagttctggcagggtcacaacattgccgactacatcgatgccgacatcttcgacaagctggaggagctggagcgcgaggagggactgcgggaggagagcggcgtctacaaggtgcccgatatgaccatggacgagacgctcaaggagatccgcgagatagccaagcaaatccgtggcaagcgcttcgagctgcgcgacgaaaagcgactgtcgtcgcgaaagaacaagccagtcatcccacgaaacaagcagcccaaggtgcgtgaccgttccgtacagaaactggtgtcgacgatggagggcctcggtgtggacatgtccggcagcgagaacgccaacttcaccaagtccgtggtggatctgcgtcgtggccaggtggcagttggctccaagaaggtgcccatgcagccgctgctcgacaaggagtcctctgcggtggtcaggaagactggtcagcctctgaagcgggcgccgtcgcgcgacacactgggcatcaagaacttggccattcgcaagaaggcgcaaattatggccaagcgggatattgccaagaaggtcacaagcaggggtctcaagggcgaggcggatcgcttcatcggcaccaagatgccgaagcatttgttctccggcaagcgtggaaatggcaagacggatcgccgttaagcgccgcagccttggctggttaagtgattctacctggtgggctcgcctgctcctctgtataaactaagcgtctatctttatccctgaaaaacattttcaatacaatattgtatttttacaaac

SEQ ID NO: 4455 - protein, 652 aa, DROSOPHILA
MSLYNFKKIMVVPPAKDFIDIMLSKTQRKTPTVVHKGYKISRIRAFYTRKVKYTQQNFHDRLSQIIQDFPKLDDVHPFYADLMNVLYDKDHYKLALGQLNTARHLVDNVAKDYVRLLKYGDSLYRCKQLKKAALGRMATIMKRQASNLTYLEQVRQHLSRLPTIDPYSRTIIICGFPNVGKSSFINKITRADVEVQPYAFTTKSLYVGHTDYKYLRWQVIDTPGILDHPLEERNVIEMQAITALAHLRACVLYFMDISEQCGHSLEEQVKLFESIKPLFTNKPLILAINKIDILTPEDLPEERRAIITKLQEDKNIPVMLMSTVQETGVMEVKTEACERLLSYRVDQKMRTKKVDNILNRLHVAMPAPRDDKLRAPCIPEKASARLLQNADKAERKRKLEKEIEEEMGDDYTLDLKKNYSEIPEEERYDIIPEFWQGHNIADYIDADIFDKLEELEREEGLREESGVYKVPDMTMDETLKEIREIAKQIRGKRFELRDEKRLSSRKNKPVIPRNKQPKVRDRSVQKLVSTMEGLGVDMSGSENANFTKSVVDLRRGQVAVGSKKVPMQPLLDKESSAVVRKTGQPLKRAPSRDTLGIKNLAIRKKAQIMAKRDIAKKVTSRGLKGEADRFIGTKMPKHLFSGKRGNGKTDRR

SEQ ID NO: 4456 - DNA, 2369 bp, DROSOPHILA
aaatatatgaaagcaataagtattatgtaaactagttttaagctttggatacggaaagataattaaaatatttctaagatggccgttaaatatgttaatttataatttttggcgagaatttacaattgttcgctgaatatttttatgaaaataaaatagaattaagaatatggttttgttatttgtagtaaaaaggtgataacgagttttggatttcaaatgttatggagttattgaaataaaaataaaatatggtggaaaccttttactttttataaatgacgttcattttgaaattgaaaaaaaagaaaagaaaacgattttttttttaaatatccggtttggtatatctggtattatttatggttcgcgaggtatatcggtatattttagtggtcgatctacggtcacgctgaaatatttgtacacaataaaaaccggctcgttttttcgctgaaaaaggtaataaactaaagttaatgaacgcaaacgaaacaatcggtgaagttaatcgacaaatgagatgcataatcccgcgttgcattttggtggatacagaaataggccagaaatcgcgatttccacaccgcacccatgacgtgtcactcgcccacttcgtttctaatcaattagtttgtttttatccatagaacgtgttactgtctgcaaaatgatcaccgacgtgcaattggccattttctccaacgttctgggcgtatttctgttcctgctggtggttgcctatcattatattaatgccaataccggaaagtaagtaatcccacttggtgaagaagaggaagaagacagcccggaatcaacaataaaaccgattttcatttatttacaggcccagtgccaaggcaaaatgatgtaggatgtttccgctaacagactaatatagttctaccaggataatgataatgctgcttcattcgcaaaataaatatgtagttgtacaaatctaatccaggatgtcgttaatggcctccttcatggcctggacatcgtccagtgttttgccagatctctgatctttgcctgtgtagaaactcctctgcgtttgatgtccaaagctgaaggccttgacgtagggcaaacttttagtttcctctatcacctcgtccacctccatggaattgggtttgcttttgccttgatgcttctgtttgcccctattcttgctatgatcaaagcgatagtttgccggaagcttgtgcgttatgatgcagtgatccttgcgctgccgggcagtatgaaacttgatggtgcactcttccagaaagcaggaaaacatgggcttgtcaccgcgctccacgctggcggcaaaatagcaatcgtgctgttcggtgatgtgcagatccagtagatgggcagtgggcagcatttttcggcattctacgcagctgtagctctgctccttatctatgttgtccctgatcctagctgccgccgcatcctgctcgcccaagatgtcatcgatgtccacgagaacgccgagtttcttgaagggcgccaaactgggtgcaggcggatccgtgggctttatgaatcccgctggcacttcgcttagtatcctgatgatttgctctctggagagaagtgctactcccgcagcttccgaatccattttgtttgtgttgccaaaatgttttgttttggttcctacgccagtttcaacatgtttccactgtactgcctcttggaagatgtgattttgtttaatttatataaaaattaaaaataatttccttttgaattgaaatagtaatacaatttttgaagtgcatacgtaaaatagacataattaatgaattgaaatactcgctcatattttagatggatatatttctatattaaacaactgcaattaagttgaaacatcttaaatgcctttgaaatgatgccacatcgccagacttagttacgcgggctggcatcgccgtgcagcacatgtgaacctaaactggttccgcccgagaaccggttctttttggaatacgaagctgacaccgcgtggtgtttttgctttcgattccgcatttattttcctttcgacgcgtggaaaataaacaaatcctgccaagatgagtctgtacaacttcaaaaagatcatggtggttccgccagcaaaggtaaggtgtacccagcagcgcccgtcccgcggagcaccccttgaagcaaagacataacctcactggaggtgtttaccaatatgcgcaatatgtaaataatattttattttttgccctttccacaggacttcatcgacattatgctgtcgaagacacagcgcaagaccccgacggtggtccacaagggctacaaaatatccagaatccgggcattctacacgcgcaaggtgaagt

SEQ ID NO: 4457 - DNA, 369 bp, DROSOPHILA
ctggacatcgtccagtgttttgccagatctctgatctttgcctgtgtagaaactcctctgcgtttgatgtccaaagctgaaggccttgacgtagggcaaacttttagtttcctctatcacctcgtccacctccatggaattgggtttgcttttgccttgatgcttctgtttgcccctattcttgctatgatcaaagcgatagtttgccggaagcttgtgcgttatgatgcagtgatccttgcgctgccgggcagtatgaaacttgatggtgcactcttccagaaagcaggaaaacatgggcttgtcaccgcgctccacgctggcggcaaaatagcaatcgtgctgttcggtgatgtgcagatccagtag

SEQ ID NO: 4458 - protein, 100 aa, DROSOPHILA
MSKAEGLDVGQTFSFLYHLVHLHGIGFAFALMLLFAPILAMIKAIVCRKLVRYDAVILALPGSMKLDGALFQKAGKHGLVTALHAGGKIAIVLFGDVQIQ

SEQ ID NO: 4459 - DNA, 3213 bp, DROSOPHILA
caactttggctttttttgattctaagcggctgcgacgccgacagaggctcagttcgttgtccggttcctatttctgtcgacttcgctgccggcgtcgctgataataccatatataaggaaacaagaagtcgcatcgtttgtatttatttgctagaatctgtgagcatcggaactaacccgagccgctacaataaaaaaaaaaaaacataaattagtcctcgttacgaaaaaaaaaacacacataaaaatgaagagttttgtaagtgcccgaaagtactgaaaagtatatatttaatgagttatttttttttttgtggtgtctcaataaaaaaaaggatcaagtgaaagtgcgcgcaaaaaatgtccttcaaaagtgtgaatacttttaagccacagaaatgactttaaagcttattttgaatctcaaacaaaagatacacattaaaatcaatttaaccgaagttcctgcgaggctgctttttagttttttttaagctttacctaagaattagtatgccaaattaaagaactaatgacccacactttaaggaaagtccgaaacctaaagtgtttgaatatcaccttgagcagccgcatagctcatcgacgtcaaaacagacgaatgacaaatatcgaaacggttggaacccattatgattagtgcctcggcccgaaaccaaatcaaataaatcacagcaaatatagataaaaaaaattaaaaagactaaaaaaaaaacgaaaaaaaaaataaataaacgagagaattgcgagacaaagcgacgctgtgcggtcagaaacgccagcgattcgcgcgcgactttgattaattgcccgttaatgcgaaatgcaaaatacgaatcccaattcaaatccaaatcaaaatccgtatccaaatccgaatgcgaaaaaaataaatcgtaacgactgtgatccacagatatgactaatgcatcgtgtgacaagtggcactaaccaggcattctatcttttagctgatccttctgggtttcgctgctctggccgctgccgatgtcaagcatctgacagatcgcaatctggacctcttcaagtacaatcccagcgatatctacaccctgcccgaggacatcgatgacgacaagccggcggtgcactttagcggcgatgtcatgaaggccaagaccgaaaccctccagaactacaactcgggcaagaaattcaagctggagtgagtatctatggtacctatatagttcataaagtgatagtgtttggctaaattaaaacataattatatatttatatatgaagttgaatcgcagtctaaaagaaaactactttaacataggtttatagatctgtaataacttttgatgcatagcaaataaattcaagtaatttgatatatttttttaaataatttacaaagcatcaagtaatttgatatatttttttaaataatttacgaagcattactaaagttaaaatgaacttttttttcagactgaagacccagaacggcatcgaagtgagcagcgtgggcaaactgaaggacgacaagaccttcgtggtcagcggctcctactcgttcaccggcgccgatggcaagcggtacaagacccgttacaccgccgatgagttcggctatcatcccatcaccgagctggatctggacattcccgagtgagtaaccaatacactttacaaaaaaaacgtttaagaacttcttcaaactagcacatttgcgtacaaatcagaagtttcatacactattattgcaaatgatataatgaatataaaaaacttattttatatttatatattttagaccccagcctttggcttctgccggacagcgccagaccgtggatcccagcagcctgttgggcaacaagaaccgtttccagttcctgcagcagaccctggactccgatcaaggatcgcaaggtcctctgaggggcagtggacagagtggcgatgactatagctacacgtctccctatggaaatggcaatgcttacggtaatggagttggaaacggatacggaaatggagttggcaacggatacggaaatggagttggaaacggacaaggaaatggagctggaaacgcatacggaaatggaaatggagttggaaacggatacggaaatggcaacggcaatggctacgattatcagccacctcaggtgcccctggcgacgccatctcgtctgtatctgcccaccgcataaggcgattattatttagatatacccttatccaacacccttctcccgcaagatttatgccccacccgattcccgattcctgattcccgattcccgattcccgatcctcgattttccccccagctgcaagtatttagtttttaagtgcaactccaacaggcaaatgaagagtaaaacagagctagcgaaatttttttttatcattttttagtgttatacacggagcacaattttatatgatattatacactgatatatgttatatatctagcctacacaaaaacacgcacacacacacacaaaaaaaacaaacacacacacaaatcccgagcaaagacacaaacgaatctatgtatatacactgagtgatattagtagtaaataaaatggctaaactaacgatcaaagttttaatgtgttttaattgaggaataatatggatggggatatttatatatatattttggctttgtaataaaatgttattgcaagcaattgttgaaattttattcagcatcgttacaaaaaaaaattcgttgtttcagaataaagttaagttttattaactgaaaatgaatagtttgtttactgttttataagcatggcatatacaattttccaacttagatacagaatctattattacagattatgattttgttcgaatgcctaaaagcatgcaacaaacgtatgaaattcatctgcatctacatataaatatataaattaaagcgatatttaatgacttctagttaaggctcttagcagcagacaagtttgcttgataaattcgttatgtatatggaatttaaaacttttttaaaaacggaatagagtggtagccaaatggtcaaagttatgacattgctcatacgccacgttgtacacacttttctcaaaataatgcctgccaatgcttaactttagttcgtaatatgtatatgattggtaatatctctatattatatacatataaataattaaaattcaaagcgattgaaac

SEQ ID NO: 4460 - DNA, 893 bp, DROSOPHILA
cggaactaacccgagccgctacaataaaaaaaaaaaaacataaattagtcctcgttacgaaaaaaaaaacacacataaaaatgaagagttttctgatccttctgggtttcgctgctctggccgctgccgatgtcaagcatctgacagatcgcaatctggacctcttcaagtacaatcccagcgatatctacaccctgcccgaggacatcgatgacgacaagccggcggtgcactttagcggcgatgtcatgaaggccaagaccgaaaccctccagaactacaactcgggcaagaaattcaagctggaactgaagacccagaacggcatcgaagtgagcagcgtgggcaaactgaaggacgacaagaccttcgtggtcagcggctcctactcgttcaccggcgccgatggcaagcggtacaagacccgttacaccgccgatgagttcggctatcatcccatcaccgagctggatctggacattcccgaaccccagcctttggcttctgccggacagcgccagaccgtggatcccagcagcctgttgggcaacaagaaccgtttccagttcctgcagcagaccctggactccgatcaaggatcgcaaggtcctctgaggggcagtggacagagtggcgatgactatagctacacgtctccctatggaaatggcaatgcttacggtaatggagttggaaacggatacggaaatggagttggcaacggatacggaaatggagttggaaacggacaaggaaatggagctggaaacgcatacggaaatggaaatggagttggaaacggatacggaaatggcaacggcaatggctacgattatcagccacctcaggtgcccctggcgacgccatctcgtctgtatctgcccaccgcataa

SEQ ID NO: 4461 - protein, 270 aa, DROSOPHILA
MKSFLILLGFAALAAADVKHLTDRNLDLFKYNPSDIYTLPEDIDDDKPAVHFSGDVMKAKTETLQNYNSGKKFKLELKTQNGIEVSSVGKLKDDKTFVVSGSYSFTGADGKRYKTRYTADEFGYHPITELDLDIPEPQPLASAGQRQTVDPSSLLGNKNRFQFLQQTLDSDQGSQGPLRGSGQSGDDYSYTSPYGNGNAYGNGVGNGYGNGVGNGYGNGVGNGQGNGAGNAYGNGNGVGNGYGNGNGNGYDYQPPQVPLATPSRLYLPTA

SEQ ID NO: 4462 - DNA, 6676 bp, DROSOPHILA
tttttaccaattttcttgtccaatgagtaaaagttgttcggcacagcaacatcatgtccaaagccaccacaattaaggaggctctgaagcgctgggaggagcgggagcagcaaaattccctgactgccaaggttattgatctgcaattccagtggccacccatcgagaaaatggacagcacattgggtacgctggtgcagtgcgagtgagcttaaaagttcttagttcttcgaggaaaatgaactcctacttttctgtttcccctgcaggagaatcagtatgtccacgaatatgattgagaagatattcggcttatcgggcatgaagtgcctcaaggtattgtccttatcacggaactacattaagcagatatccgggctggtaaggacgaattagataggttccattagcacatcatttgcttctcttatgtaggaagcggtggctgaaactctggaggagctgtggctcagctacaacctaatcgagaaaattaagggtttgactggtctgaaatgcctgaaggtgctctatataagcaacaatttgatcaaggactggtcggaattcaatcgcctggccgagatcgaatctctcgaagatctagtggtggtaggaaatcccctatccgagggattggacgagcccacttggcgggcggagtgcatcaagaggctgcccaccatccgcaaactggacggagaaccagtcgtgctcaacgaggagccgcagctttaagtctgatggccattcggtttatatggatgacggagagattgggttttccatgcgaactttcatagcagaaaacaaaaaaaaaaatcttgaaaaatacacaacatgtactattttagaaatcagtttcgtctttagatttttatttaaaatattagtttatctaactggtcagttggactagtaagtattgcggccttaggaggattcaaatgtctgcaatgaattgtaaattattcattaaaggattcatttttagagaatactaattaaatctaacctcttgggcgattttcagcagtccctcgtagctggctcgacccgactgattgaccaagttgtggaataccttggaatccgatttggtcatcagttcatagggcgatccaaactccacaacacgtccagcatccataaccatcaccttgtcggaatcgatgatggtgtgcaatcgatgggctattgtcaaaacagtgcaatccctgaacttgctgcgaatggtggcttggatgaggccatccgtttgaggatccacattggccgttgcctcgtccataacaaggatgcgattctctcgcagaatggctctggccaggcagaccaactggcgctgacccacactgaaattggttccgccctcgctgattttgctggccaggccatcgggcagatcggacaccacctccttcagtttcacctcctccagacagccccacagcttctcatcgctgtactcgtcgaagggatccaaattgtatcgcatggtaccggagaatagcacaggctcttggggtataatcgagatctgtcggcgcagatcgtgcagacccatctgtcgtgtgtccctcgtgtctataagcacggatccatcggtgtaggatagccggaagagggcgttaatgagcgaggatttacccgctccagttcggccgactatgcccactttttccctgggctgtatgacgaagctgagcgacttgagcacattctctgccttggcattcggtgtgtagcgaaggtttagttccttaaagatgatctcaccctgttctggccacgtcttgggtggcttcttgtcgtccggagcttccaacattccttccggctcaatgctctcgtactctaccactcgttccacggctgtcatggtgttctccagctcggcggtttgacgtactccccactgaaccatatcgatcagtcccatggcctgtgggtaaccaaaaggtgattggcaggtgatagtgactgctttagtgtaatggcttacctgtgttatgaccagaccaacatcagctccgttgcccggaggaaaggcaaagaaactaagcgttatgatcgatatataaatcacgcatatgcagttcatacaataaccaaatgcctgcgatgtacttatgtacatgaaaaatgcagagctgtgcgcatcctggtagctgtcgaactccttctccagaacgcgctgggcatccaaggctcggatggtggttaggccattcagtgaagcagccaaatgcgagtaaactggtgatcgatctgtacaaatactaagtttctatcgatactgaatgcattcaatgtaaggaattcgtacttatagcttctacgcgcttcaagtccctcgaggttttcagatataagttgcgcagatgatagaaaattacggacagcatgagtgttggaaccaacagcagcgggttgacattggctataacgatgattattccggctagccaaagcgcaatctgcatcacatccaccagaaccacgggaaggacctcgtctacttggctcatgtccttggtaaaacgatttagaatgcttccatgcttattaatgctaaagaaatgcatgtcagctcgagtaactctattgaagatggtgttgtgcagtcgaatagatgcttttttggcgatattgaataacagaaatgacgacgacaaattcatgataactgacaatattatgatcagtgtgtatttgtatacatccatgcttttcgattccatatcctccatttcgccatggccagcagcagtgctctccttcttgacccttgaaaatataaggagtttataccaattaggcttaatcagacctgttataccaacttaccagtaagtaaggaagtagtcaccaccagttacagccacctgggccaacacagagctgctcagcatgacaaggaaagccaccaatccacctcccgcctggaaatacttcctgtacagagccaaactaatgccacctgattcctggcgctccacgtgctcctttcccgagctggaacctccgacggtctgctcggagttttccttgatgggagttacttcgtttttattgtcgggagaattaaggttcaatggttcttgctcctctgtctttgctttatctgtctttgatagacttcccagaccagtgataaggcccgttttgagtagcgactcatagtcgcccagtgctttgatctgtccattcgccaagatcacaatctgatcgacgtgcggaaggaactgctcttggtgggtaaccagaactacggtgcttccgcgtagatgaccccgcacgcactgatcgaagagatgacgtgctacgctggcgtctactgcgctcagtggatcatccaggaggtagatggacgccttccggtatacacttctcgccaaactgatcctggccttctgcccacccgacagggttgctccgcgctctccaactatagtattatcccttaagggaagcagatcgaaatcccgctccagggcgcacttctttacaacctcttcgtaccgctggctatccatcggttggccaaatagaatattctggcggacagtgccggagaagagccacgactcctgggaggtgtaagacaaggagccatttacttgcaactggccggaattcgctttcagctcgccgagaatagcctggatgagactagattttccagatccagtcagtccgattacagccaccacactgccgggtttaatctctaggttaatcccacttagtgtgtagtctggtgaattgggatcccatttggccttcaagtctctaatggagatagctgatttcagaagatcggcctcgttattgttggagggtggattaccgggtaccgtatccttggaaggaccctcacttttgtccgaactacccagctcttcggactgcataaactgctccacgcgtctgatggaggtcaggaattgagccgtctggataatggcggatggtacgtatatggacatggcggccagcagtacgttgtagtaggctgttatcataaaggcgatttccggcgtgaaaacctttcccaagatgacgtagccaaccaagctaaggaagatggccactcgtgagaggacgattctgcgggcgaagtcgaatccccttatgtactgtccttggcgaatggtgttcatctccttctcgcgagcgtgagtgaccatctgctcaaacggctgctcccaggcgtacattttcagcacctgaatggcggagattatttcattgaccatccgaatccggttgtccgtccgttcggcagccttcagttggatcgcagaggtcctcgtacccagatacatttgtattggcataaagagcagcatgaacagcactccaaacacagcggagattccaatctgcaggggaaatgttatggatgttatcagtttacacggtgaacggggggatctgcttacctcctgatacatcaggtatgtgatgaccaaaacttgaagtgggcccacccacagatagtgaacggtgtagggtgcgctgtccaggcgggggatgtcgttggaaatcagattgaccacatggccggatgtagtgtcgcccagtgcccccttggtcagacgcagcgccttccggaagatcatgctgcccatggccacccgcatcttaaagccttcaagaagttctcagttcttcaaaagtatcaatttacatagattgaaaactcacacacatgatggatgccgaacgtggttggagttaagatcatcacagttagggcactgataacgatctgagctactgcatagtaaaatccagcattggcagcgtctggttccccagaaaagtacgatatgagcttcaccaagaagatcggctgcaaagtgcgtagtcccagttccacaacgaaaatcgccagaccagggaatcccagttgccagccaaaaacccgcagcagagctctgacgaggcttgggcttcgtccgtcattttttaattctcgctcccaagaggcacacaacctgttgccaagtatatctacaatacaacgattgcattagtcaacataaatgttttaataatatttaaatttcttacccgacttttgctcctccaagggtctatagaggtccgttgagtccaatgtttttctgtaacccttacgaaatataggtatggtatacctgtatttgttgaataatcgtgaaaaggtgtaaaaaatatatgaatgtataaatgacataccaaaagcataatgacgatataaaattcgatcgagctcggggattttccggaaggactttctctgccgtaacgaaaaataatatattaaggaataattctatatggataaattagaagatataatatcagttttggttctggttgaaagttctgccattcagaaaattaactttcagctgaaccaaaacttgtatttttacccttttcattctgagcagaattattttctgagttgacagtcagtttttgtttgcagttttcggtctggtgtccaagctcgaagcattttcggcatacaaggggcggagaagtgttaactgatagagattcatctttgttacggtgatcgaatccattgttctccagaagtgaagattcttcaattgatgtattctctctttctgaaactgaatcgaatgttggttccaaaacaggttgcttgtccatatttggttggtcaatgtatttatatttcttttaaaactgttcacgtgcttttttgtttacaaaactttggtcccgcgtttttgctcatggcacgtttttactggtcgagttatgagcagatacgggctttgaatggcgaaacagttgttacataatctcaatttcacaatgaagaaatactcagcaagctgaagtttatatacgctttcagttatgtctatgattagtggtaattataaaaacgataaaataaaagattagattaacttcgggaatggtgctgcaagggacacgaatttctacctaacaccttggaaattgaagacactattttttgtcaaacaatctttttatgtggactatcttgaacttgaactggaattcaaaagccggagagagagagattgagagcgcgaaagtgagagggagagtgcgaagagagagaatgatcgagagagaaattctcacgcattgttcttgtaattgttcttgttttaaaacctttaagctctcaacttttggcgcgtgtagcgaacgcaattttcggcgctttcaaatacttatcaacatagagcagacaatgttcatatgtttatgtttttgtttttatggttgcttatcattagtttgtacggcgtctcttccgcataatttacagcgcacattctttttgtttggccatcctaatacgcgttcattcaattcagaatgaagtccctgcaatttagctcagtgtacgttgatggatttgttaatatttaacagcgaagttggtcgagggctgcgtcaaatggcagtttctgagttctggccactgcagtgtaattgacctattggccaacttttgggccagcggctgttagcgctctgttaaccgggctcccaaggctttcgggacccacttgctgccgcattgctgttgctgatgccaatcctcctgctggtgttcaaatgaaatgttaagttccccgcccactcactttcgatttcagtcgcagtt

SEQ ID NO: 4463 - DNA, 4035 bp, DROSOPHILA
atggacaagcaacctgttttggaaccaacattcgattcagtttcagaaagagagaatacatcaattgaagaatcttcacttctggagaacaatggattcgatcaccgtaacaaagatgaatctctatcagttaacacttctccgccccttgtatgccgaaaatgcttcgagcttggacaccagaccgaaaactgcaaacaaaaactgactgtcaactcagaaaataattctgctcagaatgaaaaggatatacttggcaacaggttgtgtgcctcttgggagcgagaattaaaaaatgacggacgaagcccaagcctcgtcagagctctgctgcgggtttttggctggcaactgggattccctggtctggcgattttcgttgtggaactgggactacgcactttgcagccgatcttcttggtgaagctcatatcgtacttttctggggaaccagacgctgccaatgctggattttactatgcagtagctcagatcgttatcagtgccctaactgtgatgatcttaactccaaccacgttcggcatccatcatgtgtgctttaagatgcgggtggccatgggcagcatgatcttccggaaggcgctgcgtctgaccaagggggcactgggcgacactacatccggccatgtggtcaatctgatttccaacgacatcccccgcctggacagcgcaccctacaccgttcactatctgtgggtgggcccacttcaagttttggtcatcacatacctgatgtatcaggagattggaatctccgctgtgtttggagtgctgttcatgctgctctttatgccaatacaaatgtatctgggtacgaggacctctgcgatccaactgaaggctgccgaacggacggacaaccggattcggatggtcaatgaaataatctccgccattcaggtgctgaaaatgtacgcctgggagcagccgtttgagcagatggtcactcacgctcgcgagaaggagatgaacaccattcgccaaggacagtacataaggggattcgacttcgcccgcagaatcgtcctctcacgagtggccatcttccttagcttggttggctacgtcatcttgggaaaggttttcacgccggaaatcgcctttatgataacagcctactacaacgtactgctggccgccatgtccatatacgtaccatccgccattatccagacggctcaattcctgacctccatcagacgcgtggagcagtttatgcagtccgaagagctgggtagttcggacaaaagtgagggtccttccaaggatacggtacccggtaatccaccctccaacaataacgaggccgatcttctgaaatcagctatctccattagagacttgaaggccaaatgggatcccaattcaccagactacacactaagtgggattaacctagagattaaacccggcagtgtggtggctgtaatcggactgactggatctggaaaatctagtctcatccaggctattctcggcgagctgaaagcgaattccggccagttgcaagtaaatggctccttgtcttacacctcccaggagtcgtggctcttctccggcactgtccgccagaatattctatttggccaaccgatggatagccagcggtacgaagaggttgtaaagaagtgcgccctggagcgggatttcgatctgcttcccttaagggataatactatagttggagagcgcggagcaaccctgtcgggtgggcagaaggccaggatcagtttggcgagaagtgtataccggaaggcgtccatctacctcctggatgatccactgagcgcagtagacgccagcgtagcacgtcatctcttcgatcagtgcgtgcggggtcatctacgcggaagcaccgtagttctggttacccaccaagagcagttccttccgcacgtcgatcagattgtgatcttggcgaatggacagatcaaagcactgggcgactatgagtcgctactcaaaacgggccttatcactggtctgggaagtctatcaaagacagataaagcaaagacagaggagcaagaaccattgaaccttaattctcccgacaataaaaacgaagtaactcccatcaaggaaaactccgagcagaccgtcggaggttccagctcgggaaaggagcacgtggagcgccaggaatcaggtggcattagtttggctctgtacaggaagtatttccaggcgggaggtggattggtggctttccttgtcatgctgagcagctctgtgttggcccaggtggctgtaactggtggtgactacttccttacttactgggtcaagaaggagagcactgctgctggccatggcgaaatggaggatatggaatcgaaaagcatggatgtatacaaatacacactgatcataatattgtcagttatcatgaatttgtcgtcgtcatttctgttattcaatatcgccaaaaaagcatctattcgactgcacaacaccatcttcaatagagttactcgagctgacatgcatttctttagcattaataagcatggaagcattctaaatcgttttaccaaggacatgagccaagtagacgaggtccttcccgtggttctggtggatgtgatgcagattgcgctttggctagccggaataatcatcgttatagccaatgtcaacccgctgctgttggttccaacactcatgctgtccgtaattttctatcatctgcgcaacttatatctgaaaacctcgagggacttgaagcgcgtagaagctataaatcgatcaccagtttactcgcatttggctgcttcactgaatggcctaaccaccatccgagccttggatgcccagcgcgttctggagaaggagttcgacagctaccaggatgcgcacagctctgcatttttcatgtacataagtacatcgcaggcatttggttattgtatgaactgcatatgcgtgatttatatatcgatcataacgcttagtttctttgcctttcctccgggcaacggagctgatgttggtctggtcataacacaggtaagccattacactaaagcagtcactatcacctgccaatcaccttttggttacccacaggccatgggactgatcgatatggttcagtggggagtacgtcaaaccgccgagctggagaacaccatgacagccgtggaacgagtggtagagtacgagagcattgagccggaaggaatgttggaagctccggacgacaagaagccacccaagacgtggccagaacagggtgagatcatctttaaggaactaaaccttcgctacacaccgaatgccaaggcagagaatgtgctcaagtcgctcagcttcgtcatacagcccagggaaaaagtgggcatagtcggccgaactggagcgggtaaatcctcgctcattaacgccctcttccggctatcctacaccgatggatccgtgcttatagacacgagggacacacgacagatgggtctgcacgatctgcgccgacagatctcgattataccccaagagcctgtgctattctccggtaccatgcgatacaatttggatcccttcgacgagtacagcgatgagaagctgtggggctgtctggaggaggtgaaactgaaggaggtggtgtccgatctgcccgatggcctggccagcaaaatcagcgagggcggaaccaatttcagtgtgggtcagcgccagttggtctgcctggccagagccattctgcgagagaatcgcatccttgttatggacgaggcaacggccaatgtggatcctcaaacggatggcctcatccaagccaccattcgcagcaagttcagggattgcactgttttgacaatagcccatcgattgcacaccatcatcgattccgacaaggtgatggttatggatgctggacgtgttgtggagtttggatcgccctatgaactgatgaccaaatcggattccaaggtattccacaacttggtcaatcagtcgggtcgagccagctacgagggactgctgaaaatcgcccaagaggttagatttaattag

SEQ ID NO: 4464 - protein, 1344 aa, DROSOPHILA
MDKQPVLEPTFDSVSERENTSIEESSLLENNGFDHRNKDESLSVNTSPPLVCRKCFELGHQTENCKQKLTVNSENNSAQNEKDILGNRLCASWERELKNDGRSPSLVRALLRVFGWQLGFPGLAIFVVELGLRTLQPIFLVKLISYFSGEPDAANAGFYYAVAQIVISALTVMILTPTTFGIHHVCFKMRVAMGSMIFRKALRLTKGALGDTTSGHVVNLISNDIPRLDSAPYTVHYLWVGPLQVLVITYLMYQEIGISAVFGVLFMLLFMPIQMYLGTRTSAIQLKAAERTDNRIRMVNEIISAIQVLKMYAWEQPFEQMVTHAREKEMNTIRQGQYIRGFDFARRIVLSRVAIFLSLVGYVILGKVFTPEIAFMITAYYNVLLAAMSIYVPSAIIQTAQFLTSIRRVEQFMQSEELGSSDKSEGPSKDTVPGNPPSNNNEADLLKSAISIRDLKAKWDPNSPDYTLSGINLEIKPGSVVAVIGLTGSGKSSLIQAILGELKANSGQLQVNGSLSYTSQESWLFSGTVRQNILFGQPMDSQRYEEVVKKCALERDFDLLPLRDNTIVGERGATLSGGQKARISLARSVYRKASIYLLDDPLSAVDASVARHLFDQCVRGHLRGSTVVLVTHQEQFLPHVDQIVILANGQIKALGDYESLLKTGLITGLGSLSKTDKAKTEEQEPLNLNSPDNKNEVTPIKENSEQTVGGSSSGKEHVERQESGGISLALYRKYFQAGGGLVAFLVMLSSSVLAQVAVTGGDYFLTYWVKKESTAAGHGEMEDMESKSMDVYKYTLIIILSVIMNLSSSFLLFNIAKKASIRLHNTIFNRVTRADMHFFSINKHGSILNRFTKDMSQVDEVLPVVLVDVMQIALWLAGIIIVIANVNPLLLVPTLMLSVIFYHLRNLYLKTSRDLKRVEAINRSPVYSHLAASLNGLTTIRALDAQRVLEKEFDSYQDAHSSAFFMYISTSQAFGYCMNCICVIYISIITLSFFAFPPGNGADVGLVITQVSHYTKAVTITCQSPFGYPQAMGLIDMVQWGVRQTAELENTMTAVERVVEYESIEPEGMLEAPDDKKPPKTWPEQGEIIFKELNLRYTPNAKAENVLKSLSFVIQPREKVGIVGRTGAGKSSLINALFRLSYTDGSVLIDTRDTRQMGLHDLRRQISIIPQEPVLFSGTMRYNLDPFDEYSDEKLWGCLEEVKLKEVVSDLPDGLASKISEGGTNFSVGQRQLVCLARAILRENRILVMDEATANVDPQTDGLIQATIRSKFRDCTVLTIAHRLHTIIDSDKVMVMDAGRVVEFGSPYELMTKSDSKVFHNLVNQSGRASYEGLLKIAQEVRFN

SEQ ID NO: 4465 - DNA, 3547 bp, DROSOPHILA
agctgcagttcttcgtgcgattaactatactcgcagttatttgtttttgcgcgactttgacgcgaacggttgggaattcggattaagaatgcgactccaggtggctctggattctccaatgttcgaaagaacgccgattttacctaaaagctgcgagcgcttttgcgtgggagagccgcagtgttggaaaccaacggaattgcgtcacggatccggtagcaccgggccagctgacttctgtataaaatatggcagccttggttataacgaatatttgcagagaaataatttaaaaccaattgaaaaatatatacaaatgaatcaaatagtacgcattaaaaaccgattaatattaacaattcattataaacaagctttactaaaaaattaaccgcccataacaataaaataaaataataaaaaaatgaatagatattataaatattacataaattgtataatataaatattataaattctgtaaacataaattcttttatgactagacccagttcaaagaaacagccgtacatttctaacagactaagtttattttaataactacacttttaaccactacaagtgttggttttcttatattttgataaaaatatacaacatattacatagcaataccaattttgacacggcttttcatttcctgctcttgacctaacagaatgatacataataatgtagtgcaaataagtaacgataaataatagaatttggtagcatgcaggaaatgtgttcagcaaattgtgtctccgttcagatcagccgtttgattcgcgcacacacggaatgaaatgcagcaaagtatgtagttggatttgctttggaataaatgtttaaaaacacccggcgacacgactcctccgctcgtcattctaattccgtcctggtcaaatccacaaactccttaactcccggagccgaaagcattaaaatcttcggtcccattcgacatctattccaaaaagtacagactagaagttcctcagttcttgacagaaaacagttgcgcaatcttggaggcatgactcttgaagaactcgtagcccacttttgcggcgctcttgagagctccttggttgttgagactgccgtttgttgtggatacggtgatggtcgttgcaggaagttctccagctggcgaagtcgtcgtcaccgcgtgctggtgatgtcctccaccaaccaaactgtccggaaacatgcgccgcagcacgtagttgaatccattggaggccttgttgccattggccttaaaccgttcgatgccgaaggcgcgaatggcccgcgagaatccgaacacctgcgaactaatgtatgctcttcgcaccgccagagtactaccatccttctgctcgctgtagacgacaatttcatcgactttctaaaaggaaaaaacaatgatcattaattaggattaaattaaacttgaaaagattaagtaacatatttcacatattcactaaaagggtgcagtaaaataaatcgaacaataatcttaaccggatcccgatgttctgtatgcgtttcatgggttaaatataacaaacaatgccacagcattgaccatcgatctgttaggtaacacttatgcttttgtattatgccggtatttcggtcatgcccaacagctagtggctgaattcttctagacatttctttaaattgatatgtgacctatttaaagcaatcgtagtaggtgtgcgatcacttgccattatcttggtcattcccaggttcctggtgaaagtggtgaatgtctttttaaccgggtccagcacggagtcctcaacaatcttgaccggcacattgttgtagaagcgagctccccacttcggcaccggattcgtcttggagagcagccggcgcgagaagagcttgccatcgcgcacctcccgctgaatagtgtcctcggtgaggacgtgcgtgcttgagggattcgggtagcggttccagtaggcgaccaccacgttcatccagctgtaatcgaagaccgtctccgtgcggcaggtggatgctgccacgaccatgttgaaggtggaccaatgaactcgccgatgtgttcgaaagtgaaagccgccgtgtccctgatctgaaaaataaaccgataatcatcaatagcaatcgcatgtttccggctaaaaatagatcgccgaatcgatggacgtacctttgcgagggggtccaagaacgggggtctcttacggttttagagctccagagtgcagtgtgattggcaccaattagctggcacacgttgattcagctagcagcttgttgttgccccgactttgggcgcctactaagaatttagttgtgtaactgcgtcacaaactccggcacagggtgcttcgggttcgttaccttcaatttctggcaatttgctggcgatatccctcgattcctgcgttgcctcgaccttcagtgcccccttctcctgtctgtacacggtttcattgcttgctttccaagggtttgctgccaatttggatacaatttacgcctgttcaaaggccatccggaaacatctggtcgcaaagttgccagatggtgcgtgtgccaataataccacaatttgcattttcccaactatttagtattttacgtttggttttgcgccaaaacgttttcttttaaatttcacttaaaaaatgtttttaagctttcaatattaattggcaaatatgacaaatgttcttgaaataacttaaatcaaaggtttgccggtattttactactacatttactatgttaaactaataaattatgaatttattggatgttgggtcatatctagttttaattaaatatttaattatttaaatttcgaaaaataaaatctattatttgagaaatagttattgcaaatattttattgcttaaaaatttataaaattaactcacaaatagttgtcatgggaatttttgaattgtgcggtgcttagataccagaaaacaatcaaaagttcacataattaagtacaattagaataaagaagctcaaaaaaatggatgttgtggaattcctcacacgaaccgataggcgcaatctaaaatctcaaataagtttccaggtggcgcaaaagatgcacgaatggcacgcggatttggacaaccgtcgttggaacctctgtcttcttctccaaaaggaagccttggaggcggatgagcagattgcagagatgctgcaggcgcaggcggatgaagcggatcgaaagcgacacgaatggatcgaaatggagcgattgaagcgggaggaggccgaaatggagctggtcaaagtaaagaagcagcaaagggagatgtaggttttgagtgtagaattttaagtccttttccatctgaaatcacctcactttcagtgagaactccgaggcccatcgtcacatgctaaccaaggagatcctgctggagtccaagcaagcccaactccatcaaatcgaggagaaaaaggcgctcaaacgccgccaggcctgtgtggagattctttggcagcgcgtctggcagagattggacgaaagtaaggcccagcagg

SEQ ID NO: 4466 - DNA, 1099 bp, DROSOPHILA
cgaccagatgtttccggatggcctttgaacaggcgtaaattgtatccaaattggcagcaaacccttggaaagcaagcaatgaaaccgtgtacagacaggagaagggggcactgaaggtcgaggcaacgcaggaatcgagggatatcgccagcaaattgccagaaattgaaggcgcccaaagtcggggcaacaacaagctgctagctgaatcaacgtgtgccagctaattggtgccaatcacactgcactctggagctctaaaaccgtaagagacccccgttcttggaccccctcgcaaagatcagggacacggcggctttcactttcgaacacatcggcgagttcattggtccaccttcaacatggtcgtggcagcatccacctgccgcacggagacggtcttcgattacagctggatgaacgtggtggtcgcctactggaaccgctacccgaatccctcaagcacgcacgtcctcaccgaggacactattcagcgggaggtgcgcgatggcaagctcttctcgcgccggctgctctccaagacgaatccggtgccgaagtggggagctcgcttctacaacaatgtgccggtcaagattgttgaggactccgtgctggacccggttaaaaagacattcaccactttcaccaggaacctgggaatgaccaagataatggcaaaacatcgggatccggttaagattatttcgatgaaattgtcgtctacagcgagcagaaggatggtagtactctggcggtgcgaagagcatacattagttcgcaggtgttcggattctcgcgggccattcgcgccttcggcatcgaacggtttaaggccaatggcaacaaggcctccaatggattcaactacgtgctgcggcgcatgtttccggacagtttggttggtggaggacatcaccagcacgcggtgacgacgacttcgccagctggagaacttcctgcaacgaccatcaccgtatccacaacaaacggcagtctcaacaaccaaggagctctcaagagcgccgcaaaagtgggctacgagttcttcaagagtcatgcctccaagattgcgcaactgttttctgtcaagaactga

SEQ ID NO: 4467 - protein, 171 aa, DROSOPHILA
MNVVVAYWNRYPNPSSTHVLTEDTIQREVRDGKLFSRRLLSKTNPVPKWGARFYNNVPVKIVEDSVLDPVKKTFTTFTRNLGMTKIMAKHRDPVKIISMKLSSTASRRMVVLWRCEEHTLVRRCSDSRGPFAPSASNGLRPMATRPPMDSTTCCGACFRTVWLVEDITSTR

SEQ ID NO: 4468 - DNA, 18869 bp, DROSOPHILA
aaagtggagaagaataattctttgaatgccttcgtgtggattgacattaacactggttcactagccgacagttgagccattacaatggccattaaaacataacccgtccactctcgctgccactggtagtggcccaaacaaaaagccaaaatacaaccatcataagcacacacacatctccggcccattagcattaagacaaaagacacccgcaatcaaaaaaaaaaaaaaaacccacaaactacaaaggcagtaaactctctatgcagattagcaatgtggaaaagcgtggctcagaattttcactccagccggcatttgcagttgaccgctgatcactctcactgttccacatttgcatatggacagtccggtacagtgcgtgacataaccgaagaacttaatgaaagtccactttaagattataataatgtgttgggttcgtaatgagccttttaaattctatttttgtatttatttggaaattatcatctgaaatactcaatacttactctttcgaaacgcactgtattaattgataatcaccggaaagcgctcgtaacggtagctaaatcacaaacccatttgattgacattgtttttattcaacatcaatatccacattagacccgcattatgtttgtattttttatttacttttcttttatttctcatagacgtagacctttgcttaatcactaaaatttagaacaaataatttgcaaaaaaaaaaaaatatttatatgcatacgtatatatatatgtatataggtaaatgtgaggagggatatctgtacaattagacttagatataaacgtatagctaactgactagaattacaaattttcaatgtgctccaaagcttaactacaaggtattaaaatttcgatttcacttcaatttgctttgattgttaatctcttgttttcttggccataataaatatttacatatacaaatactgttgctctaaataattaattaggacattaattaggctctagtccaaggtgatgtgaggatttgtgtaggtgaagccgtggaactgcttctgatccatggatgccaatatctccttatcgatgggtgttagacgcaccctttccctggtgaagacccgatcgaagtactgggtatccaggggatgtttcttacggaaaaaaaaaaaaaatcacaacaaatcacaaattaataaaactagctaattaagtaataactccatcaaatcactcaccacttgcggcttgaagggcggctcgatttgtcgcttttccagcaaaccccaatcgatcgggcggaagaatatatgatcggctatatcaccagccgggctgtactgcgaaccaatacgcttcgtatagtccttctccagcaactgaaaggtattacatttatttatatttatattaaatggatttattatttttatcttacccccttgagaatcccggttgcctcggcggatatgtaaactgggaaccatggaatttcattgcaaatggaccagaagagctcgtcttcatcgcagccactgaatggcgactgtccaattagcatttcgtagagcagcacaccaaacgaccaccaatccacattctgattgtacttttcaccctacaaattgagaggtaagcattaaaagtagatgatagctaaatctataaaattaagactacaacatgttggtaatatattcaataccttaatgatttcgggcgccatataatcgggtgtgccacaaaagctatctgccgtcttgtccaaatagatttgcaacttgcacatgccaaaatcggcaatgcgaacatgtccctcgtagtccagcaagacattatccagtttgagatctctataaatggccaagtataatatatataaaatataaaatcaaaatcaaaatcaatcaatcaaaatcacctatagataatgccctttttgtgcaggaatttaaggcccgagatgatttcggccccatagaatctggctcgctcctccgaaaagcgaccgctctcctggatatgaaacatgagatcaccgccattcaggtactccatcacaaagaacaagtggctctgcgggttgaatataaaaaatatagcgagaaaatatatatttaacatacagatcgagaacgggcgagagatcaataatatagcgagagatcgagattccgattgagattgagattgagagatcgtcccccaaagtcataaataattaaaataccttctaatcggtgtcaatgcaagacgttgcatttgcagatgcagatgcaaattttcggattgagagaaaaacacaaaaaaaaaaaaaacacaaaaaaaaaaacaaatacaataaaataaaagcgtacggacaggcaccctgatctacatgatgtccgatcgacgtcgtgtgccccaatcgatggccagaccccagtgttccaataatagaacgttttacctttcctttggctataaatagcacgccagatcgattgttctatatgataaatatcgatcaagagtgcagacacaccttcgactggtgacccccacctgagaattgccactaattgaaagctaaacgggcgcatgtaacacctttgtctgaatattttcagctggataatatcagtttatatgccacattttgatttaagctgaattgggatagttttccagaccaggtagggaacatttttcaaaatatttttaagttaaatttgaattttatcctagggtcattgaactacgttaataatcccaaagtcaaagttttcttaacgagttgctaggcaataccctcaggtttcgactgtatacattcttatttaaatttatattatttttattcaacttacctccgtttggaaggtgcaaaacagatgacacagatacgggtgtttggtgcccagggccaggaccttgcgttcgatgagcgtggagtcaacatcgtcatcctccaggacaacatcctttttcaggcacttaatggcatagtagtatgtggtgtcacgcagctcagcaagcagaacctgtatcacaaaaatttcgcaattagtcgagaaaatatgcgtaaatcatattctcaactcaccttgccgaaacttcccttgccaagaacggccagaaagtggaaatcatctaccgaataattcttaaatctaggtattactgttgctggcgcagtgaaacgtccggatttttggaattgtgaatatgtatatgatgtttctgtgcgatcgagacagcaaggtttttttgtgatagttgcagatagagagagaatataagttaaagttagttaaaataaaataaatatagattagcagactgcaaatagataatgttcgttcatgagttcatccgatccggtcacttgaatttgggctacatatgtgcgacttatatcatatttaatcggcataccatcgtgttcttcgctggcctcgattttataggctggattcaaactgggcggagtgctgggtgagtcacgggcttctcgggctcctaattattcgggagaattagtcggagtctagcacatggatctctataagatctctattattttgtgggtctgattttgctaacagaattaaaaggcagtcatgataataaaaatgtattgagcttgaatgaatcaattgaatcattatttaatcaattttgttttttaatttacattttaaatgttctttgaatttgtatatattttttttatatcaagactttttctctcgtgaaagacttcccccagaataattatttcctggtttccagtcgctctattaacacattttaaattctgcgctgtgcaaaatcggacccataaattcgaggcaaaaaatatgaatattatttggcctccatatttcccatttcgagtgtgatttgtgcattttgtctggtttttacctcgcttcacgtggttgagtgcctcaacgatgagtttctgattgacaccgcataaattggccgtgagccgttcgcatttcttgtgacaattcacgtcacattctggttcgcgtgtttcgattcgttttttgaaattttaaatttcgtcgtggacgtgaatgtggatggatgtgattgtggatggtgcccacgcataatatcgcatgggaggggaattaattgcaaacaaattattaatacatttttgttgcggcaaactggtcgagttacccaatcttctgttgcgatttattggctgcacgcttttcttgactcgagcaaaatgttatgtataaaatacataacaaaatgtataaattagactaacttggaaaataagttaataattcctgaattttgtccccacaattattttatagatattgtaaatgcagtttagtttcttagttagatatatatttaattaattcatttgttcagattctaaaaggtttcttagttagatatatatttaattaattcatttgttcagattctaaaaggcttgatttccaatttatcctaacgcacaaatattttgaatatgagagaaaatttctaaaatcagttctcctcgctcaaacaaatttccccatccatttaaatgattattgttctcggtgcatttcaatcggtttaaagacatgaatttccgacgattattttgggtgggaggttctgctcgcataaacaatgcgaaatccacaattctttgctgcccactttgattgaatttccaactaaatgaggcgaatagccggatatcacgtatacgcagtgtggtaacggaacaaaaaaaaacaaatgatttttccgcgcttcgcacagcgaatttatataatctgtgaattgactgtatggcccataactgcgttgttttgttttgtatggttaaaacaaatgcaggggatgtctaaatccatatagtatcattgcaaatatatctgaatttatgtacacaaaagctttctctttgacgctcagacagacccgacgatgacctaaacaatttgttttcatttgttgttttgtctaaaagtaaaatgccaacttgtagattctttctcttttctgctttttgcggcttctggcagcggatctctagcaaattctcgcacaaacatcaaggaaacgccaccacggaacagtaagcaacgataaaattctcgtcgaaaattacataaaacacgaatcgagcaataagaaataggaagtcgcttccccaaattcactaacgcacaaaatgagtaacaatgctaataaatacaataaataaagtcgtaaacaaaataggtggactaaaatcagctcttttgaaagtgtttttgtttttagaaataaaatcacagaaacatagaaattggtgccgaatattttcaacatatgaatttgtaaaaatattacacaaatatgaagccacctaataaaaagtaaatttgacaaaaaattacgaacctatgacaaaagccataacaaatagaaacaacttcattatcaaagagaataccaagaaaatgccaaactaacatacaatgtatagcaatttaaacagaaattaaagcacttatagcttagaacaagtcttaagtaataataaaattattacttggtatgaacaaaataaaaaaaactattaaaatagttccgtgttccgcacattctttcatttaaaaaaaggccgtaaaagacatatctataaactcaattaacccagataaaagtgtcccagaaaaataggaaaaaattccgcatatattcaacaataactcacacttttttctccagctgcaggtcattgaaccactcgcattatacgcggaatataattttcaatacttgcacttcctagttaacagtttggtctcaattgcactactatgctagacgactagacgagcatatatatttatatagatgggggcatctattccccggatgatatactagctattgatcgttatgactttgtttatttctttgtctctcaactttttcccaaaaaatcctcatatatcttatatctatagatcggcgaaaacgaaggcattccgaaatgcctgggatagtcaaaagtaagtcgaaagctctttttttgatccggacacgtgccgcccaaacaagtgaccagcggaggaaataggggaacggggtgtgaattgatgtacactgggaaaaactgagcagtagcttttatcaattccatttcaaaacaaatgtataattgttacaatccagttttccttcgcagttgtgaaatgtagactatttataaaatattttcaagctttcttcatagattttcgatctctaaaaatgtttgtaaaaattggaaaatctaagctaattaaaaaataaaaataattgttttgttagtgctagttaaatttggaaactagccccattggtatcaaaaacttctgaattgagtagatagtagatagcctgctctgagtttttcccagtgtattgactgatttgcccgctattttttttttcgagatgaacgtgcagtgcatcgatcgagtcggccaaccggccagccagccttacctaacatcttcttgggactggagggcgcggtgccgccttcgaatccggaatcattgctgcaggtgctcatccggatgatggacggcgagctggatgtggaggcgccaccaccactgccactaccagcactgggaacactcagtgttccggcatttgagccgctggaattggatgaatccagcaccgttgtggcattggagctaccagccttggtgaccatggccaccgcatcgagatcctcggaactggcgctgctgctggtggagctgcactcctcgccgccgctctcatcgtcgctgtcctcgtccaaggagccaccgctgccctcctcgctgccgctctcatcgtccgtattctcatccgaatagacgatcttctcgcgcttccacagtggacgcggtgtggccaccagtggatacctgggcgcctcctccttcacataacacttgttcgtcgtatcgatcttgatcttcttgtgcggatcgaatcttttcgcctcggcggcggcggcggctttcgccttttgcttctttttctccttgcgcagtttctttttcatgctggcgcttaagttcgcacaaccgtcaacactggaataatcgtcggaactgctgccgctcccgtcgtcgtcgtcgtcgtcgtcttcttggctattttccgccgacgagggtatatagtcgtctagctcggcatcaacgtctcgcagacactgtgccaaattcgatactgttgcaaactttgataaattattgccgacgccttcgccgcagctgttgttgctgctgagcgaggtagtcgcatcagcagcagcatcagtagcagcagcagcagcagcagaagcaacaacagcaacagcagcaacattaacagcagcaacaccaattgttattgttgtgggcgttgtggttgcatcgccagttgccgccggcgatgacgcatttgtggcctgttgctgctgctgccgctgctgctcctcgtgttgctgttgcaattgcaatgcttgctgcttgttcggtgatgttttggccgcctttgtgggggccagcgttataaattgatcggcattgattggggtcacattgctctcagacaaagccgtaacagcttctgttgctgttgctgctgctggtgcggcggctgctgctgctgctgctgctgctgctggcgttgcagctttctttttgccaacatttgttttgccggcactttttggctttgtcgtattcggtgattgcacctttgacttgcccgttggctcagcggcttccgtcaatttcgttttggtttccgtttgtggcaccaatgttgctgccgtgtcgatcagttgttgctgctgttgctgcgcctgttgctgttgctgctgctgctgctgctgctgttgttccttgtcagttgttttatttattttcgtttcgactgcggctgccgttgcctgttgttgttcaggtgacttggccggctgcccgctatttatttttggccctgctgtttcgttcaattttgatttgcctgttgctgttgttggtgtgtttggtgttgttggtgttgccgttggcatggctacggcgttgccagattgtttcaaccccttcggtgagattgtttttcctgcctcggcaacagttgttcctgccattgttgtcatgctgatcttggccattgttgtctttggtgctgctggtgttgacttggactcatctgttgctgccttaacttgtggtgttttttgtggtgttgttagtggtgatgttgttgatgcagctgctttagcttgtggtgttgttggcgttgcaatctttcttgttggagaatcctttgtcggtgtttctactttagcttgtggtgttgtaggtgttacaatctttcttgttggagaatcctttgttggtgtttcgacctttgcctgtggtgttgttggtgttacaatctttcttgttggagaatcctttgttggtgtttctactttagcttgtggtgttgtaggtgttacaatctttcttgttggagaatcctttgttggtgtttctactttagcttgtggtgttgtaggtgctacaatctttcttgttggtgaatcctttggtggagtttctactttagcttgtggtgttgttggtgctgctactttcatttgttcttgtggttttatttgcagtgcaattggtgtatcggactttatttgtgatgtagttgcactttcagttttttgtgatgtttcttctttggcttgtggtgtttttggtgagtccatcgttggtgttgcagttgtcgctttggttgttattgttagcttagtttcttctgccgtctttagttttggcaagtcttttttggccattgtcggtttggccttattattatcagttgcggattttaattttggagattcagcagcttttgatattacactagcaggtgctttgcttgaagtatccattgattctactttcttagcttcgacttggttagtttttacaaccgttggagtaagtggtgttgatggtaccttttgagtttccgatttgccacttgtggacacaatcgaaggtgttgtcttcagctcgatgagaatttccgatttgagcttgggagttgttggtgtctttaaatctgtctttgtttcctttggcattgctggtgatttaggcggttcctcctccaggagttgctcctgttgctcttgccgcatgttaaagacctttttgcgattggtcatgtatagcgtttccctagaaccgatctgtgaccaaaagtcctcgccgctctccgatttctgtatagccttacgaatgggcttgggcgtagccacgccctcgactttggcctcggttttaggtagttccggttgctgctgctgctgctgcacttgttgctgctgttgtatggctgcctcatcaaaggtgaaaatctgtgcctcattaacatgttgctgcttatttactttcttcaaaggcgatgtcttggttgttttgggcgcagctttcatgaatccttcgggcaaagacgaatcatcctgatccttgggcactgtctttttcttgggcagcttgaatatcttgtgtatctgatgatgctcctccacagtctctacattaacggtgaatttcggtttcggactgggagttggagtggaactcgaaccggaaccggaagtcaatggttgtattaatagggactcctcattcaactccaaaacactaggcatatgctctactggctgagcttggggagcattttccacctcaacaatggcggtgatcttatggcgcatctttttactcttcttggaccgccttttcgatctctccttcagatcttcatcgttagtggtggtactatcgtgactggatctacgttccaggtggatcaactgaaagctgccggagtttgacttctgcaacttatttaagatttcctgttcttgctcctgaataatagaggccctacgtctgagttctccggcattcagatcatcatcaattttatcggatgaaatatcctcgcaaatgtcatgaaatgttggacattggaccaaactcaaacgacgaatggtctcctgcatttcctccaattcctgttcctgtttatcggactcatcctccttttcgtcatccacttcctttttggcacttatctccacttccggagtcaaagttttatgagcactttgtggttgaacaagctcttggatttgggctctattgaaattggttagttcctccttctcatcttttatatagaatctctcgcgaagcaattcgccgggtgactttttattgctggttactggaaaggctgccaattcttcggccaacttttgacgccaactcaaactgggctcggtggcaggtggcagatccctgaattgatgctcctgcacttgctccttcttgggactctcggcactgcgatccttgctgcgtcttcgtatggtggataatctaaccaccggacgatttcttctaatggttgacctacgattgggtctggtttcggcacttgcatctgaactttcgcatggtgtttccttgggagaaggcttaacctcctcctccgcctgctccttctgttccttttgcttcacctcctccttgggctgctccttttcctgcgacttggatggcactgccctgcgatatcgcgaggagctcacatcgatatccgccgtattgatggcaatgggtctggctggtatgtaccgactactggcgcccgatgaaccataactcggtgtggtcaccgagctgctgtatttcggtgagttaatcctggtcagaggcattaggctgctatgaccactgtgccgacccgtttccgtaatcgtggtcagtttgggttgatatctggagcccaggccatggagggagctactgccgccggagctgccactggaataactgctcggtgatctcggcgaggagggactcaggggtaccatatagctggccggatatgagcgattgtagctagatgtatagctcgatcctggtgaggatcccatgcccaagttgagacccaagccggaactatagtacggcgaatacagctgactgctgccgccactatagtagtagttggttgaatccgaatacagaggcattttgcagcagtcactcactcaaacaaacaaacaaaataaacaaaaaaaaaaaaaaacaaaaaatcacaatacacgaagaaaaccttcggtttgaatttttggtttgcttattttccggcgcttttccgctgcttttagcttaattgtttccttcggttcgtttaggctctcatattttaatcgtaattacgctgtattcggatgtacacataaatatctttatctaaatggcacagtcatcgctagttttgactttaatggcgaactacttcactacaagttaataaaaataatttgcaaacaaattttataacattattaaattattgaaatattttagtgtaatgtaaaagtcaaaattgattacaaaatatatgatttgacttaagtaaactacttggaagcacactgtacttcctcattcggccatttgtgtatcattaactaaataaaccgattcgattgccgatctgttcatttccaattcgatttccggctaagccaattcgatgtcaataactcaatttaatggccattgcggcctttaacaagactaatcccacattcaattgggcaagatgataaatttagattgcgaacggacagagattcgaccataaattcgttggcacttcagtttattcagtttattcttcacaggttaacgcttgcttgaaatatgtatttttggggctgtcgttcatgtatttgcatatgtatctatcccttcgacgctgccgcagtttaattatacaatttttaaagatttcaaaccggctgtcataatgtgccagcatttggcaataccgaagtcacattaattattgcctaattggcccaaaggtttaatgccgcctgatcgaagacaaaacgaaatcagccaactttcttacagatttccgtgtacttttttaggcatttaaatacgggtaatatgctaaaatattataaaacctgtttctaaagatattttttaaaattgaaaatgtttggtaatttatcttaactttgtaaaaataaattttcgattactatttaaggaattctttgtaacatactactaagtttgaatcatctaaattttggtagaaaatctaaatgtatattaaagagattgatagccatttttattcatttgaaaaatgaaagctatccgatttgtttatgcgactcaataaacaatgcgtttccagtgaagttttatgctaaagtgctagatttttaaataccgaataatggccattagatatggatttgaaaattgaaatgtcattggctgaaggtcagctggaatcgatggcttttcaattatttcaattgacttcttttttcgctcgatacataatatgtttattattggctttcgtctttagcccacatgtgccatatagatatagatatataatccgatgtatgagataaattttttcgcatgacgtaagcgctcacgagtcgttgtctgcgattttcctcagctattttccacgcataaattgctgacaatttttttcgttgttgcttctatgttgtaccgtaatataattatttcgttttttattagccacttcaaacacaaggtgcgggaattttaaaaaattttttttttttggtacattcgaatgctcttttgagcaatgattattttttgttatgatttttaccgtcagcgcgacacaggaaaaaattcaaaggagctaactcgacgaggcgaacgcaataacggaaactactgaaatgtgaaaggcagcgcagaatattttcaattccgatttctgaactcacaagcacacacgcacacacacacacacacatacgtgtcgatgattttcacgggaaaattcgaagtccatctgtgtgagagagaggctaacttggcagcaatactgctgtatcttgtatctgtatcttgtgttcatctgcatctgtatccgtgttgaggcacaggcccagatcatcattttcctcttctttcaattatctctacgtgtctgccaatttcgaaatatgccccctcacaattttcaacacaaccaaacgaaatttctagtgtgccataaatttcacacgaaggcgagcggtttttcgaatttcgaaaaagcatcaaaaacatttttgacgtcttttgaaaatgcttttcctcgtttttgcacagcgaaagtaaaagcgaaaactgcgaaagagcgaagaactcatatgggagattcttcagaagaattgagcgaagaagagagtccataaagtatgcggaacaattaactaaaataggtatagcaacatatatcgcaattgtttattacaagcaaataggacctggcatttcagactttttactagataatgtaacattcaaagatacaaagatactttcaccatttcgggtattcgaaaacatagttaaaagcacaacccttcaacaatagaaaatcaatagcaattaaagtaaaatttaagcaacatcactactattgttttaacttgcaaaaaaattaaactaacaacgagaaaaaaaacgatctcaattcaaagtagcgatagaaatagacatgggctgaaaaagagaacaagctatgtgggattgctgtcataaaatgtgtgaccaattaattgtcactaaaatgtgtataagccataaattaaacgaattaggcaagtgtaatcaaacatcaaagtgttcatctatgcgatgtacagtgaaatggcaatttcaacaaattgagatattgtttcaatatgaagttaccaaaatatctaacaaaaataaaagactgcaatgtaaacttagttgaaatcatctttaaatcaataaaattaaaaacaataatgccttaataaccctatttttattagaaaactgccaattttataaggattgagctaaagattttgtatcttttttttgaattgaaaatccaatgatggcaaatatcgttgtacatgttcggcagcatgggattatggcaaaagtggctaggagccttttgggccatcatcaatctgcctgttggtagcacctgctatcgagatgtttggctaaatttgtccatccacccctcccccccccccccccccgcaaatagatcgcgaggaaatcgaaaacaaatgccagaaatgccgcacgtaggatgtatctcacatgagatgtactacccgtagcactcggaatcgtacatgcgatgctaatggtgacgcttttcggttccgcaaagtacatttatagatcgccgagcaagaggaagagtcagttggaaagcgccaaacaactagaaatagaactgcaacatgctcttctttcttatttgccgtttttttttgttttatttatcctctgcctcagtacttaatctttgcgatttatagtgagtatatatatatatatatatttttgcactgcattcctgtcccgccagttgcaaaagtgcatatccatgggcttactctttcacttaaaaaaacatattcgctttcatatccagttaatgggttattaagttttaatacctcttaaaacgaaaccacttggaacatttacaaaaaaaaatccttttatatgttttaaaatgcttctgtactaagcactttccaaatgctaaactaagtgcattctgattgcctttcaggcttttacttaagatatatgaacggaaataaatataaatataaataaaataataaactgataatatctaaaggttatgctatatcttgttgaagtatgcagttcaggataaataataataaataataatttatttatctatcgatgatttgcaaaaataagaactcaaaacatgtgcaatattttcaccgataaataaaataaataaaaaaataataaataaacaaatttagttgtaagtgatataaaagtttccaaaactatataactggtattaccgaatatttgttccttttaagacttagggctatgccataaaaattaataggtatcctgccagtcgaatatcacggaatttgttctgcctgcgttgtattttcgtcttgttcggtacgccatgttttttccccccccccctttttttcgcatgtcttgtgttggcaaagtcgcaataaattgatttctaatgcagtctggctatctgtctaaccatctattatatatagcgatttcagcttaatctggctttcgcattatttccgctttgatcgtacacacatcgagtgaaagtatttattcctttgttcggcgaataaaaagaccaaatgtattgcacaatttcatgcacctgcataatgaatggccctcgtttcggtttgaaaaattacgacacaattggagaaaattgcatataacttaagtgggtttgcttttcattgcacttccagcagtgcagaaatttcataaatgtacaatgtgtaatgcgtacaacgatattactcatacgcagtgttggcataaaaatggttcttaaaagttgaatgtaatcattgtcttttcattttcacagaaaaatttaatgttcttgataatatcaggaatttttcgggaaacgttaaatgggttgcacttatttatttataaaaattcagtaattttgccacaactttataaataattacctgaaaatggaatgccatatatcgctgagtttatatttaaatttagaatcgaactgtattcaaaagttgaaattcaaaatttttgcatattttgatgatgttaccccttacaaaaaatgcgaaaatttggtaaaaaattaatttaacaaagtccgtaaataacggatagggatagttagtgttttttattagctgcctaaagctgctattctttcatctttatgatcgttttcagccaagttatgattaaaatgcccatcaaaaatgtttgcatttttgccaaaagtcgttttttctaattttcgtcatacaataactggttttttggccacaactttcaaaataattgactgaatatgaaatgtcatacctcgatgagctcgtatttaaattttcaattaaactgtgtccaaaaatttgacttctatttttttgccattttttgcaaattttgatgatgttaccccttacaaaaaatgcgaaaattgacaaaaaaataaattttcctaaatccttcaaaaagtgatatggatcgttagcactcgtaataagctgcacaaaacagtgattctttcgtctatatggcattttataaagaatttatgacgaaaattccgtatgtaaaatcaagtttttggcaaaagccgtttttccgaatttcggtaatcaaatatttcgtttttttgccacaactttaaaaataattgactgaatatggaatgtcatacctcaatgagctcgtaataaaatttccaatcaaactgtgttcaaacatgggaattttattttttcgccattttttgcaaattttgatgatgttaccccttacaaaaaatgcgaaaattgactcaaaaataaattttcttaaatccttcaaaaagtgatagggatcgttagcattggtaattagctgctcaaaacagttattctttcatctataagaacatttttgcgaagttatgactaaaattccgtttgtaaaaccaagtttttggcaaaagccgtttatacattatcataggaggtatttttcttcgtggacaattttaatagcaatttaattttcaaagtcaaatgcctaactaatttttggatgtgaaatatattaaattcatttattttaggtcttctgtgattttaaagggttgcaatatgtcaacttaatttttgcagaaatgcaagttatagatacaacttatagcaaaaatccattaatacctcaataataaccattatttttgctgaccgttacatttcgtggttggtaataagcccaaaattctggggttgttatgaccactaaagaatctcggggaagctttgtataaaagctttgcggtttacctctggcacagatggtgccacctgccaaaagctcgagccaatgaaaatcgcaacaggattgagttaaaaacgtactttctctaagattacagcactttatacagtctcataaaaatttagacttagaatataataagaagaaagaaataaatttagaattattggtgccaccttaaaattggtttatttgaactttgaaaaagttaaaaaaaataacatttaaatctaaatttgaattgactaataaagtgcaaatataagtattaaacaaagcgccgagagacttaccttcgcatttgaggccctgaataaaaaatccacccattaatgagccgcaatggtcacaaaaagtcggcgacataaaagtgtgtggcttaaaccgatgtggcatatcgatcttgaaacgttcgcgtagtaactaagttgatacaaaaaatttaagaaattattgcgtaataaactttacaatgacacatacaattgtactggctgaggtgaagacggaaccggaacatttgcccaggagcttgtcatggcactttttgtgcaccaccgtttggcaaactgaaaatgttggcaatacattaaagtttcgaatttaagttttagtatattaacttacttatgcactgatagccctgtttgccaaatccccagagaaacaaattgcagaaggcacaaaaggtgggctggcgaaagaatttggccacaaaacgatgaccattgatgtcgtgggttctgtaacaaaaaacaataaagaaagtaatgattaataacaatagtcaaaatacaatgcttctaaaatgaatgtatttattctggaaatgtgtttttactcataaaaatacatttctgattcaattgcttttaaaaactggtttacaaattcggtaaatttgtattttactttctttttagctccataattttggatcaaactcacttttgatgcttgatggccccgcgtcgattggttatgctcctcgggcgagtccttctgtccacgtagacgccaccgccggtgacgccaccaccattgccaccaatgccactcctttcgcccctgtcgacaccacccgcactgctctcccgatctcgatgataggcctcctccttggagtgctggcgtggcagctcaaaggaatgctttccatagtgatccctgtcccggtactgatcccttcgggcgccggaggctccactggcgccacttaagccactgcctgctccactactgctggtggagctctgtttgtagcgtgtctagaaaaagaaaacaaatatgatcaatattaaattaaaattaaattaaaacgatgtaataactagcgtgaacagaatgtcttagagtaagttggtcattttaccatttcacatggttataaatacatataaagcttatagcaaatatttaataagacattgttataaataaataaataaataataaattttgttgcaatttcaaaatttttcctttagttgccacagacgttttgtaccccacttttataaaataacaatagcacttctgctttaaggtaaataccggaaaaacacttgtctgtgtttacacattagttttattcatttaaattgttgaacaaaaatgtggcaaaacattgcttgaatgctctcaatgtgtaaatatatacatattaattgttaattagctagtaatgactaggcaaacaagtcagttcacttttgttttaatattttcggcatacattttaagattcacttcgaatattgttgatattggaaaaatccgtgcaactacaggtattaattagctgaagctctaaaaaagctatacatgaattgagcaaatattaaaatattaaaatat

SEQ ID NO: 4469 - DNA, 1727 bp, DROSOPHILA
aaatgtatttttatgaaacccacgacatcaatggtcatcgttttgtggccaaattctttcgccagcccaccttttgtgccttctgcaatttgtttctctggggatttggcaaacagggctatcagtgcataagtttgccaaacggtggtgcacaaaaagtgccatgacaagctcctgggcaaatgttccggttccgtcttcacctcagccagtacaattgtatgtgtcattgtaaagcgaacgtttcaagatcgatatgccacatcggtttaagccacacacttttatgtcgccgactttttgtgaccattgcggctcattaatgggtggattttttattcagggcctcaaatgcgaaggtaaatgtgacgtgaattgtcacaagaaatgcgaacggctcacggccaatttatgcggtgtcaatcagaaactcatcgttgaggcactcaaccacgtgaagcgaggtaaaaaccagacaaaatgcacaaatcacactcgaaatgggaaatatggaggccaaataatattcatattttttgcctcgaatttatgggtccgattttgcacagcgcagaatttaaaatgtattctctctctatctgcaactatcacaaaaaaaccttgctgtctcgatcgcacagaaacatcatatacatattcacaattccaaaaatccggacgtttcactgcgccagcaacagtaatacctagatttaagaattattcggtagatgatttccactttctggccgttcttggcaagggaagtttcggcaaggttctgcttgctgagctgcgtgacaccacatactactatgccattaagtgcctgaaaaaggatgttgtcctggaggatgacgatgttgactccacgctcatcgaacgcaaggtcctggccctgggcaccaaacacccgtatctgtgtcatctgttttgcaccttccaaacggagagccacttgttctttgtgatggagtacctgaatggcggtgatctcatgtttcatatccaggagagcggtcgcttttcggaggagcgagccagattctatggggccgaaatcatctcgggccttaaattcctgcacaaaaagggcattatctatagagatctcaaactggataatgtcttgctggactacgagggacatgttcgcattgccgattttggcatgtgcaagttgcaaatctatttggacaagacggcagatagcttttgtggcacacccgattatatggcgcccgaaatcattaagggtgaaaagtacaatcagaatgtggattggtggtcgtttggtgtgctgctctacgaaatgctaattggacagtcgccattcagtggctgcgatgaagacgagctcttctggtccatttgcaatgaaattccatggttcccagtttacatatccgccgaggcaaccgggattctcaaggggttgctggagaaggactatacgaagcgtattggttcgcagtacagcccggctggtgatatagccgatcatatattcttccgcccgatcgattggggtttgctggaaaagcgacaaatcgagccgcccttcaagccgcaagtgaaacatcccctggatacccagtacttcgatcgggtcttcaccagggaaagggtgcgtctaacacccatcgataaggagatattggcatccatggatcagaagcagttccacggcttcacctacacaaatcctcacatcaccttggactaga

SEQ ID NO: 4470 - protein, 54 aa, DROSOPHILA
MYFYETHDINGHRFVAKFFRQPTFCAFCNLFLWGFGKQGYQCISLPNGGAQKVP

SEQ ID NO: 4471 - DNA, 8141 bp, DROSOPHILA
ttgcagcagcaaaaagtcggaaattccatgtatccaataactatcatcacttctctggctgactgcactttcatttggatatgtgcccacgtaacacattaaccattcctgtgatttatactattattagctaggcttagtctgtttagtcagataagttaagacttagtacacattattgaattaagtacttgcgtattagaaattagaatagggtttagtttctttgaaatatgataaatcgttatctgctgcgctctccacacgaatttgattttagaaatcaacaacaactttggactttcagtggagtcttatgattaaacctaaagagcagttagcatctagttagtatcgaggattaatgttatagattttcgttcttttttgtattttgcttttgctttagagacaagcttagtcgcatcgcagagcttggtagtacgttaaaatagactagaatttagttagttaggcaatatctatatacaaatgtaactatatagatgcatacacatgcgtaatattggtttaaattgtatgtatataatatgtatatatagcaggctactttttttttactacaattggagttaaaaagtttttaaaggcttcagtaataagttctttcgagttgacaaatggaaaaattgcgttatcatcttctccctggagtccgatcttcagttaagtttaggtttaagtaataccttaaaagacttctagcctaagctacaatcacttcgaaaacaatgtgtgattcttaaaattcgttaggcaaattaattaaagtgcaggtatttgctactaatttagaacgtttgttgtcagtgtaaaagagagtttgaaacaaagtttcactacagaggtgcttgggattgtttttcctaatcggagcaaatacgaaagtagaaagtttcactcggttgttaaagctattcataaattcttatggaaccgtgcagcttgttcctatgtttaaaattcactcagttgaccctcactgattggattgtatttggtgtagattgttgttgttgctcgcattggtattgccactgcttggcgcagaaatgctacaaaaaggtggcatattagtttggaatcattaaataatattaattgactcacttattttcgtggtagaccaacatttcctgctgcccttgaaactgcaagttttgaaggtattccgccctgcgttggtgcaccagcttctctttttcggctcgctctttctgtagtctgttgagttaaaaaatgtattaaaatcaaaaataaagaagattcaaaaataatattcataaatgtataaaaataagtaaaagaactcaaagctataaagaaaccataaccatacacacggccttaccacaatcgccaaattgccatcccaaatgcttgcgtgcaataacatcacccatgagttagcttagtggttaagttaatcctaattagtcggatcaattacttgtacttacttgatgcgtgattgtctcataaactgttgaattttccgggcagcttgattttgcgtggactgggagtaggttcgcctgtgaaatttgtttatatttaataaatgcatactatttaaaactattaagtattccaactcactttaagggacccgaagggctggtttccttaggcgtgctcggttgggagcccaactcgtgaagctgctgctgatcctgtttgtagtgatcgtagaagctggacaggcactgagaattgctgctcacacttccatgatcgctggagctgctcaagcacaagccgctcttcttgaatcgcttgtttcgtctgtaggagcgatagccatgttgaatcaccagggcagcatttgtcatttgcctgtagtaggcgtactgcttgtaccgcctatagtagttttggatgacagtggcagcgctccgttccttgttctgttcttcgagcttctgtcgacccttgtacgagcgatacgccttctggatgcacttggctgcctcgtaaagctctcgctgttccgtgtctgttagggttagcttggagaaatccgcctcaaagggatacgacgagatgctggaggcgtgcaggaactccgtcaactgtttggtggatggcgggggactgggtgaactgactgagggatcggttcccaaaatagagtaactggccggggactgcagcggtcccgagctggcgggactcaaactggagcacggcgtgctgacgtcgtgatagcgatagctatggtcatggaagtcgaagctgaagtcgctgtcgaaatgtgtgttgggcagcgaatccagcagtgggtccataaagctgtccgtcagcgctgaagattctgaagtgaggggttctgtcaagggactgcccagcaccatcatttcatcggcttcgttctaagggaataaatcacattagagtaattttcagttaggcagttcatagtagctcaccttgattcgttctggcatggctgctattatgtgttcagctaatgtcagaactttggcatcggagtcccctgaaagaacgccaaaatgattaaaaaactatttccaaacaaattgcttatacaaatacatggcaaacgagactacataattgagctggacactttcatgtacacatatacagtattgaatattttctctgttattttaagctcaattagccaaatgatctaatggagcttaaattgacaaagctacgtctatgactctccaaattgatcacgataatcaaagtcgctgaacacggctaattattatttgtattatacaccgacaagcattgatttttgtgtttagggtgattagctagctatttacatacacctcggatttatatttacaacgatcaattcgtggttaattaggcggcgagtgtttgttagtttaaaattaatagtaatcggttaaatgtagacatcgataaaagcgcccatttagggcgcacaaccagcaaccaatattaataacgaacatttacattgattaaacgagcttccccccaaatacgtgattacatataacaacaaacagcaatagcaacacaacatcaacaacatcgagagccatccccacatggttagtatgtttttagctacagtacagataacgggtgagtttgttacgggttgacactttgagattgaattgagagtggagcagggctccatcagtctgccatcactgacctacaacggcatcgggcaggaccaaatcattgccaatggtcacgtcggtcgcgcttgttgaattgtcgtcgcaatctttgtcgtgcacgggactcgattcgcccgtagatacctcgcctagtttgaatttaccgagaaaatttgagcatttggttcattccatataaatatagtctatgactagtagttgggagcatgcagagtgtgatccccaaacttacaaagggcaaagtccattttgcgcagcggtgacagcagacagttggttccagtcagcgagtccagcggcgaatcgacgcccagagcatagctgtcatggctttcaaagttgctgaaagataaggaataaagttagttaaagtcctgagcggctcagtttcaagcttacctatggagcctggccagcggttttccagacttgctgcgtatatccatgttaatgccactatctatggacgaacgtttggagtaacgactgctgccattgggtggactctgattgctgcgtgaaaataacaagtgtttaacaaattattaacaaaatcaacaataagtgactccctacctatgcaccgcaacaggtcttaggaaaactccatcatgctttcgctggagttccaagtcaaaagcgctgaaactctggtgctgttcctccgcctccgcttccacgcccatgttcatggaaagattggccaagccgccgcgcagttgcggcttacggcatcgctccttctccaggcgatacatctgcgccagcaggactttgtgaccccgcatgctggccaaatccaggggagtttgctgtgcctgcgttttgatcttcagcgcattgtggttccacttgtagagtagcagcgagcactccacatggccacgtacacaggcccaggcgagcggagtgaaaccgtagacatcctggctgagggcgtccagttcggtttcaagaatgatatgtggattttccgatcgccaattcagcatggcgcccaccagcttggcatagcccaaggcagcggccaagtggagcagagtcatgccacgtaatcccaccgtccacgaggcggctgtgctgggcatgctccaggcgtgcttgatcagcttgtggcaatatgcaaccagcttctcttcgaagtttggctctaggtagagcgcagtgttgtcggtctataagttcaaaagatcttactgtagcacacgaatacgccaccaaaagaatcatacttactgtgagctcatgctccgtcttcacctgcagtttctcgtcgatggtggacaggcgatttagcagcgtaaacttgtacaggcaatcgttggagctggtggcatcgaatggagcatccgccagcagggagagcttgtattcaaacatcacggagttggaaacaaggaatccgccacaagccacctgcagagtcacaaatccggcctcgtgggctggacaatagcagcggagtactccttcctggaccagttgcgtgggtactggttgcgcatcgaatagcaccgtatacgcaccgccattcgagctcgtccaaggtccggcaaccagaaccttaacgcctccctccgtgtacgaccattcgggactgaagtcgcatatattgtgcaccttgcgtggctgcgatggcgcggactctcccaaaaaggagctctgctccaaagccgtgttattcagggcctgcttgtcatccaagtccagttcgggaaactccacgagcatatcgaaggcatccagattggcaaacacatcgtccgtttcatcatcctcaatctcggttgctgtttctgttcccatcgcaggtttctccttcgtctcctgttggcttaattcgagtttggtgttgccagttgttatcgttgtactgggtgctgtggctcccgctgctgtcgtattatacggcatatttgctatcagagtgcgctggatatcctcttgggacagatccagggtctcgttgaagaagctcaacgcttccacctggggctcctcctcgctggtgctgctgttgctgctgttttgattgttaccgccaaagctgctgctttcgtcactaatttggctgctgttatcactggaagcactgtaagttgcacaaccattttggttcagggatagcgattgcgactgcgattgcagctgactcctgttgggggcttctgtggcctgattgttgactgtgtggctatcctgctgccgaataagtttgaatttaatcaacataaatacaatgattgcagtcgattttgcggttgcactcacctcagagagcgcattggcgctcattaaattatcacaagttgctgccgtcgacgtcgttgtaatttgttgctgctgattgccatcgataatcgattgtaaggaactcgaagtggacgaagtgcccgatgtgggcgtggatatggacgtgggagcgggtgtgggtgtggatgtggacacggatatggatacggatacggaggaggggatgctaccagcggaagacgttgcaggtgtgggctggctgctgctgcgatgctcgggtgacatgcacatggcctccacgggtggttgggccaaggaatggggttgaacttgcgccagaggaggcggctgaccactagttggggttgctgttgtctgttgcaatttataataatgttgctgctgctgttgctgctgctgctggctgctgttgttgctgttgctggaagcattaagttgctgctgttgattgtacataaagttattgttgccggggtcgttattatttacgacatttaatttgttgtttgtttggcctgctaattgcttgctggcattgctgctactgctattgctgctgccggagtttgtgattttgtttgcggtcatgtggttttggttttcaattagttcggtgtccattatattcaaggcgactggtgttgcacctgaagctgctgctactgctgctgctgctgctaaagtcgtcgcaggatcactggctgtggctgtgatcgttgtattggctatttgcagcctgtgctgctgattgagatgcaccgaattctggccttgactggcaacaaatcgctgtagactcaaatgctgctgctgttgttggtgctgctgctgctgttgctgttgctgttgctgttgctggtgatattgctgctgctgctggtgttgctgctgctgctgcatcaccagattactcctcgcagcgagcatttgacttccaccccgatactgctgctgctggtagttcccatcctgctgctgctgttgctgcggcggaatgatctgaaacttaatggctgactcctgcggcaactgctgcgtcacgttgtggaactggccgtgattatccacgtgctgccttggccgctccgcccatcgggagtagagcttgctggccaccaccacattgggcgtgttgccgttgaagggctcgcccagccgtttctcctgcaccgaggacttcagcatggcggccgatcgtcgcatcacgggatgcgtacaggtctttccgtccacgcatcctccatctccgcacccgcagtccagctgcttgaccaaggcagcctgacgcgacaacctctgcttctccatcagttggcaaactatggactccaccgtctccgccgtctacacgagaaaatgcaattcagttggctctacggatgagtttcaatctcttcgttacttactgatatttctatatcgttacccgagtcggagtcatcatcagaattaattgtggatactaaaaatcaatcatgtaagttagctttaattctcatcttaaaggaaagtttttgcttatttagctaattgtttttgctcgttttttaatgtttcgttttgaattgaatagcatattcttgaaatctatacttacgcatgggcttgagctggctgaccagctcctccttggtccactcctttttgtcgccccaaagtgtgatacttggcgcaatcacggccattttgttatcatccggatatgggacattgaggtagtgcaccaaaacaatgtccggattctacacggaaaagatgagcaatgtgcgcccaggatttaaatatgtcaggccaaaaggggggtagcaaacctacctgcaacagccagtaacatctgcgatgaaatgtgggcaatatggccgagtgtacataacaaccatagatgcactgtggaaaagagggggcagaaatcgaaggaaattcaatttatcaatccggcaacacaaacaagagcataaaaaaggactaaaaacttgaggagttactactcggctccacacgcagctcgtttcaccccgcggagaagaaatccatttaattggaaaacataaaaacgacgagcaagtggagctcaaattaaattaccaaccgcccacgctagggggcgccacttggacttggtaagtgccaaaaatcaggactcaaactcaaaccaacgaaagccaacgaatcgaaacggaagagccgaggaaaagggtttgagtttccctgacttataaaacatttcgttgcgcatttttcttgttcctccgagatttttttttccccctttttctatcatagtttttttttctgagaacttcttctacccgctgataaatttgttggctctcgttggccgcgatatgccgctgacttcttgtgctccgccatggcatttcctttgtactatctgcctcgtttgggcccagttatcatgtaagaagacggcaccccgccggcactgccaactgcataaatcttcgccggccacgtttacttgcgaatgtattaaaataaaaattaaaataaaaacaaacgcccaaaggaactgtgcaaaaaattggcgtgaaattgccaaatgtttttatgtttctgtaatggcttggctatgcgcggggggtggggggagggcagggggggatggatactccgacagacagacattataaataagcttaacccttggcaggacttatttcatta

SEQ ID NO: 4472 - DNA, 4443 bp, DROSOPHILA
atggccgtgattgcgccaagtatcacactttggggcgacaaaaaggagtggaccaaggaggagctggtcagccagctcaagcccatgctatccacaattaattctgatgatgactccgactcgggtaacgatatagaaatatcaacggcggagacggtggagtccatagtttgccaactgatggagaagcagaggttgtcgcgtcaggctgccttggtcaagcagctggactgcgggtgcggagatggaggatgcgtggacggaaagacctgtacgcatcccgtgatgcgacgatcggccgccatgctgaagtcctcggtgcaggagaaacggctgggcgagcccttcaacggcaacacgcccaatgtggtggtggccagcaagctctactcccgatgggcggagcggccaaggcagcacgtggataatcacggccagttccacaacgtgacgcagcagttgccgcaggagtcagccattaagtttcagatcattccgccgcagcaacagcagcagcaggatgggaactaccagcagcagcagtatcggggtggaagtcaaatgctcgctgcgaggagtaatctggtgatgcagcagcagcagcaacaccagcagcagcagcaatatcaccagcaacagcaacagcaacagcaacagcagcagcagcaccaacaacagcagcagcatttgagtctacagcgatttgttgccagtcaaggccagaattcggtgcatctcaatcagcagcacaggctgcaaatagccaatacaacgatcacagccacagccagtgatcctgcgacgactttagcagcagcagcagcagtagcagcagcttcaggtgcaacaccagtcgccttgaatataatggacaccgaactaattgaaaaccaaaaccacatgaccgcaaacaaaatcacaaactccggcagcagcaatagcagtagcagcaatgccagcaagcaattagcaggccaaacaaacaacaaattaaatgtcgtaaataataacgaccccggcaacaataactttatgtacaatcaacagcagcaacttaatgcttccagcaacagcaacaacagcagccagcagcagcagcaacagcagcagcaacattattataaattgcaacagacaacagcaaccccaactagtggtcagccgcctcctctggcgcaagttcaaccccattccttggcccaaccacccgtggaggccatgtgcatgtcacccgagcatcgcagcagcagccagcccacacctgcaacgtcttccgctggtagcatcccctcctccgtatccgtatccatatccgtgtccacatccacacccacacccgctcccacgtccatatccacgcccacatcgggcacttcgtccacttcgagttccttacaatcgattatcgatggcaatcagcagcaacaaattacaacgacgtcgacggcagcaacttgtgataatttaatgagcgccaatgcgctctctgaggatagccacacagtcaacaatcaggccacagaagcccccaacaggagtcagctgcaatcgcagtcgcaatcgctatccctgaaccaaaatggttgtgcaacttacagtgcttccagtgataacagcagccaaattagtgacgaaagcagcagctttggcggtaacaatcaaaacagcagcaacagcagcaccagcgaggaggagccccaggtggaagcgttgagcttcttcaacgagaccctggatctgtcccaagaggatatccagcgcactctgatagcaaatatgccgtataatacgacagcagcgggagccacagcacccagtacaacgataacaactggcaacaccaaactcgaattaagccaacaggagacgaaggagaaacctgcgatgggaacagaaacagcaaccgagattgaggatgatgaaacggacgatgtgtttgccaatctggatgccttcgatatgctcgtggagtttcccgaactggacttggatgacaagcaggccctgaataacacggctttggagcagagctcctttttgggagagtccgcgccatcgcagccacgcaaggtgcacaatatatgcgacttcagtcccgaatggtcgtacacggagggaggcgttaaggttctggttgccggaccttggacgagctcgaatggcggtgcgtatacggtgctattcgatgcgcaaccagtacccacgcaactggtccaggaaggagtactccgctgctattgtccagcccacgaggccggatttgtgactctgcaggtggcttgtggcggattccttgtttccaactccgtgatgtttgaatacaagctctccctgctggcggatgctccattcgatgccaccagctccaacgattgcctgtacaagtttacgctgctaaatcgcctgtccaccatcgacgagaaactgcaggtgaagacggagcatgagctcacaaccgacaacactgcgctctacctagagccaaacttcgaagagaagctggttgcatattgccacaagctgatcaagcacgcctggagcatgcccagcacagccgcctcgtggacggtgggattacgtggcatgactctgctccacttggccgctgccttgggctatgccaagctggtgggcgccatgctgaattggcgatcggaaaatccacatatcattcttgaaaccgaactggacgccctcagccaggatgtctacggtttcactccgctcgcctgggcctgtgtacgtggccatgtggagtgctcgctgctactctacaagtggaaccacaatgcgctgaagatcaaaacgcaggcacagcaaactcccctggatttggccagcatgcggggtcacaaagtcctgctggcgcagatgtatcgcctggagaaggagcgatgcccggaggcggaggaacagcaccagagtttcagcgcttttgacttggaactccagcgaaagcatgatggagttttcctaagacctgttgcggtgcatagcaatcagagtccacccaatggcagcagtcgttactccaaacgttcgtccatagatagtggcattaacatggatatacgcagcaagtctggaaaaccgctggccaggctccatagcaactttgaaagccatgacagctatgctctgggcgtcgattcgccgctggactcgctgactggaaccaactgtctgctgtcaccgctgcgcaaaatggactttgccctttgcgaggtatctacgggcgaatcgagtcccgtgcacgacaaagattgcgacgacaattcaacaagcgcgaccgacgtgaccattggcaatgatttggtcctgcccgatgccgttgtaggggactccgatgccaaagttctgacattagctgaacacataatagcagccatgccagaacgaatcaagaacgaagccgatgaaatgatggtgctgggcagtcccttgacagaacccctcacttcagaatcttcagcgctgacggacagctttatggacccactgctggattcgctgcccaacacacatttcgacagcgacttcagcttcgacttccatgaccatagctatcgctatcacgacgtcagcacgccgtgctccagtttgagtcccgccagctcgggaccgctgcagtccccggccagttactctattttgggaaccgatccctcagtcagttcacccagtcccccgccatccaccaaacagttgacggagttcctgcacgcctccagcatctcgtcgtatccctttgaggcggatttctccaagctaaccctaacagacacggaacagcgagagctttacgaggcagccaagtgcatccagaaggcgtatcgctcgtacaagggtcgacagaagctcgaagaacagaacaaggaacggagcgctgccactgtcatccaaaactactataggcggtacaagcagtacgcctactacaggcaaatgacaaatgctgccctggtgattcaacatggctatcgctcctacagacgaaacaagcgattcaagaagagcggcttgtgcttgagcagctccagcgatcatggaagtgtgagcagcaattctcagtgcctgtccagcttctacgatcactacaaacaggatcagcagcagcttcacgagttgggctcccaaccgagcacgcctaaggaaaccagcccttcgggtcccttaaagcgaacctactcccagtccacgcaaaatcaagctgcccggaaaattcaacagtttatgagacaatcacgcatcaaactacagaaagagcgagccgaaaaagagaagctggtgcaccaacgcagggcggaataccttcaaaacttgcagtttcaagggcagcaggaaatgttggtctaccacgaaaataacatttctgcgccaagcagtggcaataccaatgcgagcaacaacaacaatctacaccaaatacaatccaatcagtga

SEQ ID NO: 4473 - protein, 1480 aa, DROSOPHILA
MAVIAPSITLWGDKKEWTKEELVSQLKPMLSTINSDDDSDSGNDIEISTAETVESIVCQLMEKQRLSRQAALVKQLDCGCGDGGCVDGKTCTHPVMRRSAAMLKSSVQEKRLGEPFNGNTPNVVVASKLYSRWAERPRQHVDNHGQFHNVTQQLPQESAIKFQIIPPQQQQQQDGNYQQQQYRGGSQMLAARSNLVMQQQQQHQQQQQYHQQQQQQQQQQQQHQQQQQHLSLQRFVASQGQNSVHLNQQHRLQIANTTITATASDPATTLAAAAAVAAASGATPVALNIMDTELIENQNHMTANKITNSGSSNSSSSNASKQLAGQTNNKLNVVNNNDPGNNNFMYNQQQQLNASSNSNNSSQQQQQQQQQHYYKLQQTTATPTSGQPPPLAQVQPHSLAQPPVEAMCMSPEHRSSSQPTPATSSAGSIPSSVSVSISVSTSTPTPAPTSISTPTSGTSSTSSSLQSIIDGNQQQQITTTSTAATCDNLMSANALSEDSHTVNNQATEAPNRSQLQSQSQSLSLNQNGCATYSASSDNSSQISDESSSFGGNNQNSSNSSTSEEEPQVEALSFFNETLDLSQEDIQRTLIANMPYNTTAAGATAPSTTITTGNTKLELSQQETKEKPAMGTETATEIEDDETDDVFANLDAFDMLVEFPELDLDDKQALNNTALEQSSFLGESAPSQPRKVHNICDFSPEWSYTEGGVKVLVAGPWTSSNGGAYTVLFDAQPVPTQLVQEGVLRCYCPAHEAGFVTLQVACGGFLVSNSVMFEYKLSLLADAPFDATSSNDCLYKFTLLNRLSTIDEKLQVKTEHELTTDNTALYLEPNFEEKLVAYCHKLIKHAWSMPSTAASWTVGLRGMTLLHLAAALGYAKLVGAMLNWRSENPHIILETELDALSQDVYGFTPLAWACVRGHVECSLLLYKWNHNALKIKTQAQQTPLDLASMRGHKVLLAQMYRLEKERCPEAEEQHQSFSAFDLELQRKHDGVFLRPVAVHSNQSPPNGSSRYSKRSSIDSGINMDIRSKSGKPLARLHSNFESHDSYALGVDSPLDSLTGTNCLLSPLRKMDFALCEVSTGESSPVHDKDCDDNSTSATDVTIGNDLVLPDAVVGDSDAKVLTLAEHIIAAMPERIKNEADEMMVLGSPLTEPLTSESSALTDSFMDPLLDSLPNTHFDSDFSFDFHDHSYRYHDVSTPCSSLSPASSGPLQSPASYSILGTDPSVSSPSPPPSTKQLTEFLHASSISSYPFEADFSKLTLTDTEQRELYEAAKCIQKAYRSYKGRQKLEEQNKERSAATVIQNYYRRYKQYAYYRQMTNAALVIQHGYRSYRRNKRFKKSGLCLSSSSDHGSVSSNSQCLSSFYDHYKQDQQQLHELGSQPSTPKETSPSGPLKRTYSQSTQNQAARKIQQFMRQSRIKLQKERAEKEKLVHQRRAEYLQNLQFQGQQEMLVYHENNISAPSSGNTNASNNNNLHQIQSNQ

SEQ ID NO: 4474 - DNA, 3099 bp, DROSOPHILA
ttcgaaaacccaacttcctggttaaataaacactcgcatgcacacatatgcagtcgccctcgccttcacacacacacccgcacccacacaaaggcacataaagccaagagaaaagatagcggacataaccatttcacaactaaattgttaacatttttttcgatttttcacatagctccctccaaacgaaatttattttcctggtaaattgagccgtgcgactgagttttcttttcgtgacgtcgtgatggatttgatttccccttggagcacacacactttttctcttttgttcgccattttcaaagcacgaaatcccgtctctttgcatttccctcattttgctttatattacctgttgccagacgctgctaaaattaaaactaaaactaaattaaaattgtgtttcactgctttgcttataattaaattaattttttttttctgtgaaaattgctaactttcgtttattcctaactattaaaatgtgtgaccgttcggccattgcgctgcaaggccctcgacggtggtatcgcttaagaccagctatcgttggcgatctatttattgggcgccactattggtggcgatctcatttttcagggaattctttacacggaaagcagttatattatagtttataatatcaaatatcgctgttaggctcttcaaagcgtgatgtaaaatatcggcaacgcggttcgtatcttagattttacaaatccgttagcggttacagaaaccttcttatagatgtcattttcctgggcacacttcctggaacttgagaacaatctatactttatataaaacgattggtcttagcacttgcataataaaacccttttcaaataattagggtatgcttatatagtcttatacaggttcaccctaatgcccgtacgaaacacaactcctccaggactcaaaccaatgtgaccgtgtatagaaggcatacgcatttacttcaatttcgattcgtttgctttgacatgtgcggcaactctgacgccaagcaaaacaaaaacagtgcagcaaagaaatttaaaaggtcattgtttatgcttagaagcggctatatttagtaattttgatagttggatacgaaaagatgtcctgtcgctgcttctgcttagtggctgcagcactgctgctgctgttcttccaccagcaatcctgtgacgcagccacccagacgccccaaaagacggtggtaattgcggagcagagtgcgccggctgctgaggtggaggccaaaaagccagtcgtgaagaaatcgcaagcagagaatcctccggcaggaccaaaggattctatggtggtcgtagacgatggcggacctgctccggttgctccaggtgcttcggttgccacacaagtttcaccaggagatgccaaggcaccggaaatggtgcagcctccgggaggtcttcccgtggatgatgttcatgttgaacgctctcccatgtcccccgatgtggactttccgggccaggctgttgtctacatcctcgtgggaatcaccagtactgcaatactgctgcttattatgagggtttataggtgagttaatgaaggacatatcctagagctctagactagagtccagaaaagcatgaaaggttatttcaaagtcttccttattattttgtaatgcaaaggtaaaacagcaaagaatagatttttaaggatttcaaaagtttacagcgatcctttatcgtgccttgaaattaaaatttccagtaaatattgttagaatactaatttaaaactaagcgtaatgtttaaatatgtagctttaaatattcttatcggtggactatatgcaaaacagactacctatatatactgaattttactttatacatacatacctacattattaagttattatactagcaatttttggtgataagactaatcgaatcgcaaatcattgcaggctccgactttcccgggcggagcgcaagtacggcgtgcagggcgaccgcgccaaccaggagctgacaccactgcccatggccatcgaggacgtgaatagtgacgaagaggaccacaccctgttcgaggtcaatcgccagaacatacgcatattatgaaatagcagacacatgcacacgccaaagatccgtttggtcgcaccgccatttccgacacttctcatcagaacttgccttgtttcgtagctatttaatgctttgtagatttgagctgtagctgccagccaatagccgactaagcccactaataactaagttctctgcatttctcctactcgcagttggttcaggtttaacgaatcaaaaaggaaaacaaaaccacttgtgataacgattacgatgatatgtatgcaaggcattaaaaatctcataaataccaatgctttcaaatcgcctctgcgtcgatgttccatataaataaatgttatattacatgtactcgcttctctctttattcttcacactttcacaggacgaatctagctataattggttacaaacgtagacttaatacaggttaatgggcttatggatagctgtgacaaaggatatacataggctggatacaggcagtatacgcgtacgcacggaaacaaatgcactaacttgtacttattaactaggatcacataaataatttattaacaatactgcgactgcggctgtggctgtggcggccctgccctgccaagaaataccacaggagcttacgactaccgctaacactaaacttgagcttcgctaacgttttacatttgtagttggcactgtagtttgtaatattccgccgagccattttccattctcccgacctaccagagtcggatctaggagctaactggtgtggctacatagccaacggcgtgggtcggcgatcggcatccccgatgggaattcccgaaatcaaatcatgctgccaaacatccgtttgccgcgcgtcagaaccaggctgaccaccatcacagtcagcaggaaaaagaccaggctgaggaacgtggtgatgaagcgacatctttggcggaacttcttctccttctccattttcagacgcagctgttccgcccgcggcaggtcgagcgtgaagtccgattcgggtcgc

SEQ ID NO: 4475 - DNA, 720 bp, DROSOPHILA
caactctgacgccaagcaaaacaaaaacagtgcagcaaagaaatttaaaaggtcattgtttatgcttagaagcggctatatttagtaattttgatagttggatacgaaaagatgtcctgtcgctgcttctgcttagtggctgcagcactgctgctgctgttcttccaccagcaatcctgtgacgcagccacccagacgccccaaaagacggtggtaattgcggagcagagtgcgccggctgctgaggtggaggccaaaaagccagtcgtgaagaaatcgcaagcagagaatcctccggcaggaccaaaggattctatggtggtcgtagacgatggcggacctgctccggttgctccaggtgcttcggttgccacacaagtttcaccaggagatgccaaggcaccggaaatggtgcagcctccgggaggtcttcccgtggatgatgttcatgttgaacgctctcccatgtcccccgatgtggactttccgggccaggctgttgtctacatcctcgtgggaatcaccagtactgcaatactgctgcttattatgagggtttataggctccgactttcccgggcggagcgcaagtacggcgtgcagggcgaccgcgccaaccaggagctgacaccactgcccatggccatcgaggacgtgaatagtgacgaagaggaccacaccctgttcgaggtcaatcgccagaacatacgcatattatga

SEQ ID NO: 4476 - protein, 202 aa, DROSOPHILA
MSCRCFCLVAAALLLLFFHQQSCDAATQTPQKTVVIAEQSAPAAEVEAKKPVVKKSQAENPPAGPKDSMVVVDDGGPAPVAPGASVATQVSPGDAKAPEMVQPPGGLPVDDVHVERSPMSPDVDFPGQAVVYILVGITSTAILLLIMRVYRLRLSRAERKYGVQGDRANQELTPLPMAIEDVNSDEEDHTLFEVNRQNIRIL

SEQ ID NO: 4477 - DNA, 6904 bp, DROSOPHILA
gggaataacagagaaggggtgggatggatacgtactaaagagatagagagagagcgacagagagcgcgctaacgaacgacgcaaaactgaaggaaacaaggtacacaaaggggaactgataaacgaaacttactgtaaaactgcagttacagtgccgtacttttatataacagcaattgcaccccacgttcactggcttcgtttcaataaataaaataaacacgggctaaaattctacgcgagtctgattaggcatgcggtttaagccatttcaattccgttcgctgtcaattttatctctgttttgctgcagttggctctccaaatcttttagttatggtcaccctacgatagcaaagcatgtattttgattgcatcgctgctatcgatgtttgcggattggcgctttagcgttcgcaccggtcacacttaccgtactttttaaaattaatatttactttacgatgcggaagcacaaacctatcttgagttgctcctttcgaagtaaattttaaaaataatattaacttcaataatagtaataaaaacatatcaatttacatttggggacacaaaatacataaactatgaatatttagaaataaatgagcttacatctcttcgttttgttgtttatttatatgacatctaattcaaaaattattgtataatatcatgatatttgcgaataatgactcgtataaacgttaccgttctgcaaaacgcataatgtcagtgtgaccgtgttgcgcggcattttaccactttcagagattagtgctcacgggttttcgtgctgcgcagcagttaaataaaattgaatacatcaagagctgcagatataaatcggagttgaaaaccagtgcaagttgcattggcccacaaatcaaaggtacgccttataaaggagagtgaatcaattgccgaattagtagtgcaaaaggtcaaagcatcagtcgtgaaaaagtggcacacataaatacaaatgcatacatacatactcgtagatgcaacacacacctacacctaaacacacatacacacacaaacacacatccgtgggaggaataaaacacccacaattgctgattattttctgcactcgttatcgttatcgctttcgttttcgcattcattttccacagccgcagtttcgtggggcgtgcaatgtttaggatccacctcaagatgggtccccaacgcaaccagctccacagcaacaacaacaatggtgccgccggaagtagcagcagcaccggaaaccgtcacctgaaggagttcacctgctgcttcggcctgcatgtccacacggccactttgatgatcggattgtggcacctggtaagtgcatcaaggggggtatcctttaatccatacatgcgtgtgtgtatatcgagatacacccacgcatgcagtcctgcggcatttgcgaaaaacctttgaccctgctcagtgtcacgcaagggaaaaatcaatcagccaatgactgcaaaactttgcgaagacgaagacgagccaactctgcactttccccgcctgtgacgtcaattggtggctgattggccgctgctgcgtcatctgatcaaatttaactacagtataattcgcttagctgcctcgagtactttgcacaatgcctcgatgcaggtaacttaaaaatgcagctaacttaatttttttttttctattttctattttctattcacacaaaaaaatggaaaaataatgcagatatcttgccgatgcagctaactatcgatgcagctaagcgaattatactgtactatcatcggggctttttggcacaacaacttatttctgccatcggttccactgcggaagtttccacatcccatgtccattgtccgaaactaacctttcacaagatctgacttcgcattagcaatcgctacacttggagaaatgtaaagcattgtcgaattttcaaaagtttcataagaaattagttttattggctaaaaaaagggatataaatgtgcaaagtgcagtattttcagtcttgttatcaatgtttttggaaacccagaaacctttgatgtctcttctgaaaatgaaagagaatgctctgcccttaagagagcgcgaatctgcggccaataaaagatttgagtcgttgagcaaaaacccttgcttaatagtatttgtctcactacgctattcgtgtatattttacactgttccgctactttctttatgctttgatcaggtcacgttttccagtagaaaactccgtcacatgggttgattatggtgtggacagcagtggagttatcttttctaatctgtccaatctcaagggtttctttgtttacattttgtagatatgtatggcgttagaggctttaaaaacaaagcaattccgcaaatcgaaggttgcttgttgtttggttgactcatccccagagtgacaattgttgatatactgcggcgcactgcagattaaatttcatgatgaatttctgatgaataatttaactaaagatggcaagttgccgcatctcgggtcgttgcaaggccttcaacctgagatacttagatactgaatcggatatccaacggcagccatctgagcaaacagcaaccagaaacatgagcgttcaagttatttttaataactacacgtactcgacaagtgatgcgaaaatatttactcttgtggtggcttactcttgcttttcggtaagaaagatatattcttctggaacaacattctgaagcgtgctgtcataaatctgagaattgttaattcagctgtcatctatcagcacacaggctgcaaatcaaatcaggcgaagctttcttatcttcttttttgccagcttatcttcatgagcggacccatgcacctgctaacgcactcgaaatacttttaaatgttgagctatcattaaagtcccccctcgtgatccttgggaatctttgcttagtttgtgacgtttacaacttattcacatttttataaatattgttctgctcacacaaaagtctacattccccactacttccaatgaaattccatccggaggaagctgtccaactggtgaaggcatttgcgagattcgaatgcaatgccccacacagacgacacatttccggaaggcagttcttgttgtcctattgacattgtttcctcaaataaagtcatcctgcgcggctatgcttctaaggcgaataaggatgtcgaagcggtggaggagctagaagagatacaggagatgaatgatgagctaagggatttgttcatcaatacaactgccatcaattgctcgtccctttctgaactaaaaatccagactgacgctttcaacacccttaaagagcgtacactattctcattgggatactcgacagccgggcttttaaagaaatcaaaaatcagtaaggttctaaaagggaaggtcaatttgtaccaacagattgtgagccttgtaaagcaacgtacaaagaccaattcagagatcaccataggaaagacaagtcatcccgtgcacctgatggtcttacagagcttttcgcgaatgtttcgcgatatgggcaatgacctgagcgtggccctgcccgaaaagatgattacgccacgctcctttggcctaatctacgaatggatgatcgaggacacgccagtcttgccgcgactcggtctcctagaggttttccacgctgccaaatttatggagattccacagttggtcaggcagtgcaagtattgcctcgatcatggattcactgaggactccgctgcgatgctgtactttgaggcgaaaatactgaaacttgaggttatccatttgcaatatcttgagcgcgtctcaaagttttttctcacgctggtggcatcgaaagagtttttgagactgccgctgaaatcaatgctattgctcatccaatcggatctgataggcgtgaatacggagctggaggtcttcatggcagccgctcggtggctaagccaccactggcctcaaagagaggaaaacgtaacggatgttgtatccagcatacgttttggactaatcccgccgtggttgctcatccgtttacagaaaccggatgtcacatctgtgggggtggggagaatcgtagcgcagccaattgtgcgccaagccattcatgaaggcatcgcgtacacgaccacgcggatgttttatggaaaagatcgggaggcttttaagcactatttgcataaggcttgcgtaaagccacccgtgcaacgcacttggatatacgaccggaaatgtccgtatcatcatcgaatgcaatgcaggaacacggtggacttaacctacgacgcgttccttgaatatcttaattacacgcaacgccagcaccgggattattggaaatctctggaaccagtagatgctagcaatgtttgcttcagttgccaggcaaagaagtctgatttaactaagcccaacagttgagtctccacgttggttgtagaacttgtaaaatatatatttctacttatatatgtaagcctccatgtgcaattaaacagtttaattattttagtaagtaaaaccgcctacgtttattttcagttcttgaacatattggcgctaagcgttctagcggtcatatggcgcaatccggagatgatggacgaactggaaggtggcacccacgactacaccgtggatctgagtgcaccggccctacccacgccccttagcaaggtcgaaccgccctacgcctaccgtgaccactccctcaactatcgtaagcgttaccgtaagcagtggagagagcaagttccgcaacgcatttaaatatcaattttctgctgcagagaacttcgatatgggcggactggtgtgcacctgcatgatagccattacactgatgatgatctacggaaccatcaagggaaaaccctcccacctgttgccgttcttctgtttgcaattgtttgatttcgctattacaacgtaaggattataatcggtggagttacagagacctcaaaagatttaaatcgccactttactttagtaaagcttaaatagccttcttaaatccttcgaggtttctaggactcttttaatagggagattaatgtacttatgcattgttcgttatcatagtctcaccgccgctggatatctgtgctacctgcaggccattcacagcatcattgccgagtcgcatcgcttgccgtggcgcgagaagctgctagaactaccacctgaggagctagttgttgttgtcctggtcgtattcatctgcattgtgtttctaaaggcctattgcattggtatcgtttggcgctgctacaagtacttgacgctccgtcagcaacacgttcgcaccctgttccccttcctggagccaccgactggagtccacagtgttggcggaacctttggtgccgaagagcggtcttactccactctgttgcccaattacgatgaagcgattgcccagtacttgaagcaggcaccaccgccatcttatcaggtggccatgtcaaactacgaagagggtgaagacgcagctgttggaggtgcggaggttaatccttcggtggcccctctcttcgtggcccttggagcagccactaccgcgaacgtagcctccaacacggatgacaacatggataataacaatgatcagccgaacaataacaacactatgcatgtcaatgccaatacgccaccaatgcgccgcagcgatgcagctgtaaacgctaatgtcgacgaggaagcggacgatttggaggttattgacgctggcgttgatgtaatcggtggcattccgcctcctccgccctacaacgacgttgccgatgcccaggtgcaagtgccatcgcaatcgccgctgcatcgccagccaaacatcccgggacaagtattcggcggacgcgacgaaagccaggcttaaacagtactttcgactggattgcttctcatggcgagtgggttgtgatcagcggtgaccacccctctcccatcctcttcttgcccagatgatctggtttctggtccctcatttcgcagctatcattcccaggcacacatacaccttcttaatggttgcttcaatgtattgaacactgtttttagaaaaacgaaacgcaaacaagttttcgctattagccatcgctcattattgttgtttaacgtacaactaagacgctctagttgctgctaatttagtaaacaaaagcattaaagccaaaaacatattgtgatgctggcgaggaaagcatcaattccttttcggccgcatctgacccgattttagctgcaacaatctgttagaacgtttttcatttggcccgaactagcctgagaagttcggatattgtaggcccaagtagttgttaccagagagtgtcgctggcattgtagacacctttacgatgttctttgttttaagttatctcgtaagactatgcatattgaataccgtgtactgaattcagagcacaggcagtcataatccattaattatgatgatattaccagcaacagtaaagttttatgtgtgtacaatatctaaatgtatactgtgtactaaatatgcaaagatattcgaataaaaattagtttatatttaatttgtgtttgcgacttcattttaatttaaagaacattataatataatttccaatttcagctgataccctaattctatttggaaattggtttcattttcaatagagttggaatgttgactttttagtttatagtgttaatcctttaacagagttgatgatatttattttaattggggaaagaaacaaaataactttgttctctactattaagtttaaaaaagagaatattctttgatcaactgacttccatagagattccatttttacattttctttttattgtttattgaggaaagaagctacataaaaattcccgatcat

SEQ ID NO: 4478 - DNA, 1466 bp, DROSOPHILA
ctcgtagatgcaacacacacctacacctaaacacacatacacacacaaacacacatccgtgggaggaataaaacacccacaattgctgattattttctgcactcgttatcgttatcgctttcgttttcgcattcattttccacagccgcagtttcgtggggcgtgcaatgtttaggatccacctcaagatgggtccccaacgcaaccagctccacagcaacaacaacaatggtgccgccggaagtagcagcagcaccggaaaccgtcacctgaaggagttcacctgctgcttcggcctgcatgtccacacggccactttgatgatcggattgtggcacctgttcttgaacatattggcgctaagcgttctagcggtcatatggcgcaatccggagatgatggacgaactggaaggtggcacccacgactacaccgtggatctgagtgcaccggccctacccacgccccttagcaaggtcgaaccgccctacgcctaccgtgaccactccctcaactatcgtaagcgttaccagaacttcgatatgggcggactggtgtgcacctgcatgatagccattacactgatgatgatctacggaaccatcaagggaaaaccctcccacctgttgccgttcttctgtttgcaattgtttgatttcgctattacaactctcaccgccgctggatatctgtgctacctgcaggccattcacagcatcattgccgagtcgcatcgcttgccgtggcgcgagaagctgctagaactaccacctgaggagctagttgttgttgtcctggtcgtattcatctgcattgtgtttctaaaggcctattgcattggtatcgtttggcgctgctacaagtacttgacgctccgtcagcaacacgttcgcaccctgttccccttcctggagccaccgactggagtccacagtgttggcggaacctttggtgccgaagagcggtcttactccactctgttgcccaattacgatgaagcgattgcccagtacttgaagcaggcaccaccgccatcttatcaggtggccatgtcaaactacgaagagggtgaagacgcagctgttggaggtgcggaggttaatccttcggtggcccctctcttcgtggcccttggagcagccactaccgcgaacgtagcctccaacacggatgacaacatggataataacaatgatcagccgaacaataacaacactatgcatgtcaatgccaatacgccaccaatgcgccgcagcgatgcagctgtaaacgctaatgtcgacgaggaagcggacgatttggaggttattgacgctggcgttgatgtaatcggtggcattccgcctcctccgccctacaacgacgttgccgatgcccaggtgcaagtgccatcgcaatcgccgctgcatcgccagccaaacatcccgggacaagtattcggcggacgcgacgaaagccaggcttaa

SEQ ID NO: 4479 - protein, 432 aa, DROSOPHILA
MFRIHLKMGPQRNQLHSNNNNGAAGSSSSTGNRHLKEFTCCFGLHVHTATLMIGLWHLFLNILALSVLAVIWRNPEMMDELEGGTHDYTVDLSAPALPTPLSKVEPPYAYRDHSLNYRKRYQNFDMGGLVCTCMIAITLMMIYGTIKGKPSHLLPFFCLQLFDFAITTLTAAGYLCYLQAIHSIIAESHRLPWREKLLELPPEELVVVVLVVFICIVFLKAYCIGIVWRCYKYLTLRQQHVRTLFPFLEPPTGVHSVGGTFGAEERSYSTLLPNYDEAIAQYLKQAPPPSYQVAMSNYEEGEDAAVGGAEVNPSVAPLFVALGAATTANVASNTDDNMDNNNDQPNNNNTMHVNANTPPMRRSDAAVNANVDEEADDLEVIDAGVDVIGGIPPPPPYNDVADAQVQVPSQSPLHRQPNIPGQVFGGRDESQA

SEQ ID NO: 4480 - DNA, 2991 bp, DROSOPHILA
tgtagcagatcaggcctcctgaaaccatggacacaaagagggcggcggccaaactattggcaaacacgggcacattcgcattcacactggccaagttggagaataggtcggcggagctgttcccaaaagccaacaaggtcacgcccgccacgtgctcgttcatacagaggaaccgcgacacggcctttagagcaggactgtagctgaaggtacacaatcatattgaggtgcgaagtgaaatacttagatgtacatagtattgtaattagaaaccaattagaggtatatttcagctattggaaatatttatccaactactactccccagggaatgcctctcttctatctgagtatcaacttttgtcagtggacgtgtgtacttactatttgttgcaaacgtggatcagcagattgtaattagaaaccaattagaggtatatttcagctattggaaatatttatccaactactactccccagggaatgcctctcttctatctgagtatcaacttttgtcagtggacgtgtgtacttactatttgttgcaaacgtggatcagcagaacaagtatctcgtagcacagacccatgaacagagcgaggaagataacctgctcgaattcgtttacgcagttcagatcgcaggccatgatcctcatgtatggcagcacattagtgctcctattgcagtccttggcactcgccacaaaggcacacctttcctcgaagggaaacgtgttggccgcgtagcagctgactgtgtcccagaagttatcgaactccgcatcgaaggcattgggcacatagctctcttcggtggccattgcagtgttgtgtgtgtgaacgaaacgaaatctgaaaaataactggcacgattgtcggggtctccattgcttcaaaggtctactatgtagaactgtcaatgagtaacatttaagggtagagttttcggggatccctgtcagccctgcgtctactgacacttcccattcggcccaatacaccagcagaactcttaaattgactccaatgtaaggacgggatataatgtaagacagcgagccgactccactagcctgtgcattgaaaaagaaaggactcgggtgcaaaatggtcagtcagctgcccgcacagtctgctgatttagacaagctcgctccatcaggtcagtttgccgtcgctgtggtcagcaatctccagagatcgcgttcgagctccgatcgccgggggctcgtcttgatcctgctctccagcgacctgggcacctacatcagacgcctgctggcccgtgtggcggagaaggcatgtacgatcctacgtacatatctggggcttagctaccgggaagtgtccgtgtcccaggacatggcccacagactggccgtggttggccggaagaccctggtcctggacctggatgagactctggtgcactcatgttacctcgatccggacacccacgacaacgtgggatgtagccagttgcccgaacacgcacaaccggactatgtgctcaatatttccatcgacgggatggaacctatcgttttccgggtcttcaagcggccgcatgtagacgagttcctggactttgtgtccaagtggtacgacctggtgatctatacggccagcctggaggtctatgccgcccaggttgtggaccatctggacgcggggcgaggattgattactcgccgcttctatcgccagcactgtcgagcctcctcgccaatggtctccaaggacctgacattggtcacccctgacatgagcggcgttttaatcatcgacaactcgccgtacgcataccgcgactttcccgacaacgctattcccattaagaccttcatctacgaccccgacgacacggagctcctgaagatgctgcccttcctcgatgccctgcgcttcaccaaggacgttcgctccattctcggtcggcgcgttatccgccattattataaccgatctaccatttcatcccatcattgaacgaattcactgtatttctatatggttagaataaataaagaaaaattcctaaaacaatgaatatgtgtcccaatgttttaattattctttcatacaaggtgaataatgattctttcctacttctaaagaattaaatcattaagaaatattataatatataaaattataaatatatgaatatgaataaaacaaaagataagctgctacattctgcatatgcactcttaaatttgaacaaatttgatacacttctgtctaaattatgctttattattttaatcatggctgtgtatttaaattagggaccctaatccttacggtccaggctaagtgcaggctgtttatcctttaatcaagtcaggacattcgagacacgggcgaaagcaggcacatatgtgccaacctcagagcagatgcatttcattgctcatacgccaggttggcccggctggcttttttgcgatttccgtgtgtgagcagaagttcggagaactcaggctgcatgcaaatgcagaagcgtaatgatgttgcggctttttgactttacacggccacagtggcagccacaactctgagccacctgatgccatatcctaccgcctgctgcatgctgcctgccccctgttgtggaggaaagttgcaaaagtttaaattgaattcttaattattgcgcacacgaggctgcaattttaatgcacacattttcggggcatggctgtccgaaatgtttagataatatttcagttttcctgcagattgtcaaatggccgcccgagtcctacgataattttgtttctcctatttttttagggatcaaagagattcagtctggcccaggctgatttatgtgaacgtgtgcccggcaaattttgatttgtagctccataaaatgtttcagctggcaggcaggcaaaactagccgaattccatgagccacgggcttcggcagagttggttattgaaatccagcagatagctgggcgcaggagcaggcggcaca

SEQ ID NO: 4481 - DNA, 991 bp, DROSOPHILA
caccagcagaactcttaaattgactccaatgtaaggacgggatataatgtaagacagcgagccgactccactagcctgtgcattgaaaaagaaaggactcgggtgcaaaatggtcagtcagctgcccgcacagtctgctgatttagacaagctcgctccatcaggtcagtttgccgtcgctgtggtcagcaatctccagagatcgcgttcgagctccgatcgccgggggctcgtcttgatcctgctctccagcgacctgggcacctacatcagacgcctgctggcccgtgtggcggagaaggcatgtacgatcctacgtacatatctggggcttagctaccgggaagtgtccgtgtcccaggacatggcccacagactggccgtggttggccggaagaccctggtcctggacctggatgagactctggtgcactcatgttacctcgatccggacacccacgacaacgtgggatgtagccagttgcccgaacacgcacaaccggactatgtgctcaatatttccatcgacgggatggaacctatcgttttccgggtcttcaagcggccgcatgtagacgagttcctggactttgtgtccaagtggtacgacctggtgatctatacggccagcctggaggtctatgccgcccaggttgtggaccatctggacgcggggcgaggattgattactcgccgcttctatcgccagcactgtcgagcctcctcgccaatggtctccaaggacctgacattggtcacccctgacatgagcggcgttttaatcatcgacaactcgccgtacgcataccgcgactttcccgacaacgctattcccattaagaccttcatctacgaccccgacgacacggagctcctgaagatgctgcccttcctcgatgccctgcgcttcaccaaggacgttcgctccattctcggtcggcgcgttatccgccattattataaccgatctaccatttcatcccatcattga

SEQ ID NO: 4482 - protein, 293 aa, DROSOPHILA
MVSQLPAQSADLDKLAPSGQFAVAVVSNLQRSRSSSDRRGLVLILLSSDLGTYIRRLLARVAEKACTILRTYLGLSYREVSVSQDMAHRLAVVGRKTLVLDLDETLVHSCYLDPDTHDNVGCSQLPEHAQPDYVLNISIDGMEPIVFRVFKRPHVDEFLDFVSKWYDLVIYTASLEVYAAQVVDHLDAGRGLITRRFYRQHCRASSPMVSKDLTLVTPDMSGVLIIDNSPYAYRDFPDNAIPIKTFIYDPDDTELLKMLPFLDALRFTKDVRSILGRRVIRHYYNRSTISSHH

SEQ ID NO: 4483 - DNA, 4045 bp, DROSOPHILA
gtccaatatgcgcttgaccagcttccccttgccggaatcatccgactcgtcgcacttcttcttgctaacgcagacctcgtggctcccgcaggtgcggatcgagaggatcgccggtgcgagggaaatcaatgccagactgatcagcaacacctgctccacattcatggcgacgattggaattggtatgggaaagccacactcgttcacacagttcaacagtgagccagccaaacaataaacagcacacacactcgctgggaatttgtttggaatccgaataacccctacgatttcagccggatcaatgcgcaattcactttgtattactttcaagagccgcgacgcgttttcgactgactctgccctcgcagcgatcggcggaattatgggagagagactctgatctccggagattagtaaaatcaactaatagctctcaacaaattcaattctcttccgatcggcagcactttacttctcagaatccggaaagccggttctaacaatatatatatcttgagctcaactataggcgatcagtcgtctttgtgaaacatatgctacagtgttgacttcggtgtattgtctttgccttaaatacgactatgttgagtaattgcttcatatgttcaataaatgctatatgttaatgaatatatttgaagaaaaagtcaatatcatttgatttttcccgaaaaataacaacattttttaaggtatctatttatagaaagcagtttatttataacaaatatatacaatatatatgttgattcgaagaaattgctgtttgcataaaaaaatacaaaatacgcctatatatgatatcacaggatcaagaagtaggtggatctgttatcctggtgtcgctgtgtaactaaatagcgttgggaaaacccactcctcttcacttctctcttacgtgctcttccgagcttagattcccagaaagcaggttctataaatgcttcgatttcaactctacttgatcagtcgacatcgcgagtctgtagctacgagattgtttctaatcggtgttctctttgctttaaactgcactagcacataggtataaatggtagcagtatatacgcctacgtatccgcatactttagttgtaacatatactatatatcgacaagggcaacaactgataataaaaccattacaataaagtgtagtcaaattgttctgacttatacatatttaatagattatattgcagttccgttttaagacgtgaagtgtttgtgaaaactatgttaattataattaactataattttgaattgcacgtttaagacactattccaattaatgggtttttttcagtgataaatcttttaaaaataaaagaagtgttaaagtattattaaacgaggtctatgctcctatgatggatttgtttttaaactataatcaccagtgcacaagtattcattccaacgatgtcgataaccccaattgtgcattatttgagattaaggcttcacttatctctactgttctttcacatcttctttctccgccagtttcccaccaacgaagatgagctggctgatctcagcggtgttcctcctgctgtccctttgtgccttctcgatgggccaggacacgatttcggcgatgtgcctctcggacgaacggtgcacgtctttgaagcgttgcgaagactcggatgattccggtcgaaggggaattaggccacgcagctcacgcatctgcggcacccaaagggtctgctgcgagaaggcccagctggacagctatgacagatggctggttgagagaaccacaacagtgccttcaacaattcgaaacaaggtatccagtgtcctggaaccgccgccgaacgagagctgcggacagaacatggagtgtgtacccagaaagttgtgccgcgacaatattatcaacgactcgggaatcagcctgatcaatccgaggattagcccgattcagtgcagcaagtccttgtaccgctgttgcgccgtagatcaaaaggtcagcctaagatcattgatatgagtatccatatttatccatactaacccattgaaacttttccaggtggatgacagcgaaagtccgtacttggtgaagcaggcgaactttaagtacaagaactgcggctacagcaatccaaagggtctaatacccgacaacgacaagttcccctactcggaggacgtctccatattcggagagtttccttggatggtgggcatcttcactgggcgccaagagtttctatgcggcggcactctcatccatccgcggttggtagttaccacttcgcacaatctggtcaacgagacggtggacaccttggtggccagagctggcgactgggatctgaacagcctgaacgagccgtatccgcaccagggcagccgtattaaggagatcatcatgcactccgaattcgatccgaactcgttgtacaacgacatagcactattgctcctggacgagcccatccgtctcgctccacatatccagccgctgtgcttgccgcctccggaatctccggagttgaccaaccagctgctatcggtcacctgttacgccactggttggggcaccaaggaggcgggcagcgacaagttggagcatgtgctcaagcggatcaacctgccactggtggagcgagaagagtgtcaggcgaagcttcggaacacacggctcgaggctcgcttccgactgcgaccgagtttcatctgcgccggcggagatcctggcaaggacacctgcaagggcgacggcggctcaccgcttttctgccaaatgcctggcgaaatggatcggtaccagctggtgggcatcgtgtcctggggcgtcgagtgcgccgtggaagacattccggcggtgtacgtcaacgtgccccatctgcgcggctggattgacgagaagatcagaggacttggaatcgtgctgcaggcgcaataagcttaaaccttaatccacgatgcaaatgaaaaatgagaagcaaaggtcgttttttaatttcaaaaattaaccaaataaaatataacgtttagatagattgcgctacttgcacgtacccatatctcccggactctcttttcccgagaaacaggtatctgatagtcgagtaactcagctttacaactttcaactttaatctggtttcatccaataaaaataaggatttgctggtcgccgaaggagttcccattgtacactgacactctaataatgaatacaattgaatattggattttgtattggatgttgactaccctgattgattacttttaccacgttctctttgaaaaattagtggattgttactgcaataaggacaataaccctctgcctgagaaactctttaaagctcttatcatttacaaacgttatctgccatcgtcggtcttctatatccgccatttatccgtgccagcttgaacttaaacgccggaatagttttccatcgaggcacttaactcggaggtacctccaagtcactggatttattgcaatccttgaacaaaggagcggcactgggatattcgagccaaggagcacagcgtcttcatgccggcagcttataaatagtggagccatggcagatggctatgtggactatcccccatttgacacccccatacgccgtgctccacttcaccatcacggctatggaaccaaattaaccacgaggcaactcagggaatggggaaaaagagaaacaacgcattgaatcgccaaaaattgagaaattacacgctgggccgagcaaacggcgatgtagcgaattgattttcgggctgcctgctgttccgcctggagctccttcctcctccccgcaccgtggcactcgattccccagccaggagcacaaactcatttctcaagtaaattgtttaaacagtttttgctttgttttacgttacgttacgtaatttattaggcacttttacggccctcgcgttttgtatcgattttgttgttttcaaaactatggcattttgccacgaacctgatgaagtttccgtggcctatctatctttgctaatattcctaa

SEQ ID NO: 4484 - DNA, 1516 bp, DROSOPHILA
cgcgagtctgtagctacgagattgtttctaatcggtgttctctttgctttaaactgcactagcacatagtttcccaccaacgaagatgagctggctgatctcagcggtgttcctcctgctgtccctttgtgccttctcgatgggccaggacacgatttcggcgatgtgcctctcggacgaacggtgcacgtctttgaagcgttgcgaagactcggatgattccggtcgaaggggaattaggccacgcagctcacgcatctgcggcacccaaagggtctgctgcgagaaggcccagctggacagctatgacagatggctggttgagagaaccacaacagtgccttcaacaattcgaaacaaggtatccagtgtcctggaaccgccgccgaacgagagctgcggacagaacatggagtgtgtacccagaaagttgtgccgcgacaatattatcaacgactcgggaatcagcctgatcaatccgaggattagcccgattcagtgcagcaagtccttgtaccgctgttgcgccgtagatcaaaaggtggatgacagcgaaagtccgtacttggtgaagcaggcgaactttaagtacaagaactgcggctacagcaatccaaagggtctaatacccgacaacgacaagttcccctactcggaggacgtctccatattcggagagtttccttggatggtgggcatcttcactgggcgccaagagtttctatgcggcggcactctcatccatccgcggttggtagttaccacttcgcacaatctggtcaacgagacggtggacaccttggtggccagagctggcgactgggatctgaacagcctgaacgagccgtatccgcaccagggcagccgtattaaggagatcatcatgcactccgaattcgatccgaactcgttgtacaacgacatagcactattgctcctggacgagcccatccgtctcgctccacatatccagccgctgtgcttgccgcctccggaatctccggagttgaccaaccagctgctatcggtcacctgttacgccactggttggggcaccaaggaggcgggcagcgacaagttggagcatgtgctcaagcggatcaacctgccactggtggagcgagaagagtgtcaggcgaagcttcggaacacacggctcgaggctcgcttccgactgcgaccgagtttcatctgcgccggcggagatcctggcaaggacacctgcaagggcgacggcggctcaccgcttttctgccaaatgcctggcgaaatggatcggtaccagctggtgggcatcgtgtcctggggcgtcgagtgcgccgtggaagacattccggcggtgtacgtcaacgtgccccatctgcgcggctggattgacgagaagatcagaggacttggaatcgtgctgcaggcgcaataagcttaaaccttaatccacgatgcaaatgaaaaatgagaagcaaaggtcgttttttaatttcaaaaattaaccaaataaaatataacgtttagatag

SEQ ID NO: 4485 - protein, 444 aa, DROSOPHILA
MSWLISAVFLLLSLCAFSMGQDTISAMCLSDERCTSLKRCEDSDDSGRRGIRPRSSRICGTQRVCCEKAQLDSYDRWLVERTTTVPSTIRNKVSSVLEPPPNESCGQNMECVPRKLCRDNIINDSGISLINPRISPIQCSKSLYRCCAVDQKVDDSESPYLVKQANFKYKNCGYSNPKGLIPDNDKFPYSEDVSIFGEFPWMVGIFTGRQEFLCGGTLIHPRLVVTTSHNLVNETVDTLVARAGDWDLNSLNEPYPHQGSRIKEIIMHSEFDPNSLYNDIALLLLDEPIRLAPHIQPLCLPPPESPELTNQLLSVTCYATGWGTKEAGSDKLEHVLKRINLPLVEREECQAKLRNTRLEARFRLRPSFICAGGDPGKDTCKGDGGSPLFCQMPGEMDRYQLVGIVSWGVECAVEDIPAVYVNVPHLRGWIDEKIRGLGIVLQAQ

SEQ ID NO: 4486 - DNA, 2835 bp, DROSOPHILA
tcactggatttattgcaatccttgaacaaaggagcggcactgggatattcgagccaaggagcacagcgtcttcatgccggcagcttataaatagtggagccatggcagatggctatgtggactatcccccatttgacacccccatacgccgtgctccacttcaccatcacggctatggaaccaaattaaccacgaggcaactcagggaatggggaaaaagagaaacaacgcattgaatcgccaaaaattgagaaattacacgctgggccgagcaaacggcgatgtagcgaattgattttcgggctgcctgctgttccgcctggagctccttcctcctccccgcaccgtggcactcgattccccagccaggagcacaaactcatttctcaagtaaattgtttaaacagtttttgctttgttttacgttacgttacgtaatttattaggcacttttacggccctcgcgttttgtatcgattttgttgttttcaaaactatggcattttgccacgaacctgatgaagtttccgtggcctatctatctttgctaatattcctaacatattgcttatccaatttagttacctttaaaagttctatcaataatctgaatacaaaatcgccttttttaatacaataaagaaacgatatacttttaagtatattaaaagtaaataaaaatttgacaaactagaggttcaactgtgtgaagataagatattggtagtagggtcccacatgaggcgatgtttttaaatgtctttgaattcctaataaatcagagccaataaataatggccatatttataatttacattcagtacttaaaagccaacttatcgctggaggcctacggtgcttatcgagtactgattttacaccttgatcgttccctgttctttgatcggaacttcccactcaatttaacaagaccacttgggcaacactttaagtatatgcaaacagaagaaattaaatagctttttatatgattgctttatcaaaacacagttcttagtagacaatgccggtgtggtcgcggatccagtccaggtatccggtgacacgagtgaatccggcggggcggccggcggtacagccctctccgctgccgaaggatacgatgcccacgatgcggttgttatcgtgcaggaccaagggaccaccggagtcaccgctgcaggaggacttgccgccgtcggtgttgatgcagatggtgttgtcggtgatgtagttgctaccgtagtagttgcggcagtcgttgttgtcaataatctggacatcgacgcagttcaggtagttggacatgccgctgttgttgtctgtcagaccccatccagaggccactgcccaccagccggagtagctgttgtagcgatcgttgtagctgggcaactccaccttgttgaccaagctccagaagtccacgtgggggatgcggatcagagcgatgtcgttgttcaggaagtcgttccagtcgggatgttggatcatgtcgctgcggctcacccagtgggtgtactgggcctcgtgacggaagctggctccgaagtagatgagcacatggttagcgctgttcgtgcagtgggctgcggtcaggacccaggtgtggtcgatgatggaacccccgcaccagtagccgccatcgttgaagctcagtccgacaatgtagggaatcttgccctcgtaggccgggtatccattggtaatgcgaccctcgatcttgccggcgcgtggcatgtccttcactgggacagccctggcggactcggagggcaccactccggcagaggcgacagccagacaggctaggaaaacaaagagcttcatgttggtcaacgaacaactggccagcgacggcccaaccaactctttatatggcaaccttatcggagctcagcgaaaggctatcttttattcgcactcataaatctaggttattttgaattttgtagaaactccagaatggattagataagcaatcactagggtttcgagcttaataaattatcctttagcgatggaaagctacaatcaccacttcctgtttttggtttaaatgtagaataggctttgtaaaatatttttttcttgatgaccattttaattttgtaaacaaaaagaccgaaaacagatttatggtttaattgactgtttaaaagttattactattaacttgttccattgctagtcaaatattataatattcgtttgttaaattttaagaatagattacaaactaacagttgggaacttatagttggtacctaaatgaataaaaaaggacaatataaagagaattcgttcataatggtacgatattccttttccctcatcgaaaagaagccctgataccttagactagagctctggtcatttatttgtgcatgctgagatcaatttacgcttgattagctttccttgcgcaagcagggcacaatcaaatatttgccaaattgataatcatttaattatagcaaagcataatgcaaaatgcaactgctaacagcaaatgcatctcgatgggcagagatggaaagggctgtgttcgtgtttgagcgattgtgttgctttgtgtgtgtgcaattataatggccctggccgcaattgtgttgcatactttgaggcacagttccttgccatctgtctgtccctttgtccccggcccctccttgtcccccagcccagccatcaaattacaaatgatgtagtgcccaggggaaaatggagcggacgaaacggacaaaacggacggaatggacagactgaggagcgttgctgctttgtggccagtgaacggaaatagaaacagctgcaaatggcagttagctagtt

SEQ ID NO: 4487 - DNA, 835 bp, DROSOPHILA
ccaacatgaagctctttgttttcctagcctgtctggctgtcgcctctgccggagtggtgccctccgagtccgccagggctgtcccagtgaaggacatgccacgcgccggcaagatcgagggtcgcattaccaatggatacccggcctacgagggcaagattccctacattgtcggactgagcttcaacgatggcggctactggtgcgggggttccatcatcgaccacacctgggtcctgaccgcagcccactgcacgaacagcgctaaccatgtgctcatctacttcggagccagcttccgtcacgaggcccagtacacccactgggtgagccgcagcgacatgatccaacatcccgactggaacgacttcctgaacaacgacatcgctctgatccgcatcccccacgtggacttctggagcttggtcaacaaggtggagttgcccagctacaacgatcgctacaacagctactccggctggtgggcagtggcctctggatggggtctgacagacaacaacagcggcatgtccaactacctgaactgcgtcgatgtccagattattgacaacaacgactgccgcaactactacggtagcaactacatcaccgacaacaccatctgcatcaacaccgacggcggcaagtcctcctgcagcggtgactccggtggtcccttggtcctgcacgataacaaccgcatcgtgggcatcgtatccttcggcagcggagagggctgtaccgccggccgccccgccggattcactcgtgtcaccggatacctggactggatccgcgaccacaccggcattgtctactaagaactgtgttttga

SEQ ID NO: 4488 - protein, 271 aa, DROSOPHILA
MKLFVFLACLAVASAGVVPSESARAVPVKDMPRAGKIEGRITNGYPAYEGKIPYIVGLSFNDGGYWCGGSIIDHTWVLTAAHCTNSANHVLIYFGASFRHEAQYTHWVSRSDMIQHPDWNDFLNNDIALIRIPHVDFWSLVNKVELPSYNDRYNSYSGWWAVASGWGLTDNNSGMSNYLNCVDVQIIDNNDCRNYYGSNYITDNTICINTDGGKSSCSGDSGGPLVLHDNNRIVGIVSFGSGEGCTAGRPAGFTRVTGYLDWIRDHTGIVY

SEQ ID NO: 4489 - DNA, 7078 bp, DROSOPHILA
tggtttcaaaaccggcgcatgaagtggcggaactccaaggagcgggagctcctcgccagcggcggttcccgcgaccaaacgctgcccaacaagaataacccaaatcctgatttgagcgatgccaaatgcgatcgtccgctgacgccactctcgccatccctgctctcgcccaatgggagtgccacgcccccaccgccgggagcggtggccaaggatgaaccgccaacggcagctgtcacgcccaagtcaccgcaatccgtcagcagccggagctccccctccgtgggctatggcctccagattagctcgccgcctccgctcctcactagcctcaaaatgggcgatcaatcggcgtcggccacgcccactccgctgccgggcacaacggtgtcatccgccgccgcctcgccgcccggtgtaactgcctccgagtttcaggccaagatcaatgccgagatgcagaagcagctggtggccgccgatctgaaattcaagctggagaacagtatccaagaggccaagcagcgccggttcgagcaactgcagcagcagctgcatcactccccacacttcagtgccatgcgggaggtagagctggccgccgcagccgcggctgcgcaactgcatcatcatcaccagcagcagcagcaacagcaacagcagcagcacgcacagcagcagcatgcgcagcagcagcaccaaggtggctccgagttcatgaaactctactacgatgactacgacgactccaactcggacagtgacgaggagatcagcgtgacgtgatttgcgactggaggcgaagatggagctgcaacggtccgtgtacatatatgttttaattgtaaatttattgatgcattcaacttattgtatttaatatgtgtatgatattttttcgaatttaaattccaaaacgaaataaactcctttgaaaatcataatgccaatactaatgcaaagatcacttgacatttcagcaatcaacgctgattaggaatatatatgtatatataggttttattaggtgtcttaaaacgaactaaacataaaatcatttcgtagtaacattagtaagtgtgtgtacagaatactgagccaacaacctcggctgggacttaagaactagaaatcactctttcgactaaactaggacagttaacagattgcgactggtctttgtacatggaggttacatggaggttacacaaggaattggccggtggggagcgtcgatccccgccagagttcgagttttggcttcgagttctattcgtcgtcaatgcgaatggcatggttcacatggccctcgtcacttgtgagctctcgcggatcgccaatcaccgtcgtggtggtgtactgcacctgggagtcgctcttgaagatctcctccgacacggcgggattgtcgatgtccttgccggtgatcttcagcacattgcgtcgctggataaagtcaatgatcagcgaaatgaaccagcccaggaaaacggtgagtaggcagccgatcatgctgtaccacatgtagctcagccggaaaatgggccaagatctgtaatttctgggttaagtaaaatatatatatctagtacctaagatgttatcttacgtgaatcccccctcctcaatgacttccaaaggttctgttagcaagctgccaatgatgttcgtcatgttcacatggcagtcgcatttgtcgatggatgtgggcaatgcgggctgctccacgctcacaatttgggcaaccacgcccacaaatatgaccagggccagggacaagagtcctccgtagaaggcgcccttggtattggcctgtttgcaggcgattcccagcacgaagagaccgagggtgacaccaccaatcagtccattgagggtaagcgtggcctgcagaactcctcccaggtgctccacgatgaagaccaagccgaaggaggcaatgccaaagcccagggacatccacttggcataggtggctcccttctccggagagattttgatgttcatgccattgaccagcagatcttcgcaggtcacagcggacagggagttcaaggcagaggccacggtgctgtttttgagaaggaaaaactttgaataagacttccataagctgttctggagtttaagagctcaccccaaactggcagcaaagatgccagccacaaagattcccgccacggagctaatatgctcgtaggtattaatcacgtagtagggcaacaactgatccgtggctgaaatgcgtccagcagtcaagggatcgcagtccgcatagtgggtgaagaccatcagacccgtgtagaagttcagcaggaagaccacaattaagccgataatggcaaagcccagagcaatcttggctagcctcaaggacttcaaggacatgcatttctgaacggacgcctggttggtgcagaacagcgaggtccagtagaaaaagccaccaatgaccaccgaccagacggtgtgacgtgttgtgggatcgggatccatgctgcagaattaaccagaattgttaaggtccttggattcatttggcttaactcacttgaagaactccaagcgattgtgatcggaagcagtctgaaagacctggatgggattgccactgtagaagcagcccaagcccacgatcagtaccaaggatacagccaggacagcagcctaaaaggatttagatatatcttctcgtattgatgagttccaccatctcgttactcacctggaaggagtcggcaatgactacagccttcatgcctccctgtgaggagtagaaaacgcagaccacatagatcaggaccacggcgattttggtgtccagtcccgtggccttagacagagcaattgccggtgccaggactgccacagccgtgtagaagcacatctgaaggagaaggagtctatatataaatctcattcattttcgagttaaatcccagaacccacctgaatgacatagagcactgcacccagaatcctgatctccttgccaaaccgaatgcccagatactcatagcagctggtgagctccattttaaagtaaatgggatagaagatcttcacagcaaccggaatgacaatcaccatgggtattacgatgagcacaaactgggtgccctggaagtacatctcggatggatttcccagcagttcgatggccgtgatgaagctggtcgtgagactgagtgtcaccgggaagatgctcatctcggagcccagcaggaactcgttggacgagctgccgcccttctggaagaagccatagaagatgccgatgcccagcgagatgaccagcatgcccagcagaatcacgtagtcgtagcccgagaaggtggccttgtgactgggcgcactgcattcctccagctccgcggatgcgggaatctgttgattcttgaaggctctcaggagcagggtggcggcattatcgaactccacatgctcctgggattcactgggcgactcaccgcgcactatcaagtacttgtggctggaatccaagggagcagatcctcctggagtcggagaccgttcctgcagggccaatgcggttatagaatgtgccagggcgcacagggtcagcaacttcagaatggtgtcctgggtggcgaacatcctggatcacgagcaaggactaaggatggggatcgaaggatggcgatttccgggagatcactttctccagccgactttccacccggcgacgtgtgcgcaaactgaaacgagatcggatcggaagcgatttagacttggatcactggcaagatcaaggttcgcaaagaggaattgcaacgaggcggcattacaaagcaccatcgcaccgtgggtgtcacacttggtgtcatcttggggcccattaattaattaaccaaacgatctggatctgcggctctggatccggaggaggggaggccatcgaccattggccagcgtctcatgttcaagtacaaatacattatttccttatacaaacaattccatttgagcgtaattgctttatgattaatatgttttcttcatggggcggcagtcaaggcaacgctcttctttttttttttttttgggtgatatttctttttcggattgtggatttcggattcccagatccagagttatggctcttttggggttacaagtggacgggcgatgagcaagaaggcccagcagaaagctgcctcaaactggtcgttgatttattcaaactggttatttctggccaaaagaaatcgcacggcttgcaagtggtaaggaatttgttaagatatttgattttatttcacgccaattctaggatgtatttcattgcataatgctactcgatgtgtaacaaacttttttaatatatttcaatttccttgctgatttatgcaattacttgtcgttttaattgtcaagtatttgaattcattacacaagccttatcttttgagtaacttaaatttattacacatgcctcctccgtctcctcttaattgttaaatcataaaacacacattctgcaactgatcaacgatggcaatcacttcccccattcaattgatccccaacactcgacaattattcttgatgagaccagaagccatggcgcctcctcactcctcctggcgcctctactgcccccgcccacttttccggccaatcaaaccatttgagaaaagctgctcctgtgcgacatggacatgtatgcaccatatggcctgaatggcgaatagattgggctacaatgtttgagcgaaaatggggagtgcgagcgcgccaatcgagatttaagcgaattcaactggtttagatcggtggccattggactgagccggattgcgccggtttgggccagaaattcgccatcgctcggcgaatcttcgaagagcagcttccaagtctccgaaggcaaggccggaaactaagagcaaaaggcccgaccacaagagagatgtccagatgcacagagagaaaataccagtaaggaatggtctaggctccttctagtttctagctcatcgtagaatattttattcaagtttacaaacttctgatttgagtaatctaaactacgaaatcatatttattgctcatttgtttgttggctatttgtgtttggggtgaaacccgttttccttggtggaggaacacacgggtcaaatgaattgtgggctctggttgaggacaggcgtctggcttaattggtggactttcgcccagcccattccaaaggcccttcgcttccattaaatggcatcatcatcgtcttcgagcccaattaatatgcgtgttttgttttgctttcctcggctttttttttatctcgtctgggcgaactcgcttctattctattataattaatttaaacaaaatagtccgcttgacaagttggcagaagataccaatcgcaagcaaggagattttccacggccacgacagctgcaaacattacctagttcaaaactggcgagattagccagctaaaaaacagagtgaagtaacacaagcgacaaaatattaaaatgccttcggaatgggtataaatactttcagctttattagcttgttcgacaaatgcattttacaaattgtttttgccctcgcaactttttactctagttttagttagtcatgagtaattggaataaatttcctttgggctaatgctttttactattctgatgttctgagatattttgcaactaccaattatcagtgacaatcggtatgataaatttcgaaataactcactggcatgcattgccgctttcactgaaaaactgaacaacttctcaccttggttagtaatttttcaattcgtcaaattcgatatccttcggttgtcgtcttcgtttagctctcaaatggaattaggtttgctgcactgtatcttagaaatgttctgaactggatttgcaatattgtgccacgattgtttctgtatttcattaacgtgttttcttagttagtcacaaaatgaaactgatcactgtttggatttggttcctcgagccgagtccttgccgtagtttttttttcacttcgagcactagttgtttcccttttttcccagctcgtcgtcgatcgctgttcgaacgtattgacaatttttaaatgaatgagttttgcaagcggccgttacgctattttatacaacacccaaggcggcgcaggcaaatcacagatctcggatctcaggcctcggatctcagatctcgggctcccagcttcagcttcgggaaccccaccacatcgagatctctttggggtctgaaaagcgaagaagagagaaaatcgatctaagagcaggcgaagcgtcgccggatatgatatcgccgatctccacggagagggaaactcgatcgccagccaatggtcgtgtggagtgctaagatataggcaacttattttcaacagactctgggcactaagcctattttaaaaaataaaaccaaagacattatggttcatactataaatgaaacagatattaaatattaaatgtttattaatgtaatattatataactttaaattaaaaggttagtagattgagaaaatgataggaaacttataatcaggtaggtatgtaggtattaagtaaatgtatataaaaatatgatgggtataagtaaaataagcttgaggaaacgtttaattgaaaatcgtgtataaatgtttgccaaaccgtttcctaaattgctatcaattaatttcagggaattgaaacgctctgattcatatgcgaagattcattttcaattctgcagaagacgctccacgaatggccggaaaatatccggtattttccaactcctttgcatatccctcgatggcgattgttaattgtggcaagttgagccaagtgaaatgcgctgtaaacaaacataaaagtttaattgctggttcttggccagtttgggattgcgtgatgtgtaaatatttccatttgtctcaccctttattactttttaagtaactcgagtcacaaaggcaaaaagtgcgccaattaataatggaaacgattatatctttcgttttttgtacacttgtcgcctcgcctcaattgctggctatgtggtgttttacttggataa

SEQ ID NO: 4490 - DNA, 2660 bp, DROSOPHILA
ttcgaacagcgatcgacgacgagctgggaaaaaagggaaacaactagtgctcgaagtgaaaaaaaaactacggcaaggactcggctcgaggaaccaaatccaaacagtgatcagtttcattttgtgactaactaagaaaacacgttaatgaaatacagaaacaatcgtggcacaatattgcaaatccagttcagaacatttctaagatacagtgcagcaaacctaattccatttgagagctaaacgaagacgacaaccgaaggatatcgaatttgacgaattgaaaaattactaaccaagtttgcgcacacgtcgccgggtggaaagtcggctggagaaagtgatctcccggaaatcgccatccttcgatccccatccttagtccttgctcgtgatccaggatgttcgccacccaggacaccattctgaagttgctgaccctgtgcgccctggcacattctataaccgcattggccctgcaggaacggtctccgactccaggaggatctgctcccttggattccagccacaagtacttgatagtgcgcggtgagtcgcccagtgaatcccaggagcatgtggagttcgataatgccgccaccctgctcctgagagccttcaagaatcaacagattcccgcatccgcggagctggaggaatgcagtgcgcccagtcacaaggccaccttctcgggctacgactacgtgattctgctgggcatgctggtcatctcgctgggcatcggcatcttctatggcttcttccagaagggcggcagctcgtccaacgagttcctgctgggctccgagatgagcatcttcccggtgacactcagtctcacgaccagcttcatcacggccatcgaactgctgggaaatccatccgagatgtacttccagggcacccagtttgtgctcatcgtaatacccatggtgattgtcattccggttgctgtgaagatcttctatcccatttactttaaaatggagctcaccagctgctatgagtatctgggcattcggtttggcaaggagatcaggattctgggtgcagtgctctatgtcattcagatgtgcttctacacggctgtggcagtcctggcaccggcaattgctctgtctaaggccacgggactggacaccaaaatcgccgtggtcctgatctatgtggtctgcgttttctactcctcacagggaggcatgaaggctgtagtcattgccgactccttccaggctgctgtcctggctgtatccttggtactgatcgtgggcttgggctgcttctacagtggcaatcccatccaggtctttcagactgcttccgatcacaatcgcttggagttcttcaacatggatcccgatcccacaacacgtcacaccgtctggtcggtggtcattggtggctttttctactggacctcgctgttctgcaccaaccaggcgtccgttcagaaatgcatgtccttgaagtccttgaggctagccaagattgctctgggctttgccattatcggcttaattgtggtcttcctgctgaacttctacacggttgttgccctactacgtgattaatacctacgagcatattagctccgtggcgggaatctttgtggctggcatctttgctgccagtttgggcaccgtggcctctgccttgaactccctgtccgctgtgacctgcgaagatctgctggtcaatggcatgaacatcaaaatctctccggagaagggagccacctatgccaagtggatgtccctgggctttggcattgcctccttcggcttggtcttcatcgtggagcacctgggaggagttctgcaggccacgcttaccctcaatggactgattggtggtgtcaccctcggtctcttcgtgctgggaatcgcctgcaaacaggccaataccaagggcgccttctacggaggactcttgtccctggccctggtcatatttgtgggcgtggttgcccaaattgtgagcgtggagcagcccgcattgcccacatccatcgacaaatgcgactgccatgtgaacatgacgaacatcattggcagcttgctaacagaacctttggaagtcattgaggaggggggattcacaaattacagatcttggcccattttccggctgagctacatgtggtacagcatgatcggctgcctactcaccgttttcctgggctggttcatttcgctgatcattgactttatccagcgacgcaatgtgctgaagatcaccggcaaggacatcgacaatcccgccgtgtcggaggagatcttcaagagcgactcccaggtgcagtacaccaccacgacggtgattggcgatccgcgagagctcacaagtgacgagggccatgtgaaccatgccattcgcattgacgacgaatagaactcgaagccaaaactcgaactctggcggggatcgacgctccccaccggccaattccttgtgtaacctccatgtaacctccatgtacaaagaccagtcgcaatctgttaactgtcctagtttagtcgaaagagtgatttctagttcttaagtcccagccgaggttgttggctcagtattctgtacacacacttactaatgttactacgaaatgattttatgtttagttcgttttaagacacctaataaaacctatatatacatatata

SEQ ID NO: 4491 - protein, 389 aa, DROSOPHILA
MFATQDTILKLLTLCALAHSITALALQERSPTPGGSAPLDSSHKYLIVRGESPSESQEHVEFDNAATLLLRAFKNQQIPASAELEECSAPSHKATFSGYDYVILLGMLVISLGIGIFYGFFQKGGSSSNEFLLGSEMSIFPVTLSLTTSFITAIELLGNPSEMYFQGTQFVLIVIPMVIVIPVAVKIFYPIYFKMELTSCYEYLGIRFGKEIRILGAVLYVIQMCFYTAVAVLAPAIALSKATGLDTKIAVVLIYVVCVFYSSQGGMKAVVIADSFQAAVLAVSLVLIVGLGCFYSGNPIQVFQTASDHNRLEFFNMDPDPTTRHTVWSVVIGGFFYWTSLFCTNQASVQKCMSLKSLRLAKIALGFAIIGLIVVFLLNFYTVVALLRD

SEQ ID NO: 4492 - DNA, 2639 bp, DROSOPHILA
taggttatgtaaaaggggtagaatagatttatcgataggtatgttaataggtagaaggtagcgtttccgaccatattttcgtccctctgtcaacccgtccgtatatccatccggctgtccgtatgaaatgtttcccaccgtatatgaatatgttaaattatttatttaaaatggtttgtgcttgctgagctgggtactataacgtatttagttataacaaaaattattaaacaactgattaaaagggggcattacagaactatagttcatcttatcagccacaagttaaggtagctgacttgcagaaatttcgctttccaatgaccagacatagcgcgtaaatcttgataagtaacaggtaatcacggaagtagaagtgcagctcgaaagacctgcagagggacagcaaggtgagtgcgttgggctgtaaccactttgtcaatccactttgtccaaccaaccgagtgccaccaagtgctttccttatggcaggacggagttgaacttaaaaactgaaagcttaagcaagttattaagcacaaaaacaactgaaacccattcagagcaactttgttaacgaggatgtcgttaatgagactgcggttcaagtggcaaatagttggctctggtctgctaccgattgtgaagttgaccgctggttttggcggtatttaatatcccagtccggttttgaaagttaattttacatttttgtattacccgctttggctttccatgaaagaaataactaaaatacttccaaaaaaagagttcggacgatgttctgtaactttctgagcaggcacacatcctcatgattttataaatttgaaaagtttcagtaaaagggagggaatgaatacttggacagttgaacgtgagcgttcagttgcaaaacaaagatggataataggagcaggactttgcaattggatgtccccttctttgccctttaaacgactgcattcaaatcaatacccgaatccccgaaaatatagaattcgctattatatcattcaaactattttataaccttttcaggaaccactctaaccagaccagtgggaccagccgcggatctcgttccagatgtgagtgccggggcattcggtggcgctgacctggcgatgaccgtacaggatgtagccggagctgagctggccacggttgacggcgtcgttgagcagctgctgggcggcggagatcatgttcggctccagggtgtcccagttgtagttgcccaggaagctgatgccgatgctgtaggggttccactcggcggcgtgggcgcccatgttgttccagccacgcccctcgtacacgttgccgtctccgccgatcaggaagttgtagccgatgtcgggccagcccagggagtccatgtggtagttctggacgctctgcagcacggcgttgcactgggcacgggtctcgcagtaggagccggcggtgtggtggatgatggcgtagctgaggtagttgcccaggcctacggtccatttggcgccgcgaccaccccactccgccttggagacgacatagacgccctgggccatatactggctgcagaccaggacggcgaggaggagagccactttggaaaccatgattaccagctgtaatagttgacgatcgcttgatggagatcgtgggtctccgaggcgcttataaagcaaactgtggtcagaaatcgctgcttatcgggtagcgtaaaattgatttacgacgttaatcgatggcactttctcagattcgcgttgggggaagcaccttacttagagcttcgtcacaatctggtgattttgatttatacaattacttttttttggtgggtccttatcacctttgacggattggctcgcgcataatttcccagttacaattgtcgatcttctcacgaaactaagccaggaaagtattttttggaaaattaaattaaattatatttagcatattccaacagtggttcagaattatgtaaaggtaaaggaaagttttcaaataagtggctacttatagcgataattgcatacttccaggcaccattttcaaatagctattctccgaactactcgcagtttgaactgaaatcgaaaaatttacaagttggttttacgatctatgtcaagcagtcttttatgggttaggaaataatatctgaaaaccactatgtccttaaaatatttaataaatacgagcccctatagtaagtacgatgttcttctagtgagattttaactgacatacttttgaattaacaggcttccttaatgagagcgatttcatgcaaaatgtgagtatgctaaagaacgcatttttttcacccacaacatatacaaaattccaggtgagctgtttggcggtgatgcacttcagttacctccatcgttgcgagatggccacaaaaatcgacgactgcaaatatatcaccaacttcttcaactactatgttatgatgtactgctccttcaagatcgacaataaaatcaccgaaatagtggtgatgctcttgtttgcactaatctactgcttcttcctttgcatcctctatgagggcgtcaacagctagtaagtttatgagcatgcagtgtcatccgggatctgttgacccccaaacctcgcagctttgcaccaacact

SEQ ID NO: 4493 - DNA, 639 bp, DROSOPHILA
caagcgatcgtcaactattacagctggtaatcatggtttccaaagtggctctcctcctcgccgtcctggtctgcagccagtatatggcccagggcgtctatgtcgtctccaaggcggagtggggtggtcgcggcgccaaatggaccgtaggcctgggcaactacctcagctacgccatcatccaccacaccgccggctcctactgcgagacccgtgcccagtgcaacgccgtgctgcagagcgtccagaactaccacatggactccctgggctggcccgacatcggctacaacttcctgatcggcggagacggcaacgtgtacgaggggcgtggctggaacaacatgggcgcccacgccgccgagtggaacccctacagcatcggcatcagcttcctgggcaactacaactgggacaccctggagccgaacatgatctccgccgcccagcagctgctcaacgacgccgtcaaccgtggccagctcagctccggctacatcctgtacggtcatcgccaggtcagcgccaccgaatgccccggcactcacatctggaacgagatccgcggctggtcccactggtctggttagagtggttcctgaaaaggttataaaatagtttgaatgatataatagcgaa

SEQ ID NO: 4494 - protein, 185 aa, DROSOPHILA
MVSKVALLLAVLVCSQYMAQGVYVVSKAEWGGRGAKWTVGLGNYLSYAIIHHTAGSYCETRAQCNAVLQSVQNYHMDSLGWPDIGYNFLIGGDGNVYEGRGWNNMGAHAAEWNPYSIGISFLGNYNWDTLEPNMISAAQQLLNDAVNRGQLSSGYILYGHRQVSATECPGTHIWNEIRGWSHWSG

SEQ ID NO: 4495 - DNA, 2604 bp, DROSOPHILA
ttataggccatatattaacgatttaagacaaatgatggcttaacttaagcgtagaagtagttgttaatgtatcctcttgcaactcacaacttttccgttgcagagcgagaaacacatggcattggacaatctgcgcgaggagttcatggagcgcatccgtcgcctggaggaggatcgccacaacgtggacatctcgtgggccgactggggcaccgacaagcggcagagcaaggtgcgcggaccgggtcgcaagaaggccgtcaccgtcacgggtccctatgtcgtgtacatgctgcgcgaggaggatatcatggaggactggacgattatacgcaaggccctcaagcgatcctcctcgtcggccaccgctgctggcacagttacgcccacttccggcgtaagcgttagcctgtccggtttgccagcaatggcaggagctagcggatagcgttggggcgtggcagctgccgcctacgcccacatgacgcgtacctgacggccgcgcccgaggaagcagcagccgtagacgtttatgtatcagtagtagccgtagcagagcccccgaaccagacttcaaatgcgttcatcaaaatggctaagctccgccacccatcctcacctccttttcccgtagattttagtacgtacgtagtttgtacgagtcccactctcagaatattgtgtgtgtgtgtgtgtgtgtgtgtctctcccctcccccatacagacgatgtatgtaatttatgctaaaagataagtgcaaataaaagcgaactgcagccaagtgggcatgcgttcaacataaatttaattcgattgcctgcgagtgattcaatctccggaaggccagcagttttgttatccagacttggatactatgggtaggaggtcacaatgtgggtaagccgccttaggtgaggcgagacagaagaacacaaatcccacatgatttaaatcaacagaaaagcttttattgcggcacagacggttcatttgtggaccttcagaagcccttctccttgagatagtcacgcaggacgtccacgtggtcaccatggaagtgtatctgaccgctcagctcattgattctcgtggcgcagaccttgccgtttcgcgactgctccaccaccgcacgcagatccttttccagcgtccaaatgtctccttggacgcgtcgcaccaccgtgatccggcgctggccacggaacctggtgtgcagatacacgggcaccatgtgattcttcgtcctggccacatggtaacccagttctgagccatcctccttttgtggctgccagccggatggatattttggcttctccaccggctgtggtactgtcttcgctggtagcaagcgctccacaaaacgccactcgggcggattggccaccacctccacttcaggatacttgtccagctcctgaacttcgcgggatgaacgaaaactggacataagtgccggttgcatgtgtatttgcctggtaagctgcgtgaaataaaaacagattttaggtgattttttactggaatcctttggtttatctgctcacctggcttagcttttggcagaggccgctgcctagcatcagtttggcgcttgttgccatgttttttggctaaaaactaacagatttcccaagaaatacaaaaaatagttgttacatatgcactggctggttagtgatgcgcaaatggtagcgataattgtttcgattacttaacttggctagaagctatcgacttcgttttgtacaaagcaccgattttcaagctaaaaaatatttaaaaatgtaaatagtcaaaaaattaggtgcaatgacaacagtcaaatatttaattagttaattaattaacatcaggttaaatttgattttatttcgaaacatggcttaaatggcctattgcttagcgaatttatctacttttttctaaaactgaggaaaattaatcatttccgcccagtttttagtaaatttaattaaataaacactatattatatgatcatgcattaaacgatcttggaatttagctgcacgtacaccattcagcttaatttctacaagctcaaacattttagcctaatttgcgttttgtctttgattgcttttgtcttcatcactttagcatcgcatgcaacaaatgcagcgtgtgacgtcatcgccaaagctttaatcacacacgcacacacacagaagcgcctgcacacacacaagcgttgcaagtgcggcatttgaattgcttagcttatacaattttattgcagctgttgttcgccgttgagtttttcgatatgcggtaatcgcggagtcatcggggtatatcgaaatagtcgcaaagttgtcgatataattttagtaaccgttgaaatgtgcaaaaaatacaattaaagagaaataaacacttcgattacgatcaccttgagtttataggattagtaaatagtatgaaaaattgtgtgatcttttgattatctttgggaaatttcattattcggcgaataaatatcaatataaatatattatttctggttagtgtatatagatgctgctctgtacacctttacattcgatttattcagatgtgctccattgcaatatcctgctaat

SEQ ID NO: 4496 - DNA, 540 bp, DROSOPHILA
atggcaacaagcgccaaactgatgctaggcagcggcctctgccaaaagctaagccagcttaccaggcaaatacacatgcaaccggcacttatgtccagttttcgttcatcccgcgaagttcaggagctggacaagtatcctgaagtggaggtggtggccaatccgcccgagtggcgttttgtggagcgcttgctaccagcgaagacagtaccacagccggtggagaagccaaaatatccatccggctggcagccacaaaaggaggatggctcagaactgggttaccatgtggccaggacgaagaatcacatggtgcccgtgtatctgcacaccaggttccgtggccagcgccggatcacggtggtgcgacgcgtccaaggagacatttggacgctggaaaaggatctgcgtgcggtggtggagcagtcgcgaaacggcaaggtctgcgccacgagaatcaatgagctgagcggtcagatacacttccatggtgaccacgtggacgtcctgcgtgactatctcaaggagaagggcttctga

SEQ ID NO: 4497 - protein, 179 aa, DROSOPHILA
MATSAKLMLGSGLCQKLSQLTRQIHMQPALMSSFRSSREVQELDKYPEVEVVANPPEWRFVERLLPAKTVPQPVEKPKYPSGWQPQKEDGSELGYHVARTKNHMVPVYLHTRFRGQRRITVVRRVQGDIWTLEKDLRAVVEQSRNGKVCATRINELSGQIHFHGDHVDVLRDYLKEKGF

SEQ ID NO: 4498 - DNA, 3415 bp, DROSOPHILA
ctaatttcatcgaacaaacggagctgtcaaatccatgtacccctgcccgactcgaaatatattcagtttgccaccagagctcgtctggagcacaactcgtttcggaaaaatacaaatttcaaaaagcacacaaaattcatagtaaagcgacgggtgagttgaaagttttggctcgattcggtttcctaacaaaaaaaaatgtgaaatttttataaattgaaaaaagtgaaaaaaaccaaaaatttactttttttttttttttagaaatttattggttagctttccgtgttataaacatcaacacaaacacatacagatagtgcaggacaaacagatataagacaaataaatactggatacatacacgaaatccgtgcagttggtaagtatcgtaactcaccccctttcaagccataaaactaaactaattgccatctaggagatacaaacaactagctgccgctaccgcagttataaaataatcacatgtgccatcacatctactggattcccatcccatcccaaattatttaatgcgcttatccaaaatgcaaactaatgatgatcgttccgcctacactgccttaattaagtctgaacaagctaggataggtttgtttaactaaattatcacactaaactgaactaatcatattgcttccacagttgaaatggtgttcaattcgatggtaccagtcccgttggacgagaggattgcatcgttttggatacaaatgttgcgcttacaatcaatgcaagccatagaagcctactcttcatacactatgttaataagccatcttatgatcagttggtttatctcaaatgcaaactactaaagatcgttccgcctacactgccttaattaacagtctgaacaagcaaggataggttggtttaactaaattatcacactaaactgcgctaatcatattgcttccacagatgaaatggttttcaattcgatggcaccggtcccgttggacgagaggattgcatcggtttggatataaatgttgctctaatattcaatgctaacattttgctgcctttccctcatcccataccttactggatcgcatcgcctgcctaggatcagttggattggctgaaatcgatcttgtttaactgtactatcatgtgaaattgcaataatcatactgcacacttccggtcccaaatgctcaacattcacatttcgcttgtttttgtcttaataaacggagttcaacgaacgtaactgggaaaagtttttgatctgggtggttgtgttaatcctgcacttcagatgttcctggggtctaagctaagatgaactttggcgaacaatgcgcaaatgctcttacttactatatcgtacttcccatttggcctcgtaggaagacttcgaacgaagtcgtcttaatgaaattcatacatacacgtttattttttccattttttttttcattctcatagtttgttggcggggggagtaagagaaagcgtacgtgatgttcatattttcatagattcaataattcataaattttatgcgcacacggttacattgctgattgaagcatcctttctgcggaatgtctatgtcctgacttttattggcattccaatgtctgcaaaacgagaatgatcttcgggcattcacaggttgaaatgtcaaaaggttttagtcaaaatatgaaaaatattggattttttttgttcagagccgtttttccgaattttcgtcataaaataattattttgcgtataatattttcttaagccatagggtttctttttgctgacaggacatttaattatgtctgcctttcgccctttctatttagttgccatatgagcattaaagattgtcgacttgaatatttaaatattttctcgcactcaatatgaggtgaccccgatgtgcggcaatccttttttttgtccatggtcctttgagaccgtgtcctgtgtgtatcgttgatggcctgcatcgccatcttggtgggaaacggtgtgggcgtggaggtgttggcatccttaaaccgttcgcgttccaattcatttttcaaagctaaccaaaagcaagccacccacgtttccattgggccgtggatgtttttccaacgttcattttttggcatctcatgaatattcatagacatgagcggccaaaggaccgcgttggcctatctgacacagtcagcatttctgggttgcgttggcaggatgaggacctcgacgaccaagctgagctggttgggcaggaggtgctggcacattacgctgggagtattttgaaaactgcttgccttgaggaggcatttttgaacagggtcaaagggcaggagaagctctcaactgggcttacttttgtgggcgtccttcaaaaaccccataaaagcgaagaaagtgcgcttaacatacttcgtatttatattgtcatttcataatgcgattgtttttgtttattttataatggtatttaaggttattaggttacatttgattggttactctggttacactgttaatttccttgctgacctggcattggattttcttcctgattttgctcattaccctgatccgcatccttttctctgttcttatcctgcgccttggtcatcgcaaacagcttggtccagtgtctagcaattttgtcgtgctccctgcgattggttttgtactgatcggcaatgcacatgactagcggatcatctggattgcactcactcatcagcacgtaaatggaaagtagaacctaagggaaaaatacaaaaatggtaataaccttctgccaagagactggaaacgtgaaaatcgaacccaccttggccacattcatcactggggaccatcgttcgccgaggacatccaggcaaatggcgccgcgactgtccacgttgcagtggtatattcgggtggtgaaccgaatgcgtggcgcccggaatggatagctggccggaaatcgtatatccagccggaagtgaccgccttcgtatacggagccaactggcccgttcacacctgccgtccagtgaagaagatccccgtgatgcaaatcggcggtgcaattcggtggcggatttttccgaatgtcctgcagttcgctcttaattcgcaccacacaaccagtaagtggtgcctcggtggattttcccgatgcactgtgactggtgctgggtgccgtctcttctacggagctggccacactggctctcgagagcacttctggttcgacctccacttccacctccgctcgcgctcgcgcttccgtttccatttccgtttgggaattcacctgatcgctggacattttggcgatttcgagtcccgatttctaacttcaattttgtgtgggtttcatgttttcagccaacgcacagggccgtaatgattttagtcttacgatcggtgaacttattcaaag

SEQ ID NO: 4499 - DNA, 1008 bp, DROSOPHILA
gaaaacatgaaacccacacaaaattgaagttagaaatcgggactcgaaatcgccaaaatgtccagcgatcaggtgaattcccaaacggaaatggaaacggaagcgcgagcgcgagcggaggtggaagtggaggtcgaaccagaagtgctctcgagagccagtgtggccagctccgtagaagagacggcacccagcaccagtcacagtgcatcgggaaaatccaccgaggcaccacttactggttgtgtggtgcgaattaagagcgaactgcaggacattcggaaaaatccgccaccgaattgcaccgccgatttgcatcacggggatcttcttcactggacggcaggtgtgaacgggccagttggctccgtatacgaaggcggtcacttccggctggatatacgatttccggccagctatccattccgggcgccacgcattcggttcaccacccgaatataccactgcaacgtggacagtcgcggcgccatttgcctggatgtcctcggcgaacgatggtccccagtgatgaatgtggccaaggttctactttccatttacgtgctgatgagtgagtgcaatccagatgatccgctagtcatgtgcattgccgatcagtacaaaaccaatcgcagggagcacgacaaaattgctagacactggaccaagctgtttgcgatgaccaaggcgcaggataagaacagagaaaaggatgcggatcagggtaatgagcaaaatcaggaagaaaatccaatgccagaaaaaaaattacgttcgttgaactccgtttattaagacaaaaacaagcgaaatgtgaatgttgagcatttgggaccggaagtgtgcagtatgattattgcaatttcacatgatagtacagttaaacaagatcgatttcagccaatccaactgatcctaggcaggcgatgcgatccagtaaggtatgggatgagggaaaggcagcaaaatgttagcattgaatattagagcaacatttatatccaaacc

SEQ ID NO: 4500 - protein, 234 aa, DROSOPHILA
METEARARAEVEVEVEPEVLSRASVASSVEETAPSTSHSASGKSTEAPLTGCVVRIKSELQDIRKNPPPNCTADLHHGDLLHWTAGVNGPVGSVYEGGHFRLDIRFPASYPFRAPRIRFTTRIYHCNVDSRGAICLDVLGERWSPVMNVAKVLLSIYVLMSECNPDDPLVMCIADQYKTNRREHDKIARHWTKLFAMTKAQDKNREKDADQGNEQNQEENPMPEKKLRSLNSVY

SEQ ID NO: 4501 - DNA, 3587 bp, DROSOPHILA
taaatttaccaattcttagttagtttttaataagcaacttatagttatacccaaatatgtagtaactattttacttgaatctgttataatgtcctaaaaaaaactcactgagaaagttttctaagtgctgaggaaaaaaaagcaccctgtttttggcgtcgtcctttgcgaataattcccacattgctcgaataaatacgccaagcccatgaaattcagcaaaagcatgcccgaaacatgaacaacagcggcaaaaacgatgaaaagccatccgaggtccttgatatatcgtccatatagccctgtgtgtgcatgtgtgcgtgcgagttggtaaatatgtatgtgtgcgggcgacactaccaccaaagaagctggccaaaaatccatgcatgcgcccaaaaaggcaagtccaaaaaacaagcgaagcgaaaaggaaaccataagcaagcccagcatccccattcctgtccatttctctttctcaaaggactttctccatatggccgctgatgggaaaagtataatggttttgttttacccaaagagaatgccagcaaaattatgcacatcttttgatttataaattatattcaaatagccagcaaatgcccaagtgaaaactcattttggttatactttcgattatatttacactttttcttttaatgatggcatgattaacatattcttctgtctttcctaaatatttcgaaaaatttatttaattttctactactccagcgaaaagttctagcgattcttttgtttctgtgttgatatttttgttatatttatgttttctttttttttttggtattacacgtacatctacctttaagataatatgaatatacagtcgcgaaaaagttattgaaagtgaatacaaaccacgaagctggaaccaacgtgatcagctctctagcgaatataaaaatagggacaacttaatttacagcttagttcagcgacgttgacgaactggtttctcgcggaatgcatcctagtgggtctgattgccgggcactgcgttgacaaccgcctgcgtcacggctttcagagcagccggagcagcaggtgcagctggtgtcggagcaactggatccagcgacgggactgtgggattgtgaaagaaatagagcagaaatccggcggccagcaccacatgtgcactcaggattccaacgatgaggaacagcgagaattgcgagttgcgcagcgctggcgttagcaccgcaatcaaaaccgtgcccgaaagcaaggcggcggtgatcaccaggagccactgcagcagagagatctgcaaaagattggggtaaacatgtggcaattagaaggtagaaaatatataagttcctataaactatgcataatgtctgctcaggtggaaaactaatgaagatagcaaaccagattactgtttaaaactttgaaatatcattgaatctggcattaaagttagcatgagatagttcaaaagttgcagtaaaatgagcagtacagatatagtcaagacacgcaataaaaataagctaatagcaagcattcaagcaaaatcttctgccgaatcacaaaatttatagagaattatcttacattgatcacccagagaatggagactggtatataaatggccaaactgtatccatagatgcacatcagcgacaagaggctcggcatgtagctggcctgcaataaaaaacccgaatatgagcgagatggatggatggatgggaatgccaatgcaacttacgctgtccgtttccacggcatcagcggagtccacaggcttcaggctgtacttgaagagggcccacagaacggctggcaagatattggcatacaagaagatggacgtagccgcataggagaccagatggaagttgtagtgccatttgtacgcatcagtggcttgctgcaaatagctggcaatattaccacttattgctatggaaaagatctgaaatgcaaatggaaagagttagttccacttttggagttgttaaaacttcaaagctaccgaccagggtgacggttatccagaagggtccatatagatccggattctcgccgatgttcatgcgcagatagttgccagaggcccgtttgggtatcatggagttggcgattcgctcgagcaccatataggtgtccacgttgaagaactgctggtagtactcgatcgtaaacagtgatagtttcgcaccaccgcctccaccgccggcggatccgtccagcgatgagttctgcggctgggagccgcccgaggatgcagctccggagaatccctgggccgaggaggtcatgtcatagatgagatccgccagcggatcgccgcgttgacgctgtgcgttggcaccaccaccgccaacggagccgccggaaccagcagagccaccaccagaaccacccgatccgccgtgcgtaggggaattgacattgatttgggccggggcaccgccgctgtagtcgcggaactgcaacaggtcatcggccatgggtgtctccatttagatttcggctcgactagattggtttcgttttgctaattgtaaatattacacgtattttgcacttggcccaaaaaaatatctgctggcagcgatggcttatcggttatcgataggcgtacgaacatcagctggcgactgcattcgtcagctagagatggcagacggcggtggggctgagcagccgaaaatgcctagatttggctatttcaaataagtccacaatattatatgggaatgaaccatattttaaagatgtattcctttaatctaaatatcggaaattacttccatgaccttctatttataatttaatttacgacagagttaatatcattatttttcatcaaacaaaaatattgtaacatttttatatttaaatagttacatgggtaaattccaaatttattttctcttattttagtggtccaggttacttcaaattcaatgatacattaatattttaatgtgtttaacttaatgaataatatttttcgcagatttagctattttgtagccactcagctagatgctccgcttgcgttgaccaacactaaattgcccaacactcttacgtgcggtcatactttttttgatacagcacacagtttagtgtttttccacagagttttccacagtttccacactccccgattgtcgaaagcaaacaaaaaaagatatcgcgcttataccggcggccacctgcagtccattgccgaatcggaatacgccgagaacaaggagaaccgcaaaatccactctgaaatgcccgtgaagaatggcgaatccgatggcgaaggcgacgtttctggcggagaatcggagcactcgaattccagccagccacacgacacctccgacgaggaggaggccaacgaatgcgattcggatgactcctccgagttggatgccagtgaaatagaccgccggcgggcagagcacatcgaggatttgcgtaggaatcagtacgtacacacttaacacaagccatactcatcgagtttcttctttccttgacacagtgagcttggagcgccaatttaacgagttgcgggaacagtactacgtcgagcgcatcaa

SEQ ID NO: 4502 - DNA, 1070 bp, DROSOPHILA
atttttttgggccaagtgcaaaatacgtgtaatatttacaattagcaaaacgaaaccaatctagtcgagccgaaatctaaatggagacacccatggccgatgacctgttgcagttccgcgactacagcggcggtgccccggcccaaatcaatgtcaattcccctacgcacggcggatcgggtggttctggtggtggctctgctggttccggcggctccgttggcggtggtggtgccaacgcacagcgtcaacgcggcgatccgctggcggatctcatctatgacatgacctcctcggcccagggattctccggagctgcatcctcgggcggctcccagccgcagaactcatcgctggacggatccgccggcggtggaggcggtggtgcgaaactatcactgtttacgatcgagtactaccagcagttcttcaacgtggacacctatatggtgctcgagcgaatcgccaactccatgatacccaaacgggcctctggcaactatctgcgcatgaacatcggcgagaatccggatctatatggacccttctggataaccgtcaccctgatcttttccatagcaataagtggtaatattgccagctatttgcagcaagccactgatgcgtacaaatggcactacaacttccatctggtctcctatgcggctacgtccatcttcttgtatgccaatatcttgccagccgttctgtgggccctcttcaagtacagcctgaagcctgtggactccgctgatgccgtggaaacggacagcatctctctgctgcagtggctcctggtgatcaccgccgccttgctttcgggcacggttttgattgcggtgctaacgccagcgctgcgcaactcgcaattctcgctgttcctcatcgttggaatcctgagtgcacatgtggtgctggccgccggatttctgctctatttctttcacaatcccacagtcccgtcgctggatccagttgctccgacaccagctgcacctgctgctccggctgctctgaaagccgtgacgcaggcggttgtcaacgcagtgcccggcaatcagacccactag

SEQ ID NO: 4503 - protein, 329 aa, DROSOPHILA
METPMADDLLQFRDYSGGAPAQINVNSPTHGGSGGSGGGSAGSGGSVGGGGANAQRQRGDPLADLIYDMTSSAQGFSGAASSGGSQPQNSSLDGSAGGGGGGAKLSLFTIEYYQQFFNVDTYMVLERIANSMIPKRASGNYLRMNIGENPDLYGPFWITVTLIFSIAISGNIASYLQQATDAYKWHYNFHLVSYAATSIFLYANILPAVLWALFKYSLKPVDSADAVETDSISLLQWLLVITAALLSGTVLIAVLTPALRNSQFSLFLIVGILSAHVVLAAGFLLYFFHNPTVPSLDPVAPTPAAPAAPAALKAVTQAVVNAVPGNQTH

SEQ ID NO: 4504 - DNA, 4254 bp, DROSOPHILA
ataacaccgcttgggtctcgggtataaataagctatctgccgttgtgttgactgatgtgttggcggatggaggctgtgtttccggaacatccatgctgtccaaggttgtgttgtttaatccgttcttcaggcattccccgaatccgctactgtcgtggacctgaacgaagggtaagcattaagttatgcatcctgtaagaatggtatttggtgcccatacctcatcgtgatcttctccaaactctagcctggcctccacattgccaaagcggagtttcaccttgccggccacggcgttctccatgccgatgtccaccacggtctcctcctggtcgttcacaaagatcttgcccaccagggcagccaggcgcaccacacctcggcgcagtatgcaggctgtggcgtgggccagctccattgactgcccattgaggataggagttattaaaggggaaatgtttaagtaagggccaatttacctcatcggcgatgcttatttccaggcccttctgcctcccaatgcggtaaatggtatccgctttcagaagaatggccggcaaaccgccaaaaaacaggcttacatctgccatcctggcggcagttccttcaaaactgaaggacgaaaaaaaaaaacaagacaataaatggaaacaacaaacgcactgaacggtcacacttgaaatgggcgccaaaaacaggcgatatatacggtagtgttaattacaacagatatgccaaaaggcaaaataagactaacaacgtatattatttttaaaattatatagtgccttgtgaagactagaatatcgagctttagtttttgttttgacacactgaatagtgatataccgatagtccattgttttcgataatcctgcattgccacgtgcacctggcaaccctgtgcatcaccatggcaatcggtggttagtttcacttttgttttgaaacaacaattattgtactataagcatactattaatacagttaaccatgaggcatgagtgataccgatacggacgacaccgatctgctgctcctgataccaccgaacttctgcgcggaggacaaaatgagcgcatgcgcggcggcagatgcgttggccatgcccccgccccctcccccggcgaccacaagtgcagcgtaccagttcctacatcccagcaagaaatcggagctgaatagcatcaattcccggctgcagaacatcgcactggatgcggaggagcctccctcggacatttccaccatatccacgaatactgtaaggaacgctggaaggccaagtagggagctccacggcatggtgcactccacgccgaagagtgggtccgttgagcccctccgccatcgaccactggacgacaacattctgctcgaaatcgaccactacctagacgacaataatgcgcaccgttggcagaggcacgatcaccacctgcatcaccgcagcgacgatcatctgaggaacgagcgggcggggaaagagggtcatccgggaacctcgtctctgcccagcatgaggctggcctcatcatcctccggcgccgtttctgtcgaagcagccagggtcgatcgaagcagcctgaatgagaacaagatcataagtctgagcgagctctggggcaagagcagcttgaccaaaactgtactcgacaacaactcgcccaaccgaccactgtgcagctcttccctaaaagaggaacaactcagaaggcagcatctggagaaaatggtgcacacactgcagtcgcatcttttggagtaccagcagcgaatctcagtggccatcgaggtggatcgttcgaaggatgctgctctcaccgaggcagagcaaacagttcaaagtctcaactacgaggttcagcacctgcgggacgctgtccaccggctggaagcggacaggggcgaatcccagagccggtttgatgcactgcagaacgagttgtcgcaggcggtcaacttggccaccaggtttcaggaaaagaatgataaactcgaaagggagttggaccattgcaggcaagacgccaagcaatgggaagaaagactggagcaactggaaatgcaactcaacagcagcaaaagagcggaggagctgtcacatgccgagctgaataagctaagggataagtttgccaaggtagactaccaacaagaaaaggtaatttaaaaataagatttcaaccacggccactttaaccacatttcttatatataagctaaaagcgcggatagaggaactggagaaggaaaataacacgctgaccaatcaaaaggaaatgctgcaagaatatcatcagaagcagaaagcaagagcggattccttggagagccatcgtaaatccctacaagaaactctggcgaacctaactgaaactgaggttatttaaaaataaatacaaaaaaaaaaagaactcaataataaatgattgttgttttgcagaccaatctcaagaagaagctagatatacagcagaaatccctaaagcaatactaccaacagcaaatggaaaatgttgtggccaagaagatgcaggagttccaggaccaactggacaagaatgaggagcatttaaagaacgaagctcgggagcgtgaacgactcatagccgagcgggcagtaaagcagcttgaaatgatcaatgagaaaaacaaccaggaattgaatctcatccaggaaaagcacaacgaggaggtggagctgtaccgccttcaactagcgaatgcctcgaagaagatcgatgaaatggatctcaagctcagctgttacaaaacaaagcggtaagatatgagagccttatttgttttctggtttaaatagaaatggtttttttttccattccagtgctgatattgcggagaaactgcatggggtaatggaggcccagtggcagcaggcccttgctatcctcaccactcctagtcaaaactccattatccaatccagtgacactgaagccagtgaatctccggagctaaataatgcacgcatgtatccagaaacgcccaaatcgagcaaatcgcagcgcagcaacaacactgagaagaataacctggatgtggtgggcaaacgggatcccccctcgccgatggacaagctgcaggcctacattgaactgctgctcagcaagtcgcccagtgatttcgacaggctcgacgagatcttggccatgacatccaaacagggtagcaaacaaagcaaaccaaagagcggaagtggcaacagtaagcctccaccttggaagtgctgacaacgagagatgctttcgacaagtaatattctatctagtaatacctgtagttttttaagaatgactgcctctttgaatggccgctacaatggacattgtagttgtatatttttctatggaattctgaaagtaaatagtttagtttttgcaaaatatgattgtttatttgataatatcaacaattgaaggcagcgtggcatttgtatgcagcacgggaaaaacaaaggtgaaaattttaaatgtaataataatataaagttttggtacaaaaggtgtattttacagctctatgagacctaagcctaggaatcttgtgatatattaattttgtggctgtcgccagcgaatgttgtattttatatcttttaaaaggatttattctttgattcagctgtttcttagatcgtttatgtgtctgtcattgatatgctttgagttgaattattgagtattttcccattaacattatttgtagacgatttgagggaatttcggggcatttccatagagcccctctgattcccagacttggatatgggactctcgcgttagcaccaccaaatgctgatgggttgagtagcaaatgctgcaagttaagcagggattagattgtattttattcgaatatggagccacttctctcttacctacgaatgggcgatgtacccgtggtcagctcactgacgaagctcaggttccagctggaccagaagcgcacgaatcctccctccacagcagtggctatcacgttgacacccactccttccttgatgtaggagtagcacacggccaggatacgatcctcgtgcaccaggtgctgcacataccgcgcgttcactgagtgcagcctcaaaatggacttgccattgggattcacattcacattgacgaagtcgtctaggttctcctccgttacctcaaagcattcgtcggccacgttcagcgaattaggtctggtcgcaactgccgtgggctttggatccgtactggtgttgcagga

SEQ ID NO: 4505 - DNA, 2070 bp, DROSOPHILA
atgagtgataccgatacggacgacaccgatctgctgctcctgataccaccgaacttctgcgcggaggacaaaatgagcgcatgcgcggcggcagatgcgttggccatgcccccgccccctcccccggcgaccacaagtgcagcgtaccagttcctacatcccagcaagaaatcggagctgaatagcatcaattcccggctgcagaacatcgcactggatgcggaggagcctccctcggacatttccaccatatccacgaatactgtaaggaacgctggaaggccaagtagggagctccacggcatggtgcactccacgccgaagagtgggtccgttgagcccctccgccatcgaccactggacgacaacattctgctcgaaatcgaccactacctagacgacaataatgcgcaccgttggcagaggcacgatcaccacctgcatcaccgcagcgacgatcatctgaggaacgagcgggcggggaaagagggtcatccgggaacctcgtctctgcccagcatgaggctggcctcatcatcctccggcgccgtttctgtcgaagcagccagggtcgatcgaagcagcctgaatgagaacaagatcataagtctgagcgagctctggggcaagagcagcttgaccaaaactgtactcgacaacaactcgcccaaccgaccactgtgcagctcttccctaaaagaggaacaactcagaaggcagcatctggagaaaatggtgcacacactgcagtcgcatcttttggagtaccagcagcgaatctcagtggccatcgaggtggatcgttcgaaggatgctgctctcaccgaggcagagcaaacagttcaaagtctcaactacgaggttcagcacctgcgggacgctgtccaccggctggaagcggacaggggcgaatcccagagccggtttgatgcactgcagaacgagttgtcgcaggcggtcaacttggccaccaggtttcaggaaaagaatgataaactcgaaagggagttggaccattgcaggcaagacgccaagcaatgggaagaaagactggagcaactggaaatgcaactcaacagcagcaaaagagcggaggagctgtcacatgccgagctgaataagctaagggataagtttgccaaggtagactaccaacaagaaaagctaaaagcgcggatagaggaactggagaaggaaaataacacgctgaccaatcaaaaggaaatgctgcaagaatatcatcagaagcagaaagcaagagcggattccttggagagccatcgtaaatccctacaagaaactctggcgaacctaactgaaactgagaccaatctcaagaagaagctagatatacagcagaaatccctaaagcaatactaccaacagcaaatggaaaatgttgtggccaagaagatgcaggagttccaggaccaactggacaagaatgaggagcatttaaagaacgaagctcgggagcgtgaacgactcatagccgagcgggcagtaaagcagcttgaaatgatcaatgagaaaaacaaccaggaattgaatctcatccaggaaaagcacaacgaggaggtggagctgtaccgccttcaactagcgaatgcctcgaagaagatcgatgaaatggatctcaagctcagctgttacaaaacaaagcgtgctgatattgcggagaaactgcatggggtaatggaggcccagtggcagcaggcccttgctatcctcaccactcctagtcaaaactccattatccaatccagtgacactgaagccagtgaatctccggagctaaataatgcacgcatgtatccagaaacgcccaaatcgagcaaatcgcagcgcagcaacaacactgagaagaataacctggatgtggtgggcaaacgggatcccccctcgccgatggacaagctgcaggcctacattgaactgctgctcagcaagtcgcccagtgatttcgacaggctcgacgagatcttggccatgacatccaaacagggtagcaaacaaagcaaaccaaagagcggaagtggcaacagtaagcctccaccttggaagtgctga

SEQ ID NO: 4506 - protein, 689 aa, DROSOPHILA
MSDTDTDDTDLLLLIPPNFCAEDKMSACAAADALAMPPPPPPATTSAAYQFLHPSKKSELNSINSRLQNIALDAEEPPSDISTISTNTVRNAGRPSRELHGMVHSTPKSGSVEPLRHRPLDDNILLEIDHYLDDNNAHRWQRHDHHLHHRSDDHLRNERAGKEGHPGTSSLPSMRLASSSSGAVSVEAARVDRSSLNENKIISLSELWGKSSLTKTVLDNNSPNRPLCSSSLKEEQLRRQHLEKMVHTLQSHLLEYQQRISVAIEVDRSKDAALTEAEQTVQSLNYEVQHLRDAVHRLEADRGESQSRFDALQNELSQAVNLATRFQEKNDKLERELDHCRQDAKQWEERLEQLEMQLNSSKRAEELSHAELNKLRDKFAKVDYQQEKLKARIEELEKENNTLTNQKEMLQEYHQKQKARADSLESHRKSLQETLANLTETETNLKKKLDIQQKSLKQYYQQQMENVVAKKMQEFQDQLDKNEEHLKNEARERERLIAERAVKQLEMINEKNNQELNLIQEKHNEEVELYRLQLANASKKIDEMDLKLSCYKTKRADIAEKLHGVMEAQWQQALAILTTPSQNSIIQSSDTEASESPELNNARMYPETPKSSKSQRSNNTEKNNLDVVGKRDPPSPMDKLQAYIELLLSKSPSDFDRLDEILAMTSKQGSKQSKPKSGSGNSKPPPWKC

SEQ ID NO: 4507 - DNA, 4404 bp, DROSOPHILA
ggaggcgacggaacgaggctcattagctggatgtccatgtcggcctcccagctgcatttcctaggcgcctccggcggataaatctcggggcagtcgagttccatgatgaccagatcggtttgcggacacctctcctcctcagtctcgtagcgccggctcacgtcctgcgtgtgctgcacccggatgtggtccatgaacacggagaactgcaggcagatcgccggacagaaggcgcagttgaagccgaagctctgcacgtccggcgagacggtgatttccccgcacttgcggaagaaagcgtagtcctccagctgccaactgggcgacggcgactcctgcagcggcatcattgctgctgcgctttactggactccacctcttaaggaactttttcaattctcgttatttctcgttattggcgcactcgcgacgcggagactgcacttttccgaaccaacgccgctggctttccgattcaatctgcgatccaaacaaccggcaaatccgaactgcagtgtggccgaggcagtggcagtgtggccatcgctcgatggtggccaaatacaatgcgcttctgttaacgatagtgcaatattttcaaatgaaatgagctgaaatatttgtaggctctttaaagatagttgataacttaacagtaacaacaatttgttaaaaggcgtattgttccacaaaaatagtttttaagtataaaggcatgtgaataatggcgactctaacactcattttcttcaggccccaatgcttcgtaaatttgttttaccttcagtacttaatgttccattatgaatataatcaatcgttcaaattggtttcatataagaatatgaaatatttaaagtttgaaatttgaacagacgcggacatttccaattggacattctctcgtggtttgagtccgcgatagcactgtaggaatttggtatttttggtgggttcccgcggtgtattcgaaaggtacaggcacggtcacgctgagcgcaaataatatctaggcaagcgggcggttaaatagcaaaatagtcaagtaaatgtctaagtttgttcgtttctagttaaattgcggatcatacaccatgggatttgtgttatccaagctgcgggtgcgtataagcagcggcccacggcccgtgggaccccgaacgtagtatacagcgaatatactaagagccccaaaaaatatgtgtcgtgaattcgcgaatctaattatagaaagaaaagtccacggaggcggtgttggaggggctgcagacgcagatccaagcgttggagaagtacatgatcaacaccgaggagcgcaagcgccggttcgtgacgaacttcgtgggcttcaccatcggagcatatatcgtgggcttcgggctctggtggtacttctacttcccgccgaccatgcaggagtgcttcatgtacctggtaccgctgctgctattccccattgtgtgagtgctgccgtctaatccgctctaaatccggttcctgacccacctttttctcgcccgggctctagcatcatctttctgcggcggctgtttacgtggtacttccagcgcaagctcaacaaaaatggcgataagctgactcgtctgaaggaggacaagcgcaagatattggagcaggtcatggacaaagagacctataaggtggggtcacaacttccccttgattacatgcccgagtgcagagtccttatcagagcttagaatattctctttattttcggctaagatgcgtagtgtaaaccatagaaagggcacagctgttttaaagaactcatatcaatgcaaatcagactagaacgcaaaagctatttatcgactttcacaaagtcgagttcgcgcctgtttttatatgcactctgtttagatacttcaaactatatcatgtaccattatgcatttcccaggtggcggtgaatctcctggagcgttttggcgacaagaagcagctccgcatcagcggtctgccgaccggctcaacgcccaaccgcccgcaagttgagcggtctccactgaccgtcgctgccgtcgcacgaacttcatcagccggaggacagcagcagcagcagcgctcgctggctccatacaccagtgtttaccgcaacaataacaacaaccagaacacatcgctgaacagcagcgtcatcagcacacattcactgggacagatgacgtcagcttcgccgcagttgcgcgccgttcaagaattgcgacggcgatcgccttttcccatcgtggacgatcgatcacgaagtgccatcgatcgcattgtggacttcatcgtgggtgacagtccaaaggatcgattcggcatgatctgcaaggcgtgccacgcccacaacggtgggttatgattactaaaggagaacttctataagtagacatagaaacattgcagacatcgtagatgagaaaccggttatgctttcactttcattgtttattttgctagctctatgatccataaaagaaaatgctctacttaaagacaatctttattaacttaagagattcgttttaagtagcatattttaaaagctgcaatgttttataggtttactttcataattttgttgtaaaattttgtactatgcttattcttaaacaaatatgcctcctttacaggaatgctgccgaaggaggagtacgagtacactaccttccggtgtgccttctgcaatgtacttaacccggcaaggaagaagcgacccgtggctccccggctatcccttgaggcaccctcggataccgcaaacaagcgaaacgatagctcagaaagtgaatcatccgacgatgactctggtatatacatttaatccgaaggggagacccgtagtatatagtcattttattggaatttttgtcactaactttcagtgggcttgtctaattattattacttgtagaagttaagttcgcttatcggttatctagcgaaattcatagcaaataactgacgctgaactggatagcaatgacgaaattaacttctactagtaatttgaaaatagtttctccctattatcactgaataccgacctaactgaagtactcatttcgtttttagataaagagccatctgcacgcagagccctgcttcaaaagctgccatctggtggagctgatatggatgccaccgccgaaacggaagacttggcaatggagactgagacaatcgagactggatctgcagcccccagcacagctgaggtggctgccagctcctgagggcacctcgccttttaggcgccagtcaagcaaaattcttggattatttgcttttagcttacttatttaattgtttattggtaagcaaatttgaaaaagaatcatctgttatcatgaatttattgtcgaaaaaaaaaacgaatacattgaatggaatacatttatcctcgagtacgcggcactttctttgggtcacccacctagccgcccgaggtgtgggcggcagcactcccacagctgtcagcatagaaggaaattgataattaaaatctagacgaaataaggcgacaactaatggcataataatttaaagcacgccgcagcgtgtgacaaaaaaggcgaacccgacaaccgacaaccgacatcgctggcgatatcacttggccagcagcgatacatacttacctacaagcccgagaacacacacatgcgactccagactaacactgcattatgcgaacggtcaacaatttcaatttcgctggcttttatttagctttattctgtttttccgggccattgatcaaggctaacgagatcgatcggctggctggctggcctggccgcctggcaatctggcggtgcagcaacataacataacgcattagccggccaacaccagcaccaaaagcgcccacatacacacgaaaaaaatcacacgatattaatattacacttagtatttcaattcgtttaaatatatcgctagttttggaatggcacaggatttagatagtcttcattatataaaacattcagtttaattcttaacttttccatcatttttaatatttactaaccgaattatgcattatatctacatttttaagaaccattattgatttaatcataattttatattgttacatttatttcttcgcggttgattaattagatttgttggcaaaaccaaataccaaatacattgggatttgtaaatttgttattgttagagcattaaattctttaaactctcttcaaagcgagtaaactaacaattgcatagaagtaccctctggatttctcccagtgtacttgtgttcggcaggggcagggagcggattgtgtggattggacggtgccgcgcccgcgcaaattcctgccagcggctggcggcaaacacaaattataagaattaaactaaatctgttacaccgtt

SEQ ID NO: 4508 - DNA, 1417 bp, DROSOPHILA
aaataatatctaggcaagcgggcggttaaatagcaaaatagtcaagtaaatgtctaagtttgttcgtttctagttaaattgcggatcatacaccatgggatttgtgttatccaagctgcggaaagaaaagtccacggaggcggtgttggaggggctgcagacgcagatccaagcgttggagaagtacatgatcaacaccgaggagcgcaagcgccggttcgtgacgaacttcgtgggcttcaccatcggagcatatatcgtgggcttcgggctctggtggtacttctacttcccgccgaccatgcaggagtgcttcatgtacctggtaccgctgctgctattccccattgtcatcatctttctgcggcggctgtttacgtggtacttccagcgcaagctcaacaaaaatggcgataagctgactcgtctgaaggaggacaagcgcaagatattggagcaggtcatggacaaagagacctataaggtggcggtgaatctcctggagcgttttggcgacaagaagcagctccgcatcagcggtctgccgaccggctcaacgcccaaccgcccgcaagttgagcggtctccactgaccgtcgctgccgtcgcacgaacttcatcagccggaggacagcagcagcagcagcgctcgctggctccatacaccagtgtttaccgcaacaataacaacaaccagaacacatcgctgaacagcagcgtcatcagcacacattcactgggacagatgacgtcagcttcgccgcagttgcgcgccgttcaagaattgcgacggcgatcgccttttcccatcgtggacgatcgatcacgaagtgccatcgatcgcattgtggacttcatcgtgggtgacagtccaaaggatcgattcggcatgatctgcaaggcgtgccacgcccacaacggaatgctgccgaaggaggagtacgagtacactaccttccggtgtgccttctgcaatgtacttaacccggcaaggaagaagcgacccgtggctccccggctatcccttgaggcaccctcggataccgcaaacaagcgaaacgatagctcagaaagtgaatcatccgacgatgactctgataaagagccatctgcacgcagagccctgcttcaaaagctgccatctggtggagctgatatggatgccaccgccgaaacggaagacttggcaatggagactgagacaatcgagactggatctgcagcccccagcacagctgaggtggctgccagctcctgagggcacctcgccttttaggcgccagtcaagcaaaattcttggattatttgcttttagcttacttatttaattgtttattggtaagcaaatttgaaaaagaatcatctgttatcatgaatttattgtcgaaaaaaaaaacgaatacattgaatggaatac

SEQ ID NO: 4509 - protein, 387 aa, DROSOPHILA
MGFVLSKLRKEKSTEAVLEGLQTQIQALEKYMINTEERKRRFVTNFVGFTIGAYIVGFGLWWYFYFPPTMQECFMYLVPLLLFPIVIIFLRRLFTWYFQRKLNKNGDKLTRLKEDKRKILEQVMDKETYKVAVNLLERFGDKKQLRISGLPTGSTPNRPQVERSPLTVAAVARTSSAGGQQQQQRSLAPYTSVYRNNNNNQNTSLNSSVISTHSLGQMTSASPQLRAVQELRRRSPFPIVDDRSRSAIDRIVDFIVGDSPKDRFGMICKACHAHNGMLPKEEYEYTTFRCAFCNVLNPARKKRPVAPRLSLEAPSDTANKRNDSSESESSDDDSDKEPSARRALLQKLPSGGADMDATAETEDLAMETETIETGSAAPSTAEVAASS

SEQ ID NO: 4510 - DNA, 3087 bp, DROSOPHILA
atgaatttctaaccttgaggcgtacatattctgtccatttggagttaatttttctcactgcacgatgatgataatggacccggctgcagcctcaatcccgcttcattccagttcaaatatgtcgcttccgtcttgtcattggctttgcaggcagccagtaaggctgctgccgaactgaaatttgccagggcgatatacagacatatacatacatatgggtgtattacggggcataggaaaatcggacgatatggcggacatgtcgggtggcatttaacgggggatgtggaagaaggagatggcacacgcacgggccgaagacccacaaatttattgttcttaaacatctgagagagcccggctcctggtgctcctgctatatttgaatgccaagttgccagttgtcacaatgtgagtgatatatagccaaaatgtcaaatgtcagcgaaagacattattactggctagttgatccgtcctcgttgccaccacttggccccaaaccccgagttactcaaccgcctgctcctcatttgtgcatttgtgtctccgtctacggatgccgccgtctgccaggataatcgatacgcacaagtacacactcacacacatacgccactaacagcccgggcaggatggcacattaaaggattggagttgggctcgcccgtagccaggcatttcgttaaatcgcagttaaagtgcagacccacgatgagatcaacgtggcggatacttaatatcgcgcagtacgtcactttagacgttacaaactataggaaccgttattattgtatatcatatagatagccttggtttgatttaagtatggtagctgctctgaaaaagaggtaccttttaaatcgacttcacaatttttccttaatttttaacagtttctctggctttgatttgttcattcctgacttatttacctttagtaagctattttttcatcgaattagacagagaaccgagcccggaaaaagaaagcagcacaatggaacgactgcgctcctcccaaaaccgcgaagtgcgaatcggcaactataaggtggtgcgcaagatcggctgtggatccttcggcgatatatatctgggcatctatatccacagtggggagcgggtggccatcaaggtggaaagcagcaaggtgcgccatccgcagctcaactacgagaggcgaatctaccgcgccctgaggcccgcccacggtttgccaaggattaggtacttccacaaggaggagcactaccaggcgatggttatggatctgcttggtccctcgctggagagactctttcagttctgcgaaagggcattcaccatcaagaccgttctgcttctggccgaacagatgcttcgccgggtggagtatgtccataaccggggattcctgcaccgcgacatcaagccggataacttcctgatgggtctgggtaccatgtccaagcaagtgtacctcatcgatttcgggctatccaagaagtatctggacataaccactggtgtccatataccatatcgcgaggagcgttccttgacgggaacagccaggtacgcctccattggcgcccatgccggcgtcgaatccgccagaagggatgacatggtggccgttggctatgtccttatgtacttcaatcggggatcactgccgtggcaggatttaaaggcgtccaccaagcagcagaaatatgaacgcatacatgagaaaaagatctcggtaagcattgaggtactttgcgagggatttccctgcgagttcacaatgtacttaaactactgccgcggcatgggattctacgataagcccaactacgacttcatctgccgcatgtttcggatgctgcggaatggtctcaatcttcggccgggtctcatctacgactgggacatgctgatgatgaagttccacaatactcagaaaaatcctggcattggaatgcgtgtatttccacctaaacagaaggaagatgatggtatcagcggtgagccgatcatcaaagatgagaagtgcaacttctggccgtgaaaaatccatagaaatcgtcgagtttcgagtaaattaatagtcgaactaaattaattagtagcctgtaactagaattactcccctcacaactaatcattataaattgcatgcataaataattagtgggagtataaattataacgaaaagttaaataaagtattaaaatataaattgtaagcccttgtataatatttaagtccaacacttaaacacaaccaaagctgcacattctttgattactgtatacatttaagctgcacctttatatcttaaatatttgaatttttgtttccctaagcaaagtttaattggatcaaaaataaatattcgtatttttagacccatctggagcatagaaagtcttcacctcgccttaatccttgaacattacaattccttgctggccatattcattctatgtaaatcgaaccgatgggcttttttcccagcaactatcaactgttgccctttgtttacgcaccgacacaggaaacagtgatttgaagagtggacacacagatggatagcggaccaagtaaaaacggaatcccatttttctcttcgactccgcaaacagatggttcagatgcccacctacatacatacatgtgtacgcacacccacggctaataaaagtggttcggattttccaattcgaaagaggcgacaacgatgggccacgcccactggccaaggatggacgatggacgatggacgacggaggatggagaatagtcgatgggagctgagtgggtggcatcccggcaaatagagcaatttaaattggaacgtgattatgcaaacgtttgcacagcttaactcaagtgccgctccgtgccgctcggccagttggccagttgccgctgctcacacatggctaagagtggtgccgagtggcaaagagtggtgcagccatcgccagaggggggaaaccaaaaaaaaaaaacaaaaaaaaaaggaacagaagtaagccccaacccatccggcagctgcattacaagtcttaaataaattttttaaggccagccggccaccgcacaaaaatccatct

SEQ ID NO: 4511 - DNA, 1087 bp, DROSOPHILA
atggaacgactgcgctcctcccaaaaccgcgaagtgcgaatcggcaactataaggtggtgcgcaagatcggctgtggatccttcggcgatatatatctgggcatctatatccacagtggggagcgggtggccatcaaggtggaaagcagcaaggtgcgccatccgcagctcaactacgagaggcgaatctaccgcgccctgaggcccgcccacggtttgccaaggattaggtacttccacaaggaggagcactaccaggcgatggttatggatctgcttggtccctcgctggagagactctttcagttctgcgaaagggcattcaccatcaagaccgttctgcttctggccgaacagatgcttcgccgggtggagtatgtccataaccggggattcctgcaccgcgacatcaagccggataacttcctgatgggtctgggtaccatgtccaagcaagtgtacctcatcgatttcgggctatccaagaagtatctggacataaccactggtgtccatataccatatcgcgaggagcgttccttgacgggaacagccaggtacgcctccattggcgcccatgccggcgtcgaatccgccagaagggatgacatggtggccgttggctatgtccttatgtacttcaatcggggatcactgccgtggcaggatttaaaggcgtccaccaagcagcagaaatatgaacgcatacatgagaaaaagatctcggtaagcattgaggtactttgcgagggatttccctgcgagttcacaatgtacttaaactactgccgcggcatgggattctacgataagcccaactacgacttcatctgccgcatgtttcggatgctgcggaatggtctcaatcttcggccgggtctcatctacgactgggacatgctgatgatgaagttccacaatactcagaaaaatcctggcattggaatgcgtgtatttccacctaaacagaaggaagatgatggtatcagcggtgagccgatcatcaaagatgagaagtgcaacttctggccgtgaaaaatccatagaaatcgtcgagtttcgagtaaattaatagtcgaactaaatt

SEQ ID NO: 4512 - protein, 344 aa, DROSOPHILA
MERLRSSQNREVRIGNYKVVRKIGCGSFGDIYLGIYIHSGERVAIKVESSKVRHPQLNYERRIYRALRPAHGLPRIRYFHKEEHYQAMVMDLLGPSLERLFQFCERAFTIKTVLLLAEQMLRRVEYVHNRGFLHRDIKPDNFLMGLGTMSKQVYLIDFGLSKKYLDITTGVHIPYREERSLTGTARYASIGAHAGVESARRDDMVAVGYVLMYFNRGSLPWQDLKASTKQQKYERIHEKKISVSIEVLCEGFPCEFTMYLNYCRGMGFYDKPNYDFICRMFRMLRNGLNLRPGLIYDWDMLMMKFHNTQKNPGIGMRVFPPKQKEDDGISGEPIIKDEKCNFWP

SEQ ID NO: 4513 - DNA, 6318 bp, DROSOPHILA
agcaacacactggcacataattcgcaatcagcggtgaattgttgcatgcaataattgcgtgaaatggaggtttatggtggggtggattttgaaaaggtccttgctgcgcaatgattttggagcagtggagagtgtgtggcacaacgcggcagttgtgtataaagcgtaaatatactattttatacagtcgctgcaatgattgtgacactcgtttgcttttgaaaatccatggaatatatacttaaatcaacattttaaacagcttcaatgaccaagttttgtggcaatttaagatgaatgcagttgcgggcaatgatgtaaagttaatgtgttccaacccagaccccaaaacccacctagacatcacccacttttcccccgcttttccacttagtttcttatacaaaacgctgtcatcatcgtcttttgttgttgtctgtttgcaatgcaaagccgttggaaaaaagggggttgggaggtgttgaaataaaaggggatgataccagggagctgtgaggcgtaaggcaagcaaatttatgcaaatccaaagcgattttcaacactaactaaaatgaaacgctttgcaggggcgcacaaaataggggcgtggctgcaggaggcaggatgactagtagtagtagtagtagtagtagcaaattgcacaaaaatacttaagacactcgcttgcagacagaacttacctatgccattttgtatttgtgcatttgcagtgattcaaaaactgaaaaacggggggttttcggttatattcaatggatggagtggtgtagtggggggggggggagtgcagtgaaaactgaggaagggaaaatccagagcagtaaaaacaaacagctgcaggaacttggcgtttagcttaagcaaatgatcaacaaaccaagggaaaatcgagtttggaatgggaatggagcgttaaggaagtgcgaataaatttgatgaccagttaaaaggaatggcccaaggagctgggaatgaataaatgagtcaattatctggcaaggacaacgagagtgtgcgactttttttacgacttttcccagcgttcaagggaaaaggtaatcaaatgtcgagcagatgttttttcagcttttccagccaaccattaggtagtaaataaagttgataagctacgcttgtaaaaaaaaaaagttgcctttaacttgcagtaaagtgcttctttaactcgacgcacattaaaaattaactcgacccatcaaattggcaactctttcttcgtaattaatttgtaaggtgctaaaagtaatttacttttctaataaaaacgctttttcaatacaaaaacatagctaatacatttacaggtcaaatagtgcgaatgcatactatattttatatattttatatgattatatcgtaatatttttttaccccgatttttttcaggatctctgcacgttttggccttggagcactatttaccctcgcacgatgagaacggcgagttccacattcccttcccgccatcgagtgagatatatgtgttcaaccgatatggccagcatgtggccaccaaggatctgacctccggtaagacgcgctatagcttcctgtactcgaagaacaccagtttcggccgattgtcaacggtaactgatgcttccggcaataagattcagttcctgcgcgactacagcaatgtggttagttccatcgagaacacacaggatcacaaatcggagatccagatcaatggcattggcatcatgaccaagctgagcgagaagggtcgccaagagatcgagctggactatgatagtaacacgggtctgctgaattcccgatcctctggcggtgagacatacatctatcagtacgatgagtttggtcgggtcactggcatgatactgcccagcggtgagatcgtaagaattacctcccagctggccgatagccagggtcttacagtgtacgtccatgcctccgtggagtccctattctcgagggaacggatcgccggcgaggccaatgagctgctggttctgggcggagtgcgatccacttttctgaaacgcggacaagcccacgcggatgcggaactgaaggctaacaacaccctagtgattcatggcgataatggcgtggtagtggaggcctctgccgtggccagacacccactgctggaggcagctctgcccgtggaagcggaaatgctggccatgtggtcacatcaaagtgtcaccatgggcgagggactgaccaactcaatgtactccgtctacagtttggtgggcgatgttaggaatccgcagcagacgctcaaccgtgagatttgggtcaaccagtcgcgggtgattggcgtggagttcgatcagttcaccaaccgggagaccttctacgatgcccgacgcaccccgatcctgatagtggcctacgatcagtctggtctgcccaaatcctattacccgaccaatggctatccggtaaacatcacctacgatcgattcaatcgcgtcgagggctgggcctggggtccagcagagctcaagtacagctacgaccgacatggtttgctctcggagattacctcgcagcaggatggcatcgtgtcctttgtgtacaatgactggaatctggtctcagagatcggattggctagccagcgaaagtttgtgctgcagtacgatgatgccggcggcttgaggcatgtggtcctgccctccgggactcgccacagcttcagcatgcagacctcgattggattcatccgctgcacctacacgccgccgggcagcacaagagcttatctgcagcactacagccatgcgggagccctgctccagacgatcctaccgggcgatggagctcgcatcgtatatcgttacaatgccgctggccagttgactgaggtggtccatggcgatggaaggagtgaattccagtacaacgaggccaccggaatgccgagcaccgtttcgcacacggaacgtgaattggagtaccgatgggacttcgagtatgccgctggcttgctggccgaggagaggatcgattatgtggccaaaacgggactgagcaatgccaagtttagctacgagtacgattcccagctgcgagtggtggccctgcagggcaggattggcggtcagagtctgccgacgcaggcctttgcctacgatccgcgcacgggaagacccagcctgattggccagttccgattctcgcagccggcgcagaatcaaacccaactgcatgatggaaccgctagcttcacacggacggtcgatggacgcttccagacgcagcgaatggccctagccatccatcgactggaggtgttccgcatggagttctcttatggagtgcacggcaggatctcccagacgcgcacctacacgcggaacatggcggtgaatagctatacgaatgtgaaaaactacacatgggactgcgatggccagttggtgggcgtggaggcccaggaaccgtggggcttccggtacgacgacaatggcaacctgctgtcgctcacctacagaggtaacacgataccgatggagtataatgcccaggacaggattgtaaagttcggcgaggggcagtacaagtacgatgcgaggggtctggtggcccaaaatgccagagaagagcgattccactacaatacccagggcctgcttgtccgcgcctccaagcggggtcgctttgatgtacgctactactacgatcatctgaagcgtctgaccacgcgaaaggataactttggcaatgtcacccagttcttctacaccaaccagcaacgaccatacgaggtcagccagatatactcgccgcgggatggcaagctaatgtcactgacctacgacgatgtgggtcatctaatctatgcccaggtgtaccgacacaagtactatgtggccacggatcagagtggcactccattgatgctcttcaaccagtatggcgagggcattcgggagataatgcgttcaccattcggtcacattgtctacgattcgaatccatatctgtatttgcccatcgatttctgcggcggcattttggatcaggtgaccacgctggtgcatatgggcgatggtcgagtatatgatccattgattggccagtggatgtcgccggactggcagcgtgttgccgagaggattatcacaccgacgcgactgcatctgtatcgattcaatggcaacgatccgattaatgtcggccacgaacgtcactatccagaggactttgccgcctggatgcgcaccctgggctacaatgtgggcaatctggtgccacaattggcccgggatctgtggcaaccgccagcactttggggccgaccacccgccaatccggtggccctgaatctgcggcgacccttcgataacattcccactatggcggtggagagcggtttcttggctcacctgaacgtgcgccgaatgtcggactttgaacagctgtcggcaccaccgcgttccgccctcaagtgcgatgtgatggacccatcgcccaagacaatcggatccgatacggagccaccgtttggcaagggcattgtcgtctcccgtaccgccgatggccaagccatagtgtccagtgtaccagcagcgaatgccatctaccgtgatgtctacactagtgtattcaatcgttccaaactactgccatttacctttgtggttcacaatgcccagcaggactcgttcttcttcgtgaaggaagatgcctggcgggccaccgaggaccggcagcagttgaagcgcctgcagggtcaggtgaacaccacgttccatgagatcacaagggaggcgactgtgggtagtggaccagcgggagcagccaatggtggtgccggctcctcatcatcctcctcgtcatcatccggtggtggctcgtcctcgaatacgggcaactatctggacgttaagattcacggggcacacgccattattaatctgcgctacggcaccaccgtagccaaggagcagcagcgactgatgcaccatgccaagctgacggcggtgcgaaaggcgtggcaccgcgaaaaggaggcactccgcagcggactgaccacggctctcgagtggagccaacaggagaccgatgagatcctgaagcagagctatgccaataactacgagggtgagtacatccacgatgtgaatctttatccggaactggcggaggatccgtacaacatcaagttcgtgaagaagaagggcgccaccggcggtgcggcgggagtgcccaattcgcgacgacgacgccgcagatccaccgatctaatccaggaggaagaggaggagctccaccgcgaagccgactgttagcttcgtaggaaacccgtaaaaaccagccactaaaacgcgaggagcgcagtgaaaaccgaagaacaggagacataattatttatatttatacatatatatatataaacatatatatatatatatagtacataaatctatgttatcgaaccagttttttgatgtcaaggaacattatatatatatatatacacgtatacataaaatatttttttttattgttagccactagagaaaagtaaagaaagaaaattaatgaaaataaagaaagcgacatgccaacataatcccatgtagctgcatgtacgtttatatatgtgtgtgtgtgtgacgtcagctaagccgcagatacatttacagtacagatacagattacagatacagccgcgtatatagacgaagttatagatatacagatacatatatatatacatcatatatatatactcatcatatatatatatatgtatatataatatatatatataaagataatggatagtatagtgtagtagtcatacgagcataaagcgtaccatacatacagaacatatgtacatgcatactcaccacaataaggggcgcaggaggaaaattagcggggcgggaaatttatgggaatgggcgtatcaaatttttttttgtggtactcgagctttttgagactggcatagttttaaacaaaaccaattgaacggcaactgaccgacggaccttcaggaggtgatcccttggatcttccatttgataccaaccatccaatgtacataagcagaaatggagagagaggtggcgggaacggaaacgaaagtggacattttgagggacaggcccagaccaaaactcacacacacacacatatagacacaccgacggactcactacactagacaaccggttttggggttgtgggagatttttgcttagcgaaagctttctctcgtttgctttgcacagtgtcagctttgaaaattaaatggataacaaaaaaaaaaataaataa

SEQ ID NO: 4514 - DNA, 3910 bp, DROSOPHILA
atgagtcaattatctggcaaggacaacgagagtgtgcgactttttttacgacttttcccagcgttcaagggaaaaggatctctgcacgttttggccttggagcactatttaccctcgcacgatgagaacggcgagttccacattcccttcccgccatcgagtgagatatatgtgttcaaccgatatggccagcatgtggccaccaaggatctgacctccggtaagacgcgctatagcttcctgtactcgaagaacaccagtttcggccgattgtcaacggtaactgatgcttccggcaataagattcagttcctgcgcgactacagcaatgtggttagttccatcgagaacacacaggatcacaaatcggagatccagatcaatggcattggcatcatgaccaagctgagcgagaagggtcgccaagagatcgagctggactatgatagtaacacgggtctgctgaattcccgatcctctggcggtgagacatacatctatcagtacgatgagtttggtcgggtcactggcatgatactgcccagcggtgagatcgtaagaattacctcccagctggccgatagccagggtcttacagtgtacgtccatgcctccgtggagtccctattctcgagggaacggatcgccggcgaggccaatgagctgctggttctgggcggagtgcgatccacttttctgaaacgcggacaagcccacgcggatgcggaactgaaggctaacaacaccctagtgattcatggcgataatggcgtggtagtggaggcctctgccgtggccagacacccactgctggaggcagctctgcccgtggaagcggaaatgctggccatgtggtcacatcaaagtgtcaccatgggcgagggactgaccaactcaatgtactccgtctacagtttggtgggcgatgttaggaatccgcagcagacgctcaaccgtgagatttgggtcaaccagtcgcgggtgattggcgtggagttcgatcagttcaccaaccgggagaccttctacgatgcccgacgcaccccgatcctgatagtggcctacgatcagtctggtctgcccaaatcctattacccgaccaatggctatccggtaaacatcacctacgatcgattcaatcgcgtcgagggctgggcctggggtccagcagagctcaagtacagctacgaccgacatggtttgctctcggagattacctcgcagcaggatggcatcgtgtcctttgtgtacaatgactggaatctggtctcagagatcggattggctagccagcgaaagtttgtgctgcagtacgatgatgccggcggcttgaggcatgtggtcctgccctccgggactcgccacagcttcagcatgcagacctcgattggattcatccgctgcacctacacgccgccgggcagcacaagagcttatctgcagcactacagccatgcgggagccctgctccagacgatcctaccgggcgatggagctcgcatcgtatatcgttacaatgccgctggccagttgactgaggtggtccatggcgatggaaggagtgaattccagtacaacgaggccaccggaatgccgagcaccgtttcgcacacggaacgtgaattggagtaccgatgggacttcgagtatgccgctggcttgctggccgaggagaggatcgattatgtggccaaaacgggactgagcaatgccaagtttagctacgagtacgattcccagctgcgagtggtggccctgcagggcaggattggcggtcagagtctgccgacgcaggcctttgcctacgatccgcgcacgggaagacccagcctgattggccagttccgattctcgcagccggcgcagaatcaaacccaactgcatgatggaaccgctagcttcacacggacggtcgatggacgcttccagacgcagcgaatggccctagccatccatcgactggaggtgttccgcatggagttctcttatggagtgcacggcaggatctcccagacgcgcacctacacgcggaacatggcggtgaatagctatacgaatgtgaaaaactacacatgggactgcgatggccagttggtgggcgtggaggcccaggaaccgtggggcttccggtacgacgacaatggcaacctgctgtcgctcacctacagaggtaacacgataccgatggagtataatgcccaggacaggattgtaaagttcggcgaggggcagtacaagtacgatgcgaggggtctggtggcccaaaatgccagagaagagcgattccactacaatacccagggcctgcttgtccgcgcctccaagcggggtcgctttgatgtacgctactactacgatcatctgaagcgtctgaccacgcgaaaggataactttggcaatgtcacccagttcttctacaccaaccagcaacgaccatacgaggtcagccagatatactcgccgcgggatggcaagctaatgtcactgacctacgacgatgtgggtcatctaatctatgcccaggtgtaccgacacaagtactatgtggccacggatcagagtggcactccattgatgctcttcaaccagtatggcgagggcattcgggagataatgcgttcaccattcggtcacattgtctacgattcgaatccatatctgtatttgcccatcgatttctgcggcggcattttggatcaggtgaccacgctggtgcatatgggcgatggtcgagtatatgatccattgattggccagtggatgtcgccggactggcagcgtgttgccgagaggattatcacaccgacgcgactgcatctgtatcgattcaatggcaacgatccgattaatgtcggccacgaacgtcactatccagaggactttgccgcctggatgcgcaccctgggctacaatgtgggcaatctggtgccacaattggcccgggatctgtggcaaccgccagcactttggggccgaccacccgccaatccggtggccctgaatctgcggcgacccttcgataacattcccactatggcggtggagagcggtttcttggctcacctgaacgtgcgccgaatgtcggactttgaacagctgtcggcaccaccgcgttccgccctcaagtgcgatgtgatggacccatcgcccaagacaatcggatccgatacggagccaccgtttggcaagggcattgtcgtctcccgtaccgccgatggccaagccatagtgtccagtgtaccagcagcgaatgccatctaccgtgatgtctacactagactcgttcttcttcgtgaaggaagatgcctggcgggccaccgaggaccggcagcagttgaagcgcctgcagggtcaggtgaacaccacgttccatgagatcacaagggaggcgactgtgggtagtggaccagcgggagcagccaatggtggtgccggctcctcatcatcctcctcgtcatcatccggtggtggctcgtcctcgaatacgggcaactatctggacgttaagattcacggggcacacgccattattaatctgcgctacggcaccaccgtagccaaggagcagcagcgactgatgcaccatgccaagctgacggcggtgcgaaaggcgtggcaccgcgaaaaggaggcactccgcagcggactgaccacggctctcgagtggagccaacaggagaccgatgagatcctgaagcagagctatgccaataactacgagggtgagtacatccacgatgtgaatctttatccggaactggcggaggatccgtacaacatcaagttcgtgaagaagaagggcgccaccggcggtgcggcgggagtgcccaattcgcgacgacgacgccgcagatccaccgatctaatccaggaggaagaggaggagctccaccgcgaagccgactgttag

SEQ ID NO: 4515 - protein, 1124 aa, DROSOPHILA
MSQLSGKDNESVRLFLRLFPAFKGKGSLHVLALEHYLPSHDENGEFHIPFPPSSEIYVFNRYGQHVATKDLTSGKTRYSFLYSKNTSFGRLSTVTDASGNKIQFLRDYSNVVSSIENTQDHKSEIQINGIGIMTKLSEKGRQEIELDYDSNTGLLNSRSSGGETYIYQYDEFGRVTGMILPSGEIVRITSQLADSQGLTVYVHASVESLFSRERIAGEANELLVLGGVRSTFLKRGQAHADAELKANNTLVIHGDNGVVVEASAVARHPLLEAALPVEAEMLAMWSHQSVTMGEGLTNSMYSVYSLVGDVRNPQQTLNREIWVNQSRVIGVEFDQFTNRETFYDARRTPILIVAYDQSGLPKSYYPTNGYPVNITYDRFNRVEGWAWGPAELKYSYDRHGLLSEITSQQDGIVSFVYNDWNLVSEIGLASQRKFVLQYDDAGGLRHVVLPSGTRHSFSMQTSIGFIRCTYTPPGSTRAYLQHYSHAGALLQTILPGDGARIVYRYNAAGQLTEVVHGDGRSEFQYNEATGMPSTVSHTERELEYRWDFEYAAGLLAEERIDYVAKTGLSNAKFSYEYDSQLRVVALQGRIGGQSLPTQAFAYDPRTGRPSLIGQFRFSQPAQNQTQLHDGTASFTRTVDGRFQTQRMALAIHRLEVFRMEFSYGVHGRISQTRTYTRNMAVNSYTNVKNYTWDCDGQLVGVEAQEPWGFRYDDNGNLLSLTYRGNTIPMEYNAQDRIVKFGEGQYKYDARGLVAQNAREERFHYNTQGLLVRASKRGRFDVRYYYDHLKRLTTRKDNFGNVTQFFYTNQQRPYEVSQIYSPRDGKLMSLTYDDVGHLIYAQVYRHKYYVATDQSGTPLMLFNQYGEGIREIMRSPFGHIVYDSNPYLYLPIDFCGGILDQVTTLVHMGDGRVYDPLIGQWMSPDWQRVAERIITPTRLHLYRFNGNDPINVGHERHYPEDFAAWMRTLGYNVGNLVPQLARDLWQPPALWGRPPANPVALNLRRPFDNIPTMAVESGFLAHLNVRRMSDFEQLSAPPRSALKCDVMDPSPKTIGSDTEPPFGKGIVVSRTADGQAIVSSVPAANAIYRDVYTRLVLLREGRCLAGHRGPAAVEAPAGSGEHHVP

SEQ ID NO: 4516 - DNA, 4583 bp, DROSOPHILA
aattatttgacgagtgtccgagcagaaaattgtcgaacctatgcgagcataaatctcacttcgatgccgatcctattaatcttcgtttgcccctttggacgcccctgcgacagttgattaggtttcgatttgtttgcggcccccgtctttgggtaattaccacgttacagttgactgcatatcgccctagacattttgtttgtttcgcacacaagtcattgggtgcaattaattttcattttcattttcatttccattttccgcctttgtcgtaatttgctctgttgcaacaatttaatgaaatctaattgagtgtgtgcattgggccgataaaaatgaaataactctggtcactgggcgactcctccgcgactcatttgtcacttgcactttcatcgaggcgacgactggagccgctcaattggagtcaataaacgttgggtaaataagccaaaggggcggtatctaaattaataccgattcgatggcagatttacgactttggcaaagagttatacgcgtgtgctcataagttccagtttattatggaaaatacctattccgactggcgaaaaccagtttaagctccttcggtattcttaaatgtacaactctagtcgataagccagatgaaaacattacaaataaatacattgactatatgtttatttaaaacacacgcatatttttggtttcactttcgatgactttgggattcgaattataaaccagttacaagcattgcacgaatggctggctaatcgtctctgattacgacgataagacttacagaacgcaaaaggcaacacttgtagccatttatcagacattcttaaatagcatataaatacattacttacattagtgctagattaacgatatgattggtatatgctagacggcaaaataactttaagtacacggacacacatctaacgccctacgattgctttgtaaatattataaagtgcagagcaaaaacttcgagtggctgaaggttctacttgccgcccgcttgccccacggagctgtgctctcgctttttgtgccatcgaagactggcgaattgtgcaaatcgcttgccgcacgtgccgcacttgtacttcttcaccgccaaatgcagctccgtgtgcttcttgaggttgccgtacgtggtgaaggtcttgccgcacaccgtgcacaggtgcttgcggatcgcccagtgggagttcatgtgatcggtgaagcgattcttctcgtagaacccttttgcacatatcgggcagtggaatgtcgactggttcagatgacggcgtcggtggatgtcgaagaaggaccacgtcttgaaggacttgccgcaaaggtcacatatgtagggtcgctcgccggtgtgggtgcgcaagtggatagccacctccgtggatgtggcaaagcgcttgtcgcattgctcgcaggaataggggaaatcccgacgatgccttctgatgtgcaccgtcagattgcaaggcatctggaaaccctttccgcacagagtgcagatgaagggttgggtgccatcgtgtgcggatcgatgcaccttgtactgatcgcaggtcttgaccaggtccgagcatatatcgcaacgaaaaggaccaagattttggtctaggaactctgccagtttggcatgcagcagcggaatgctgctggagtcttcggactccgtaagtatcttccgtttctgggcggagaattctttgcgcagattgaacaaggtcttttccaactgctccgcagtgtaggaagtgtgaaaggttgtgtttatctcatccaacatttgacccaaagcctgactacgatacgtattcgatcggaagtcgggatggtcaacatcccacagagctgagtagttgtggtaaatctctacaaactgcagttgtttctcagtattgtcaaaacgaattgagctggcatcgatgaacttggtcttctggttgcttcccaccactccgattttctgaaaaatgaataaaacctttagaatatccagatccagaggctatcttatatcgcaaccctttaccttgctgatcttgttgaagatctgctcctgcagtatgggctgcaggaactccatttcatcgtaacaccataacttgggtaggtacaatcccttgtgcttaataaccatgcgcagctccttgcggtaacgtgtcctaagtttttggatctcgttgcagcattcctcgccgctcagctcatagttgagctcctcctgcaactggacggagatgtcgcgaaacagttccgtcttacagcatgtggtgtagtcgtagtgctgcggattccacaggcattcctgcctcttgaaggcatccagaatgaaactcagaacctcgtggtacaaagatgacttgccgcaggaatcagcgtccgtttcgcacgacttttcactctctgtgctctcattggaaatctggaaaagattaataattaatttatcagttaattaatctctacgatcgatctacgataccttggcttccctttcggctcgcctgttttcgatgacacaccgcagaaagtccatcctctcaaagtaccacagacgcgacttgtactttccacccagggcgttcacctttttcagctcgcggcggtatctgcacctcaactcctttagcacagcgaagatctcggctccggagagctgcctgtggcaaatggactccagcggaccggccagatcaccgtaggcactgcgcttggcattgtacttgtagtccggatgccggggattccacagcttttccgtgcgctcgtactccctcagcagacagccaacgaactcgtgattacgttctagctccctgcgacttttctgaaaaaaaataaaatattttataaatatgggatgttacagaaacattacgagattcatataatagaactcataatgactgggtacaatcaaacaacccctagttaattgcctatagacgaacctatcttttcatagtagttataaaataacatattaaactaaaattagttacgccccatcataatatttatttataaccataagtcgcagtatgcagaatattaataactataggagtacgtttaaaagcgcacaaatcaagtggtaaaatgtagtcgaaaaaaaaaaactattatctaacgaaattctttttatggcaggtatttaattgctttcgtgcaatttggttttttaaggcacgaaaattgaactttgatataattatatctaatttatgaatttatttattaatttatcaatcttttatgtctgagctttaaaaactacacccactaattgaaaagaaacttgaatgttttaatcgtattaattgttctgtgcggagatcgaaggtgttccacttaccgattggaaatccgcacagcttgccgtgctgctcgtgggcgaggtgggcggcagtggggtgggcggcgtggcaggtggtgttagttccatagcactcttctccggctgtccagtgggttccgttcccttgtgctcctccaccgcgacctcgtccaccgccccatctttaggttgctcgttttgcgactgacgaagcttgcgctgcattgcctgcatagagtatagagtaagtataaatatttcgcataaataaataaatttgtaacgttgccagtgttgggctctctgcgagataagcgctgcccagccagacgatcttgtccggggtttatcgtggtgctggaaatcgtacacaatcgctggcgctggtaaacaaaaagggaaagtctgcatacatatatgaattcaacattctcgaatttcagcggctattggcctttgtgccgtcgtcattgttcttatcgcacttgcatatggcccgacttccacattcccatacaaaacactcagggacttcaagcttgtacgtatctacatatttggtatttggtgattttcccaagaaacttcactccacacttactgcccgcccatatgtcgtatttgcaacacaattgcagcacattgcccactcatttaggatttgaataactaaagggcagcggttttgccatgtgcacaaaatgggaataagtgggtgtatagggatcgtattgaaataccagattcattttatgtagaaactgcatgctacatacttttgacttctcatcaaagagctaatagaatactgtggcgatttaaatctcattaatatgtgttgacagatgacgcatcccgtaggttatcgtgttctgtggcaaaacccgctgtagtccctaaaatatttgttttgctgctgcttagttcgcggaatggaacccgacctaccctcatactggctcacttcaaaaatgctgtcgataaggtacctggaatgagagtgccctaattaggaattcgcaagacccaaattaaagccaaaacgaacttcgttttcacatgcaaatgttttgttctggcaaacaacagtgcatacggcacccgtatacgattctcagttctaaccggttacaaaatgttaaatgaataaatgtaaaaacaaaatccgcgcagacagacgaagcgtgatataccccaccaggctaatttctcaaaataaaaccaattcgaaatg

SEQ ID NO: 4517 - DNA, 1929 bp, DROSOPHILA
atgcaggcaatgcagcgcaagcttcgtcagtcgcaaaacgagcaacctaaagatggggcggtggacgaggtcgcggtggaggagcacaagggaacggaacccactggacagccggagaagagtgctatggaactaacaccacctgccacgccgcccaccccactgccgcccacctcgcccacgagcagcacggcaagctgtgcggatttccaatcgaaaagtcgcagggagctagaacgtaatcacgagttcgttggctgtctgctgagggagtacgagcgcacggaaaagctgtggaatccccggcatccggactacaagtacaatgccaagcgcagtgcctacggtgatctggccggtccgctggagtccatttgccacaggcagctctccggagccgagatcttcgctgtgctaaaggagttgaggtgcagataccgccgcgagctgaaaaaggtgaacgccctgggtggaaagtacaagtcgcgtctgtggtactttgagaggatggactttctgcggtgtgtcatcgaaaacaggcgagccgaaagggaagccaagatttccaatgagagcacagagagtgaaaagtcgtgcgaaacggacgctgattcctgcggcaagtcatctttgtaccacgaggttctgagtttcattctggatgccttcaagaggcaggaatgcctgtggaatccgcagcactacgactacaccacatgctgtaagacggaactgtttcgcgacatctccgtccagttgcaggaggagctcaactatgagctgagcggcgaggaatgctgcaacgagatccaaaaacttaggacacgttaccgcaaggagctgcgcatggttattaagcacaagggattgtacctacccaagttatggtgttacgatgaaatggagttcctgcagcccatactgcaggagcagatcttcaacaagatcagcaagaaaatcggagtggtgggaagcaaccagaagaccaagttcatcgatgccagctcaattcgttttgacaatactgagaaacaactgcagtttgtagagatttaccacaactactcagctctgtgggatgttgaccatcccgacttccgatcgaatacgtatcgtagtcaggctttgggtcaaatgttggatgagataaacacaacctttcacacttcctacactgcggagcagttggaaaagaccttgttcaatctgcgcaaagaattctccgcccagaaacggaagatacttacggagtccgaagactccagcagcattccgctgctgcatgccaaactggcagagttcctagaccaaaatcttggtccttttcgttgcgatatatgctcggacctggtcaagacctgcgatcagtacaaggtgcatcgatccgcacacgatggcacccaacccttcatctgcactctgtgcggaaagggtttccagatgccttgcaatctgacggtgcacatcagaaggcatcgtcgggatttcccctattcctgcgagcaatgcgacaagcgctttgccacatccacggaggtggctatccacttgcgcacccacaccggcgagcgaccctacatatgtgacctttgcggcaagtccttcaagacgtggtccttcttcgacatccaccgacgccgtcatctgaaccagtcgacattccactgcccgatatgtgcaaaagggttctacgagaagaatcgcttcaccgatcacatgaactcccactgggcgatccgcaagcacctgtgcacggtgtgcggcaagaccttcaccacgtacggcaacctcaagaagcacacggagctgcatttggcggtgaagaagtacaagtgcggcacgtgcggcaagcgatttgcacaattcgccagtcttcgatggcacaaaaagcgagagcacagctccgtggggcaagcgggcggcaagtag

SEQ ID NO: 4518 - protein, 642 aa, DROSOPHILA
MQAMQRKLRQSQNEQPKDGAVDEVAVEEHKGTEPTGQPEKSAMELTPPATPPTPLPPTSPTSSTASCADFQSKSRRELERNHEFVGCLLREYERTEKLWNPRHPDYKYNAKRSAYGDLAGPLESICHRQLSGAEIFAVLKELRCRYRRELKKVNALGGKYKSRLWYFERMDFLRCVIENRRAEREAKISNESTESEKSCETDADSCGKSSLYHEVLSFILDAFKRQECLWNPQHYDYTTCCKTELFRDISVQLQEELNYELSGEECCNEIQKLRTRYRKELRMVIKHKGLYLPKLWCYDEMEFLQPILQEQIFNKISKKIGVVGSNQKTKFIDASSIRFDNTEKQLQFVEIYHNYSALWDVDHPDFRSNTYRSQALGQMLDEINTTFHTSYTAEQLEKTLFNLRKEFSAQKRKILTESEDSSSIPLLHAKLAEFLDQNLGPFRCDICSDLVKTCDQYKVHRSAHDGTQPFICTLCGKGFQMPCNLTVHIRRHRRDFPYSCEQCDKRFATSTEVAIHLRTHTGERPYICDLCGKSFKTWSFFDIHRRRHLNQSTFHCPICAKGFYEKNRFTDHMNSHWAIRKHLCTVCGKTFTTYGNLKKHTELHLAVKKYKCGTCGKRFAQFASLRWHKKREHSSVGQAGGK

SEQ ID NO: 4519 - DNA, 9400 bp, DROSOPHILA
cagttagttcctagttaacaagtgaggtttggttgaaatctttctttgctatataggtatttcatttccgtatgctgtatcggttttgtaaaataataaagcatttcgcgagctctctctctctctgtatctcaaaaatataaagtaaatgcccctatgtgtgtgcttaaagcatctagattgatgaaaatgtacacttcaaatgcttcgctctggtttgcttacaacgtagctgaaatgcagcaacaaaatggcaatgtattatttccctttacttcttatattcctcttgattcgcagttggaaggaattttagttgtataggtggaaaacggcagctggatagcaagaaatgacaatctttcaaaacgtaggatatctttttggtttatgaaacacaaaacaaatcttaagcctgtgtgtatatatatatatatcttacgagcataatcagcgtaaatcaaaaacaattgatttcttacaaaatacataaaacataattcgcctgaattctatatatcatgtacatacagttcctagatcttatacatatacctacatccatatatatatacttgattttctggttgtttaaattagtttttaagtatttaaaaatggcatgtggtgacatgtattacaatacatcatacatatatggtacatacatttatatttaatatcgatttccaagttggtataaaatgcatgcaagtcgaagggcccgattccaattccaattccaaccccccatcgctcgagttttggttaagcttgcacggcaccgcaggggtatggatgtgccctatggtctaggttttagttatttcatatacatttataaagttttgggattttcgaatcactgcacgtatagcatgacagcatgttgtttcacacaatgctccatatttcgactaacgactaatactaggtatagctagagatcctaagctacaatttttgcctaagactgttccgggggagttgcgttaactgatcacttagccagtggttccagataacatcgcaccgtgttgttctcatcgagcatggccgacaggtggcgctgctgatggtgcggaggatgctgatggggatgcggatgggttagctggtggggatgcggattgggattgctgtgtgatgtatgcgacgacgatgatgtggtggactgtggtgacagtttctgtagctgctggcgcttctgcgcgggcgtctgattcgccggcggcagcggtggtcccgagttgccgtgaccgaatagctcatttaccgccaaacggccgcctggcgacttggcattcagtgcttgctgctgctgctgccggaatgcgccacgcagggagccctcaccaacgccgccgctaaccccaaaaaccgcaccgttgtgctcgggttgcggtcctgctcctggtggcaaagccccgtagtcaagaggcgctccatgtttgcgcagctgacgtctgtaaaggggataaatgtaattttttcgtaacgttgatatagtcaaacattagaagtacttactgaaaccgccgcttaaaatcctcgtcctgcatcgccatcagacgacgcatccgctcatcgctctgcggtggcaatccatgagcatcatcctccaagtcgctctcgtcctcctcctcatcctcatcacagacgctgtcgtgcaattgctccgcggccgttgcctcctcatcctcctcctcgtcttcgtcgtcatcgtcatccgccgtgcagcgtcgagccgatctttgctgagccagcgactgttgttgctgctgcttcttgagctgctgctgttggctcctggacgagacactgccgccactcaggcttccgccgccgtaccgactaccgccggcggccaccgccgctctcatgttgttgaagacgccagtgccaacgctattgttgtacacctcgtccacatcgaagtcacccacctcgtaatgctgcacatccgagttgcggttgctgaggatctcctcgtagaccggcccaccatccgcgccgccgacgctgccttggttgtagtaggcatcgcccatgcccagatcacagttggaatgcttatttctatactggcgctgcataaactcctgctggtactgcgccatgtgtggcggtggagcagggagctgctgctggctaccagctcgtcgttgcaggtgcaacaggtgagcatgttgctcggcctgctcctcgtccgaggagagttgctgctgctgctgctgttgctgctgctgatgtagctgctggcgacgcaactgttgctgctgctggtagtaggcagccgcattgccagtggctagtggtgggtccaacgcctccgcgtattgcggatagcctgttggctggccaggcttggtcttcttgtacgatggatagaaaagcacctgggaggcggcggccgtgcgactgtgcagagatccactaggcgaggcgggaactcctccggcgcccctcttctttttgccattgtggccgctgttcggcttttgagtccagtagaatacctcgtgcgcctgttgcggcgatgatgcagcagcacccgcattattgtagtactcccgcggtgttttcaatcctcctgttccagttgatggttgcttccagctgtagtagtccggctgatggtagtaagactcgcccaaaggtccctgttgctgctgttgttgttgttgcttgtgcgcaaaaatcaggtgtgtggacccggcagagctggtgggtgaggcatgaccagtggagcggagagtgctacctctttcgagcacaacatggccaccaagggtctgcggtggagcctgtagtgtgcccgtcattaggccactttttagggttcttctttgctgggcctcgttcagttcacaatcagaggtggctcccataatggcatcctctgtgatgggcactggtgtctgctgttgctgctggggatcgtcatgcgcctcttcgctcactcctaacggcagcttgggcttcttggacgtggagacgctgcaaagggttccggctgtgggtccattgccggtaacaatgcccgaggaaattgatgttttcgagcagcgcaagcacttgggcagccaagcgtgctgtctcacatacttccgatactcccgccggatcttttcgttttgaatgcaatggaacacgaagatatagagccccagcaatgtgttgaagcagatgaagcagtatccatacacatcagccgtgtcatcgtccattttggctcctcgcaaatagaagtaggccgagcaccaaacagcgctgagcagcaagaggaacacaaaggagcagcgtatgtcgaacctaggatttgaggtacatgggcatcgaaggatctttaaagtgtatatggattttcaatatcttaccgcacgctagcgaggcgagtatgttccttggtctttagacccgtgcgacttttgcggcacattataatccaggagaggaatgtgtaaccaatggcagcctgtaaaagtgaattaatttaaaatggtaactgcgcttttgaagcttcatctcatattatgtaacttaccacaaagaagacaagcactggtattacaaaggtggcataaaacaaggcattcgcctccatcagcacgcaataatcgttttgggtataggtgctgggatcgatgaccagcgagatggccaccacgctcagcgacagtccgtaggacaagaggtagtagcagttcaccttgggcgtctggtccacctccagcaggagctcgtccgaggtgagcgttgagtacgaatggaaggctgcagaggcaaagggttagggctgcaaagtgtagatgaaattcggccttcttaccttcgtaacagaaccaggcggtgcccgataggatggcacagtgtaggaaaatagtaatgaagccgcagaaaatgcttgtttcggtctgttcaatgcccaggagaaagagcagctcgatggccaggaggcaaaggtaaatgctggtatagatcgaggtgcgcgcggactggagtggacagttaaagagaagacagagtgaaaagttaatataagttcgagaagtcagtgcaaattttttctttaagcagcaccagcagaaggaccctaaagattcgatcatcagggagcttttagacattttaaggaaattgataatcttaaacgttttgaagaataggtgtcagatttgatagtcaaacttaatttagaacttgatttacaataattttggtgggtggtggtgaaaatccaaagactaagagtaatacgaatacgaataaaacaatgaacagaacacgaaacaagcacaacacataggtaatatacatacaaactaaatgaacaaacacaaaatgcaatatttacaggacaaaattagcaacatttgtatattttattaattaatgaaatacaaaagaaagtcagaagtgttctaggtatttagttgtacgatgtctatgttaaatttgttaaacaatcaatgcacataaaaggggttatggtatttcaaaaatgattaaacgattaagtaaaacatgccagagtgatgatttgtaacaaaaagaaaaatgagtctatcatatgaagatatttcattattggttttgtgtgctaatcttaagctatgacaaattactacgatacataaatataaatgggagtcttcgcgtgcaagctgttactgggacgcaacagtgatcatcgctgcccagcacagcttttgagtcttatctttgaatcctgccagagagaggttcattaacaatttaagttacttaagcattatatcacatgtgtctctcggtcataaatacatatgtctagaaagcctagcctagcctaaaattgtgtttatctgttttttcaccaccaccaccacttatattgtaagtcgtccatgttggcctgcataatgatgttgttcgtgttatccaatccattgccgtccacattaaggttgtgattgcggtgcggatgtggctgcggctgctggccacgctgctgctgctgctgctgctggacatgctgctgctgcagatagttgtggctgatgttgaggttattgctggcgttgctggcctgaactgcatgttgctgcagtgcagcggctattgaggcagcagcagctgcagcagcagccgtctgctgaccgtgctgatgcagattcagattcaagttgttcatggcatgttgcatatttcgctgcggctgattggacagcacaacagcagcagcagctgccgcaacaacttgttgttgctgttgctgctgctgctgttggacattgtagttcagattgttgcggtgtgagttgcggatggaattgtgttggataaagttcgtgttcccatgactgggcggcggcacattggactgactggttggcgtggtcagggtcaaggactcgtgggtctggtcgcgaatattgttttgctggcgtctgctgcccgaccgctgatgcggcaagggattggagccgtttcttaccttcacaaagaccccattgaacagcttcagcgttagcagggcgataactatgaagaccacgcagatgccgatgcttatgtagatgaatatgcgcatgtttccatcgaacatggtgaacaacgaatgctggtgctcatccacaacgtccattagtatggcaaagtttgtcaggtggttgcaactgcagacgctgtgcgtgcggttagtggactccagactgcatccgttggcagaccacgcactaaaacaaaaacattaattcgtataaattattaggcatatgagcatatgagtcttactggtcaatatagttccagaacacgcaggtgggattcgttacattctcggtcttcagatgtttcagtgtcagggttatgggctgggagagttgtatgtgacgccccttgcccaagctggccgagatcaccttgctgttcaggatgcgtaggcgctgttggatctcccccgcgttgacatcgctgtcgttgctcaggatggctgtattgcgaactaagaaaacatttagattatactattctaacgtttttcagttctctgtggacttaccgtaactgcgggagctcttgagatcgaagtgatcatagctgggctttagaatggattccaggcgatcgaaggcggcgaatacaattcgcaccagaccgccttcactattatctattagagcagctcgtggcagctcaatacgatccgaactcaagggccactgatccgaatctgggaagaccacgctggactggatagtcttggtttccagaactcgaacggagagcactatggtgatatacagttataagtattttgaaatgcaaacaatgcaaacatttagaactcacatatatttttgactttttgcaccacgctgcgctccctgatgatcgtatccgccagcagaaaggcattgtattccaggccagttagcaaggatgtggctacacgcatttggtcctccggattgagatccaaccacgaggacagctgcgattcgtccagcaggttggagccggttttgaccacacaatgcaacaactccatgatcatagcctcgcgctgtcgctgatccgggaaggtctccttgtcgtgcatcatcttctcggacactgtttggataatcttcgtggtgaccaacatgtcgccgccgtagagcgttttgctactggtcacttcggacatatcgttggcgatggagatcaaggaggagtcccgctggtttactcgcatttccagattgttgagccaaaggctgcggcattgcgtcagatcaggtgtcgcgggatgccaggtgggctcaaagttgcgcagacgctggtttaccttgtgggccatgctcaccggcggctcgcagctgctgctgttgtgcagacagtcgccaccgctgggtgccggagttgtcgaactgatgtcatcatcgtactcatcgtagccggagtcgggtatcctcttcattagaacgcaacgccacttggcgatgccggctgctccgccaggacagggctgaacattcacatcacccactcgagtcatgttccagtacaaattgcgggcatgagtggggccgcaaaacaacttggactcatcatcgcctccggacatcccggctgcgttcaaattaatattgttgatggtgcgcaccacgctgccgttcccggggacaacggatccactggccgcagtgcccggtgggcggttgggtgagctctttgtggtcagtagggttccgtcatcagttccggaacctccgacgcccgtgagtatcctcgtgttggatggtgaagtggcattaccgccagccggcagcttgctgctcggcttggtgggtgaggcagtgtcttcaccgtggtggttgtggtggtggtgcagttgcggcggcggtggcagaccatcatggcggccagccggatgcttggtggtcgtcgtggaggtggccccacccttcaaacgtccaccgcccacggctgtcgtgctgctcgagggcgtggagtgcgtgacggcggtgtgttgcggtggtacgttgaacaggccgggattcccactgattcccaccactccgggaagtgtgggaagtctcggcgggggcggcgcacccgctccaaccccgggcggatggatcagtccactgccgttgccaaagatcggcggaccattgctcagcacccatggcggcggactgggcctgttggtcgtcgtcgaagtttgggctgcacttatgcactggtagtgtgcctccagatacttgtgggtaccgggacagggatccccgaacatgctcgtggctgccaacacgccgcagctctgcttgtgggcacatctggaaaatgggaaaaatacgcgttcatcagtaaacagagttgggtaattttcacatatttaagatgcttgattgattgacttgtgttgaaatagtttattgatattcgcaaccagagtatgaaatttccaaatgacatgtttaatgatttgaagatccaataaactttaaaagatgtattaccttgagttcagtacgctgagtgacttgggaaacatgcagttaacactccactccacattcccgtggtcattgcagatggtaatcgagaagcggccatagttggcccgaatgaggttgatcacatcgccgggatcgcactcgatggtcagtttcttaccttcgcaggcgtaggcggtttggtacttggacactgaaaggcgaaggcttcataagtcacagggtgctgggcagggtatgggtttatatggacatggtatatatatatggcatataaaaagaaattttttggttagcggcgatgattgttgtagtttggtttggtttggattggattgttggtgggcctgcaaagacacttacgatctaacgatatatgctcataggatattgacaatatggttggtagcatgatacgcttttacactgcctgggatatacttagtaatgctgaggttgatggtggagtatgtgggtcgttagcttggtagcaagtgcaatagtagtcataaataccaaatcctgccggcccagatcacgaatcatcgatcgtccatcattggttcttatcggcaatgctcattcggcagtgtttcactcggtttgaagtattcaaactgaaagggaagataacatttataatgtttggtattattattattattattttaaggcacataactaataacttaagacatgttgtatttcgttagaaaggaaaaggagaactatccttttcttttattgatattggttccatttaatttacttgtgcaatatcacatcaatgttgagtcaatctaatgacctggttacagtaaatatcaaaagtgtagattctaataaatttaagttattttaatattcagaacctctttgtataactcctattaaaacactatataagcaatgcaaatatcaagaaaacataattaattgtaagaattataaattgcatttatatatctttaataattaaaatggtcttatatttatgtatgatgatatccaggccaagcacacctatgtacatatgtacatacctcttatgtatttccgtttggagtcatattcatgaaagttggactcaaaagtaccattcaacttatgtatctgaaaggtagagaatccattagataattgtttacatattgactccttgggcaaacacgaacaagcaggcaaaagacaaatagaagataagaagatggcatggggcaggggagggggtagggtagggagctaagaatacacacccttctgtgtacacccacactgtggttgtagttgttgcatggccatcgattcgtggacagaacaaagacccgttttctttgtacacccgatgcacactattcacgaacatatatgcatgtggatgtaaatgtagagaaaagttgctgcagctgcgc

SEQ ID NO: 4520 - DNA, 5718 bp, DROSOPHILA
atgctaccaaccatattgtcaatatcctatgagcatatatcgttagatctgtccaagtaccaaaccgcctacgcctgcgaaggtaagaaactgaccatcgagtgcgatcccggcgatgtgatcaacctcattcgggccaactatggccgcttctcgattaccatctgcaatgaccacgggaatgtggagtggagtgttaactgcatgtttcccaagtcactcagcgtactgaactcaagatgtgcccacaagcagagctgcggcgtgttggcagccacgagcatgttcggggatccctgtcccggtacccacaagtatctggaggcacactaccagtgcataagtgcagcccaaacttcgacgacgaccaacaggcccagtccgccgccatgggtgctgagcaatggtccgccgatctttggcaacggcagtggactgatccatccgcccggggttggagcgggtgcgccgcccccgccgagacttcccacacttcccggagtggtgggaatcagtgggaatcccggcctgttcaacgtaccaccgcaacacaccgccgtcacgcactccacgccctcgagcagcacgacagccgtgggcggtggacgtttgaagggtggggccacctccacgacgaccaccaagcatccggctggccgccatgatggtctgccaccgccgccgcaactgcaccaccaccacaaccaccacggtgaagacactgcctcacccaccaagccgagcagcaagctgccggctggcggtaatgccacttcaccatccaacacgaggatactcacgggcgtcggaggttccggaactgatgacggaaccctactgaccacaaagagctcacccaaccgcccaccgggcactgcggccagtggatccgttgtccccgggaacggcagcgtggtgcgcaccatcaacaatattaatttgaacgcagccgggatgtccggaggcgatgatgagtccaagttgttttgcggccccactcatgcccgcaatttgtactggaacatgactcgagtgggtgatgtgaatgttcagccctgtcctggcggagcagccggcatcgccaagtggcgttgcgttctaatgaagaggatacccgactccggctacgatgagtacgatgatgacatcagttcgacaactccggcacccagcggtggcgactgtctgcacaacagcagcagctgcgagccgccggtgagcatggcccacaaggtaaaccagcgtctgcgcaactttgagcccacctggcatcccgcgacacctgatctgacgcaatgccgcagcctttggctcaacaatctggaaatgcgagtaaaccagcgggactcctccttgatctccatcgccaacgatatgtccgaagtgaccagtagcaaaacgctctacggcggcgacatgttggtcaccacgaagattatccaaacagtgtccgagaagatgatgcacgacaaggagaccttcccggatcagcgacagcgcgaggctatgatcatggagttgttgcattgtgtggtcaaaaccggctccaacctgctggacgaatcgcagctgtcctcgtggttggatctcaatccggaggaccaaatgcgtgtagccacatccttgctaactggcctggaatacaatgcctttctgctggcggatacgatcatcagggagcgcagcgtggtgcaaaaagtcaaaaatatattgctctccgttcgagttctggaaaccaagactatccagtccagcgtggtcttcccagattcggatcagtggcccttgagttcggatcgtattgagctgccacgagctgctctaatagataatagtgaaggcggtctggtgcgaattgtattcgccgccttcgatcgcctggaatccattctaaagcccagctatgatcacttcgatctcaagagctcccgcagttacgccatcctgagcaacgacagcgatgtcaacgcgggggagatccaacagcgcctacgcatcctgaacagcaaggtgatctcggccagcttgggcaaggggcgtcacatacaactctcccagcccataaccctgacactgaaacatctgaagaccgagaatgtaacgaatcccacctgcgtgttctggaactatattgaccatgcgtggtctgccaacggatgcagtctggagtccactaaccgcacgcacagcgtctgcagttgcaaccacctgacaaactttgccatactaatggacgttgtggatgagcaccagcattcgttgttcaccatgttcgatggaaacatgcgcatattcatctacataagcatcggcatctgcgtggtcttcatagttatcgccctgctaacgctgaagctgttcaatggggtctttgtgaaggtaagaaacggctccaatcccttgccgcatcagcggtcgggcagcagacgccagcaaaacaatattcgcgaccagacccacgagtccttgaccctgaccacgccaaccagtcagtccaatgtgccgccgcccagtcatgggaacacgaactttatccaacacaattccatccgcaactcacaccgcaacaatctgaactacaatgtccaacagcagcagcagcaacagcaacaacaagttgttgcggcagctgctgctgctgttgtgctgtccaatcagccgcagcgaaatatgcaacatgccatgaacaacttgaatctgaatctgcatcagcacggtcagcagacggctgctgctgcagctgctgctgcctcaatagccgctgcactgcagcaacatgcagttcaggccagcaacgccagcaataacctcaacatcagccacaactatctgcagcagcagcatgtccagcagcagcagcagcagcagcgtggccagcagccgcagccacatccgcaccgcaatcacaaccttaatgtggacggcaatggattggataacacgaacaacatcattatgcaggccaacatggacgacttacaatataagtggtggtggtgcatttacctttgcctcctggccatcgagctgctctttctcctgggcattgaacagaccgaaacaagcattttctgcggcttcattactattttcctacactgtgccatcctatcgggcaccgcctggttctgttacgaagccttccattcgtactcaacgctcacctcggacgagctcctgctggaggtggaccagacgcccaaggtgaactgctactacctcttgtcctacggactgtcgctgagcgtggtggccatctcgctggtcatcgatcccagcacctatacccaaaacgattattgcgtgctgatggaggcgaatgccttgttttatgccacctttgtaataccagtgcttgtcttctttgtggctgccattggttacacattcctctcctggattataatgtgccgcaaaagtcgcacgggtctaaagaccaaggaacatactcgcctcgctagcgtgcggttcgacatacgctgctcctttgtgttcctcttgctgctcagcgctgtttggtgctcggcctacttctatttgcgaggagccaaaatggacgatgacacggctgatgtgtatggatactgcttcatctgcttcaacacattgctggggctctatatcttcgtgttccattgcattcaaaacgaaaagatccggcgggagtatcggaagtatgtgagacagcacgcttggctgcccaagtgcttgcgctgctcgaaaacatcaatttcctcgggcattgttaccggcaatggacccacagccggaaccctttgcagcgtctccacgtccaagaagcccaagctgccgttaggagtgagcgaagaggcgcatgacgatccccagcagcaacagcagacaccagtgcccatcacagaggatgccattatgggagccacctctgattgtgaactgaacgaggcccagcaaagaagaaccctaaaaagtggcctaatgacgggcacactacaggctccaccgcagacccttggtggccatgttgtgctcgaaagaggtagcactctccgctccactggtcatgcctcacccaccagctctgccgggtccacacacctgatttttgcgcacaagcaacaacaacaacagcagcaacagggacctttgggcgagtcttactaccatcagccggactactacagctggaagcaaccatcaactggaacaggaggattgaaaacaccgcgggagtactacaataatgcgggtgctgctgcatcatcgccgcaacaggcgcacgaggtattctactggactcaaaagccgaacagcggccacaatggcaaaaagaagaggggcgccggaggagttcccgcctcgcctagtggatctctgcacagtcgcacggccgccgcctcccaggtgcttttctatccatcgtacaagaagaccaagcctggccagccaacaggctatccgcaatacgcggaggcgttggacccaccactagccactggcaatgcggctgcctactaccagcagcagcaacagttgcgtcgccagcagctacatcagcagcagcaacagcagcagcagcagcaactctcctcggacgaggagcaggccgagcaacatgctcacctgttgcacctgcaacgacgagctggtagccagcagcagctccctgctccaccgccacacatggcgcagtaccagcaggagtttatgcagcgccagtatagaaataagcattccaactgtgatctgggcatgggcgatgcctactacaaccaaggcagcgtcggcggcgcggatggtgggccggtctacgaggagatcctcagcaaccgcaactcggatgtgcagcattacgaggtgggtgacttcgatgtggacgaggtgtacaacaatagcgttggcactggcgtcttcaacaacatgagagcggcggtggccgccggcggtagtcggtacggcggcggaagcctgagtggcggcagtgtctcgtccaggagccaacagcagcagctcaagaagcagcagcaacaacagtcgctggctcagcaaagatcggctcgacgctgcacggcggatgacgatgacgacgaagacgaggaggaggatgaggaggcaacggccgcggagcaattgcacgacagcgtctgtgatgaggatgaggaggaggacgagagcgacttggaggatgatgctcatggattgccaccgcagagcgatgagcggatgcgtcgtctgatggcgatgcaggacgaggattttaagcggcggtttcaacgtcagctgcgcaaacatggagcgcctcttgactacggggctttgccaccaggagcaggaccgcaacccgagcacaacggtgcggtttttggggttagcggcggcgttggtgagggctccctgcgtggcgcattccggcagcagcagcagcaagcactgaatgccaagtcgccaggcggccgtttggcggtaaatgagctattcggtcacggcaactcgggaccaccgctgccgccggcgaatcagacgcccgcgcagaagcgccagcagctacagaaactgtcaccacagtccaccacatcatcgtcgtcgcatacatcacacagcaatcccaatccgcatccccaccagctaacccatccgcatccccatcagcatcctccgcaccatcagcagcgccacctgtcggccatgctcgatgagaacaacacggtgcgatgttatctggaaccactggctaagtga

SEQ ID NO: 4521 - protein, 1905 aa, DROSOPHILA
MLPTILSISYEHISLDLSKYQTAYACEGKKLTIECDPGDVINLIRANYGRFSITICNDHGNVEWSVNCMFPKSLSVLNSRCAHKQSCGVLAATSMFGDPCPGTHKYLEAHYQCISAAQTSTTTNRPSPPPWVLSNGPPIFGNGSGLIHPPGVGAGAPPPPRLPTLPGVVGISGNPGLFNVPPQHTAVTHSTPSSSTTAVGGGRLKGGATSTTTTKHPAGRHDGLPPPPQLHHHHNHHGEDTASPTKPSSKLPAGGNATSPSNTRILTGVGGSGTDDGTLLTTKSSPNRPPGTAASGSVVPGNGSVVRTINNINLNAAGMSGGDDESKLFCGPTHARNLYWNMTRVGDVNVQPCPGGAAGIAKWRCVLMKRIPDSGYDEYDDDISSTTPAPSGGDCLHNSSSCEPPVSMAHKVNQRLRNFEPTWHPATPDLTQCRSLWLNNLEMRVNQRDSSLISIANDMSEVTSSKTLYGGDMLVTTKIIQTVSEKMMHDKETFPDQRQREAMIMELLHCVVKTGSNLLDESQLSSWLDLNPEDQMRVATSLLTGLEYNAFLLADTIIRERSVVQKVKNILLSVRVLETKTIQSSVVFPDSDQWPLSSDRIELPRAALIDNSEGGLVRIVFAAFDRLESILKPSYDHFDLKSSRSYAILSNDSDVNAGEIQQRLRILNSKVISASLGKGRHIQLSQPITLTLKHLKTENVTNPTCVFWNYIDHAWSANGCSLESTNRTHSVCSCNHLTNFAILMDVVDEHQHSLFTMFDGNMRIFIYISIGICVVFIVIALLTLKLFNGVFVKVRNGSNPLPHQRSGSRRQQNNIRDQTHESLTLTTPTSQSNVPPPSHGNTNFIQHNSIRNSHRNNLNYNVQQQQQQQQQQVVAAAAAAVVLSNQPQRNMQHAMNNLNLNLHQHGQQTAAAAAAAASIAAALQQHAVQASNASNNLNISHNYLQQQHVQQQQQQQRGQQPQPHPHRNHNLNVDGNGLDNTNNIIMQANMDDLQYKWWWCIYLCLLAIELLFLLGIEQTETSIFCGFITIFLHCAILSGTAWFCYEAFHSYSTLTSDELLLEVDQTPKVNCYYLLSYGLSLSVVAISLVIDPSTYTQNDYCVLMEANALFYATFVIPVLVFFVAAIGYTFLSWIIMCRKSRTGLKTKEHTRLASVRFDIRCSFVFLLLLSAVWCSAYFYLRGAKMDDDTADVYGYCFICFNTLLGLYIFVFHCIQNEKIRREYRKYVRQHAWLPKCLRCSKTSISSGIVTGNGPTAGTLCSVSTSKKPKLPLGVSEEAHDDPQQQQQTPVPITEDAIMGATSDCELNEAQQRRTLKSGLMTGTLQAPPQTLGGHVVLERGSTLRSTGHASPTSSAGSTHLIFAHKQQQQQQQQGPLGESYYHQPDYYSWKQPSTGTGGLKTPREYYNNAGAAASSPQQAHEVFYWTQKPNSGHNGKKKRGAGGVPASPSGSLHSRTAAASQVLFYPSYKKTKPGQPTGYPQYAEALDPPLATGNAAAYYQQQQQLRRQQLHQQQQQQQQQQLSSDEEQAEQHAHLLHLQRRAGSQQQLPAPPPHMAQYQQEFMQRQYRNKHSNCDLGMGDAYYNQGSVGGADGGPVYEEILSNRNSDVQHYEVGDFDVDEVYNNSVGTGVFNNMRAAVAAGGSRYGGGSLSGGSVSSRSQQQQLKKQQQQQSLAQQRSARRCTADDDDDEDEEEDEEATAAEQLHDSVCDEDEEEDESDLEDDAHGLPPQSDERMRRLMAMQDEDFKRRFQRQLRKHGAPLDYGALPPGAGPQPEHNGAVFGVSGGVGEGSLRGAFRQQQQQALNAKSPGGRLAVNELFGHGNSGPPLPPANQTPAQKRQQLQKLSPQSTTSSSSHTSHSNPNPHPHQLTHPHPHQHPPHHQQRHLSAMLDENNTVRCYLEPLAK

SEQ ID NO: 4522 - DNA, 4925 bp, DROSOPHILA
attcaattacaaatgaataaatgcaatgccacgacggactttagccttcgcacagctgcggacaatataataggtccagtgactagtggacgcaaaataagagattctgttggcctctattttgggttgatacccatacgagtaaaaatccataaaaaaaaaaaattttttaattgaaaagaaaactgcatagtatgtgaacttttagcccgattacatcgggattgcgtatgcacatgtgtcgacactactttatgcaggccataaaagcagccaaaaacaacagcaacagcaaacagctgcagcggcaaaaacagttaaattaaattagcaaaaattgtaaccaatttcacaaaatgcccttatatatttgtcgttttttttccccccgctattttttgtaaccactttatttttaatgaaatgcatatccttgtttatggacatgtttatgggcagctttggtcgcctggtttacgaggcaattcaattgaatgttttgtcatttgattcggcgaaaatgcggctggggcattgaaacattttccagatgcaggaaggctatcccactcgttggcctgctgtctgataactgctagctgtgctatctctgtcgcacgcgcaaaacacaattaaaaatcgcattaattaaatatttcaaaagtaaaagtttttgccatttcttgagtttccaacgcgacttggctttgtaaggcacgcccccccccccctcagcccgtgcttttccgaactcatgctcctggattttcacttccccccccaagtttcgttttcccccagttgttgttctgtccctttgttttccaacatcttcgtcctcttggcagaagtttgtgcaactttcccgtagctgcaatgcgaattttctcgtgtaataatggcggcggctcgcaatcgccatcattatatttaatgcggctaacgcatgataaggaaagggaaaggggatgggaaaggggatgggaaggggggtttatggatggatcttaacttgtgctctataccttctgcagcatccaaagtttttcaattttccacaaacaattgaggtattatctggggctacaccttggcattaggttgcgcgggtggaatctgccgcgcaattcccttcgcttcaagttcattaaaatattaatttgcatgtttgccagcaacttttgcactaatttcgtattccattgcatatttctcatgccacccactcactaactcattcactcactccacttgcaggttcgatgtgctggtgaatggcggcggagcggtgaccttgcagttccagcgctcccccttccgacctttgacccgtaccgtctttgtgccctggaaccggatcgtggtcctgccgcccgtgcaaatgcagctcagcgacgacgacgagacgaccagcaggaatatcaagtgagttatccagcttttcatacctgaacacctgaaattatcctgcagcattgtctgcaattcaaatagtcttaatcctgaaactcagaacccattaatctggggactcgacggaaagtctcgcatccattttaatgttttcatttcggaaaatatatctaatcgttgtgattataatatataacataataataatataatggtccttataattctttcttagctcgaaatgagtaaacattataaaatattcctcctaatacctatgcttcaactttcagagtggctccactaaatcccgccctgacgttcctcaactcgatccactatcacacggcggacgaggccaacgatgccagcaaggtgtgcatggatcacgaccacgagaagctgcgtccccagctgatcagcacctggatgcccaacggagtgggcgccatgcccggcaaaagggtcatctttgccgagactcaggtgggtgggcaagctgttggctgtggggaagtgggggaagtggggaaagtgcccctcatttaccatttactatagcatggcccgtccctaatgccattcctaattagcagtccgggcagcagatgctggacgcagcgcagttttaattaatttaaagtttgccttaatgacattataactttgcatctgcccactgaaaagggggggaagtggaggcgtggtgttggaggcgggagcaggggcagtggcagtggtgttgggtgcctttgggtgaaagggccagtagtgaggtggacattaattcttgccgagagcgtggaagccccttctcgaaggtctggccctcgacggattcgcaatgcgtttaattgcagcactcgaacctgtccagctgcggtcaccagtagacactcgctgtctgcttgccattacctttccacagccgctagttcccaactctgggccgtagttaggtccgagggtaatttttccaggtctagataaacttttaccgcagttaactgtcacctgagaccgatgattaaaagtgactagggtcttagaaacaagaaaactagccaataatttggcttaaaccactgttagctaacacagtgcttatgctctccatccacagatcgtccaagaatccatccagattccgggctcggacctccacctcacctatcagtcctcgcaggccagtggctatctgagcatagtgcgtatgcgcctaaccggcgaaacgataccgcccactctgacccacgtgcatgtgggtgtggaaatcgagggagcccttcatgtaaagacctacgaggcagatcccagtttggtgcacaccttcgcgtggaacaagcgcaatgtctatcggcaaaaggtgtacggagtgactgtggcccgcatttcggtgggctatcagcacagcacctgccaatcgcccgtttggattgcccagacggccaagctgcagggctacgatgtggatatatccgatatcggtggctggggactggacattcaccatcattacaacttccacgagggtatactgcagaagggcgacggcagtacgctgcacatgaaggagtatccgagaaccgtcaaggtggtcatgggcaccggtctgcagcgaccactcacctgtccggattactgcaatggtgtggccaaggatgccaagctgctgacgcccatcgccctggccaccggacccgacggcagtctctatgtgggtgacttcaatctggtgcgtcgcatcacgcccgacggcaaggtgtacaccattttgcagttgagcgccactcaggtgtcgtatcagtattacttggctgtttcgccagccgatggccatttgtacatatcggatccggagaggcatcagatcctgagacttgtgcgactggagaaggtcaaggatcccagtatcaatagtgatcccgtggtgggcagtggccagcgttgcattcctggtgacgagggcaactgcggcgatggaggaccggccctattggcccgactctcgcatcccaagggcctggcaatcgccgccgatcgcaccatgtacattgctgatggcaccaatatccgtgccgtggatcccaagggcgtcattcacactctgattggccaccatggccatcacaatcactggagtccggctccctgcagcggcaccctgatggccaatcaggcgcaattgcaatggcccaccggactggcgcttagtcctctggacggatccctgcacttcatcgacgatcgactggtcctgcgactcacctcggacatgaagatccgcgtggtggccggcacaccgctgcactgcagcaatggaggacaggatggccgggtgaacaagacgggagcggacaatgtcctgggcaccgtccttgctatggccttctcgcccttcggcaatctctatattgcggacagcgattcgaggagggtcaattccattcgcgtagtggacacagccggaaatatgcgatactttgccggaaaacaagagggcacggggtgagtagatacttcaaactgtttataagttccttagatttcctagatccatagataaagttgcatttaaagtaaaatacgtagcattttctattctaacaaaacatgtttaactctatatacaaatactttttgattattcgattaggttcgctgctatattttgctaatttaaagtattacgccacatcgatttaacaataatgggatacattaattattttccattagttttatcctaaatctaaaatacgattgttgttccagaagtttaataaccaataattcatgcagtttgagtgcgcttagctggaaaattataattcaaagggttcccaattcgctgtcatttgtggggagggctgccgatttgcactttgccgagttatcaaagtgcactgaaaataaataattcccaatagttagctgtgctcccttgtgtacttatgtgtacgagtatgtgtggatatgacatatgtagttggaatacccgactattgcattcttagttgttttatgccctcaaatattgactggctactgggtcaacattacagggaatttggtcagcaggccgctggccaaaaatcgaatggaacgaacgaacgaatgaaatgggtgtggatgtggatgtggatgtggatggtgtaaagggcatgcaggaaaatgggttggctgggtggttagattgactccactcggacttgtttatgcgcatacttgacccaattaagtgagctccgggctatttgcatattgccgagcgatatcagccaatttttcaaaatgtctaccaaacgacacacgggacaaaacgcacacaggacgaaagagcgagagagggagaggaagatggagtgtgggcaagagcgggaaagagaaaggatactcgaccatagagtggggcataaataataaaaattcagcaagagctgcacaaaattgccaatgcaccaaaacggccataaatgtcaggccaactaggcaataccccctagtgtact

SEQ ID NO: 4523 - DNA, 1764 bp, DROSOPHILA
atggatcttaacttgttcgatgtgctggtgaatggcggcggagcggtgaccttgcagttccagcgctcccccttccgacctttgacccgtaccgtctttgtgccctggaaccggatcgtggtcctgccgcccgtgcaaatgcagctcagcgacgacgacgagacgaccagcaggaatatcaaagtggctccactaaatcccgccctgacgttcctcaactcgatccactatcacacggcggacgaggccaacgatgccagcaaggtgtgcatggatcacgaccacgagaagctgcgtccccagctgatcagcacctggatgcccaacggagtgggcgccatgcccggcaaaagggtcatctttgccgagactcagatcgtccaagaatccatccagattccgggctcggacctccacctcacctatcagtcctcgcaggccagtggctatctgagcatagtgcgtatgcgcctaaccggcgaaacgataccgcccactctgacccacgtgcatgtgggtgtggaaatcgagggagcccttcatgtaaagacctacgaggcagatcccagtttggtgcacaccttcgcgtggaacaagcgcaatgtctatcggcaaaaggtgtacggagtgactgtggcccgcatttcggtgggctatcagcacagcacctgccaatcgcccgtttggattgcccagacggccaagctgcagggctacgatgtggatatatccgatatcggtggctggggactggacattcaccatcattacaacttccacgagggtatactgcagaagggcgacggcagtacgctgcacatgaaggagtatccgagaaccgtcaaggtggtcatgggcaccggtctgcagcgaccactcacctgtccggattactgcaatggtgtggccaaggatgccaagctgctgacgcccatcgccctggccaccggacccgacggcagtctctatgtgggtgacttcaatctggtgcgtcgcatcacgcccgacggcaaggtgtacaccattttgcagttgagcgccactcaggtgtcgtatcagtattacttggctgtttcgccagccgatggccatttgtacatatcggatccggagaggcatcagatcctgagacttgtgcgactggagaaggtcaaggatcccagtatcaatagtgatcccgtggtgggcagtggccagcgttgcattcctggtgacgagggcaactgcggcgatggaggaccggccctattggcccgactctcgcatcccaagggcctggcaatcgccgccgatcgcaccatgtacattgctgatggcaccaatatccgtgccgtggatcccaagggcgtcattcacactctgattggccaccatggccatcacaatcactggagtccggctccctgcagcggcaccctgatggccaatcaggcgcaattgcaatggcccaccggactggcgcttagtcctctggacggatccctgcacttcatcgacgatcgactggtcctgcgactcacctcggacatgaagatccgcgtggtggccggcacaccgctgcactgcagcaatggaggacaggatggccgggtgaacaagacgggagcggacaatgtcctgggcaccgtccttgctatggccttctcgcccttcggcaatctctatattgcggacagcgattcgaggagggtcaattccattcgcgtagtggacacagccggaaatatgcgatactttgccggaaaacaagagggcacggggtga

SEQ ID NO: 4524 - protein, 587 aa, DROSOPHILA
MDLNLFDVLVNGGGAVTLQFQRSPFRPLTRTVFVPWNRIVVLPPVQMQLSDDDETTSRNIKVAPLNPALTFLNSIHYHTADEANDASKVCMDHDHEKLRPQLISTWMPNGVGAMPGKRVIFAETQIVQESIQIPGSDLHLTYQSSQASGYLSIVRMRLTGETIPPTLTHVHVGVEIEGALHVKTYEADPSLVHTFAWNKRNVYRQKVYGVTVARISVGYQHSTCQSPVWIAQTAKLQGYDVDISDIGGWGLDIHHHYNFHEGILQKGDGSTLHMKEYPRTVKVVMGTGLQRPLTCPDYCNGVAKDAKLLTPIALATGPDGSLYVGDFNLVRRITPDGKVYTILQLSATQVSYQYYLAVSPADGHLYISDPERHQILRLVRLEKVKDPSINSDPVVGSGQRCIPGDEGNCGDGGPALLARLSHPKGLAIAADRTMYIADGTNIRAVDPKGVIHTLIGHHGHHNHWSPAPCSGTLMANQAQLQWPTGLALSPLDGSLHFIDDRLVLRLTSDMKIRVVAGTPLHCSNGGQDGRVNKTGADNVLGTVLAMAFSPFGNLYIADSDSRRVNSIRVVDTAGNMRYFAGKQEGTG

SEQ ID NO: 4525 - DNA, 6149 bp, DROSOPHILA
ctcccagggtcgctacgaggactacgtggaagagagcttcgatgagggatccctttacggagacaataactacgaggattatccgcctgagcgccaccactcaaggagtcgagaaccaaaaagaaatcgccgaagagagcgggctgaacgtttgcccccttccccgagaatcatgtcaccaatgggatttccggtccagcggcaaatccgtcggcgacccagctacgattacgacgacgatgactctatgtacggggatgagtatggggactatggagatctgctgcccaaggatcgacctgtccccatttggttatgcgtctttctggtagtgagctacatccttggcggagctgttctttttgcgtactgggagaactggtccttcttggattccgcctacttttgcttcattacactgacaacaatcggtttgtgtttatcccaattccttgcgcactcttttcatctgcttttgcattacaggatttggtgactttgtccccgcgaaaggagtcaaggacgagtcggagcagtccatcgcctattgctcgctgtaccttcttttcggcattgccttgttggccatgagttttaacctggtccaggaggagttcattgccaatgtgaaggaggtagcccgccgtctgggcattcttaaggatgatgacgacgagcaggatgaggattagtaatagatagatagatagttatgacatctgttttttcctaaatatgttggatgctctaattataaggaacacactttgaaagatggatatttaatatgtttaaatgttttatgaaaaaaaacttcaacaaatttaaattcacaaacgagaatatgataagtaaaatagttaagattatattaattataaagcgcttccttggaaggcatgacatcattaaaaaaccaaattcacttcttccctaaaaaatagtatcgaagtttaagaataccttctgatatatcttaaacctgcacttgaactaaagatttccttaactttacatagcatactgagtttatttaaataataaatgtacgaaattccaaagattgatatacagataaaatgaatatccagaagagccaaacaaacacagcgatccgaaatccactaacataaacgggttactgggaaggggagactactactgtcatcgaatgcaatcaggctacgttttctttgttgtgctaaaaatattgaaaataaaagcaatgataatatatccccaccctttatttgttaagtcattagcggacttgcacttgacttaccctgacgaaggcgggagaacctcgaggtgacgttttactgggtgtcagggaacgtgacaacgagctgctgcgttttccaccagtagctacgggtggctttagggcgttcgaattggaattgcgggtggtgccgcacccacgcttcacggtgacaccatccacgggctcaatgggcgtggagttcattatggtttcagtttcggacagctcctggacggaatgcatggagacgtcatgctcaccctcgctgcactacggattggaaacataaaagttggtgcttttcaacatacaaggttgaaggattttaggttacctcatctatagtggccgtggtgtccagatctgaccagtccagctcttggcgatagcgcctcacaatttcctgatgtggcgacgtggccacgagggtgcgcggataaacgaaatcccttttggagggcgtggtcccagttggggcgtacgttttcaactccgactgttggaagcgtacaagctcttgctcgcaaatttgcagctgctgccgttggtgttcagcatgctccgagaactgccggttcgactcttggacaagatcagtggctacagtggcatggcctatgaatcgctgtctgtcctcggtgataagctgctgccttgcatccaccatctgttccaagttaacttcggttttctcctgcaccgcctcaagctgctgcttgctctcttggcaaataatttccacctgattgtggtgcactcgaacggaaccaacattctcatttgtttccttttcgtatttctggttgagattcttcatgtgcacctgaagcatcgaacagttggcaacgccttggtccagacaaagcattcccgcctccatttggctggtgagctccgcttgtgcggattgggaagcttctatgcccaacttttggtagtcttggataccagacttaatatcatcgatgcgatgatttctcgtcagtcgactctcctccatcttattaagatgtacggacatgctgatgctatttttggaccgcaagttcttgatctgttccatctgcatcatcatggactcaaggagagcatcctcctgctgcgccagagctcgttcattcgccaactcctcttgaagattctgcagttcctccgcatctggcaaactcattgccccgagctgctccaacttcttgtgcatttgcttcgcatgttcttccacagactgtaagctgctgtcaattatggtggcgaacttttcctgcatagagtccagcatggctttgtgccgctggttgttttcctcgatcacctgcaggttagtctgaatttctttgctcatcaaaagctgttgctgctgcatctgctccatcagcttggcgacaaatgcctgagagtgctgatcgctgatcttcatgacttctcctattaacttattatggaggttggtctgatcctgtagcgattgggcacacatctccttaagcatttcgatgcttttgctggaatttagtgcaaggcgttggctcacatagctcgagtttactggagatttataaaattttacttatgtacaataatatacaaattgatttctgtagatagcttacccatttcctggcttagctgctccttgagggctgcctgctgatcctgatacaagttcaggctgccaccgatcatttccaaattatcctgcatacgatctttgaactgatcgcaagatcggcgaatcttctcatccaactcacgccttctttcgatggttccgtgcagctgatgagtatcatcagtggccagatcagcagcggctaggatctcctgagcctgtgtggtcaaaacctgctccgttttcatatgcgaggccaccaactcctttttttccttgtatcgtcgcttggtcttggtcagcactttcttggtcaggagcaaagtacccttcgtgttcagtaggttctcctcggtctttttcagctcctgcgttttctccacaagactcatgctcacctcactgaagatcttctccttgttctggagttcgtccttcaaagccttgagcagcagcattttctcgttaagctcgcggttctgggattctaacttcaaagttatctccccgtaggtttcctcggccaaatagatgccattcttgtccctggccgccataagatctcttttaagcttgtcgatttcttcggtgtattccttgagcacagtctttttggtcagcttctgattgacttcgggcttgttttgaatgttcttggcgcgatgagcgtactctaaagtgctcagggtctcctcgatgtccttgtggcccggcgatatggtggctatgatggaggtcttggtcctgccacccagagattcttgcagcagtctagtcagctttgattcacgatatggaacgtgaggagcgcgatcgaccaaagcggtaattactctaccgagagtcaagaggctctgattgatgtttactgtttcccgcacacgtattcccttttcattcccagccttggaaacattttcactgcccgccagatccaccagattcagtttaccgattttcagcatgtcctctccttcgatgccattctccctgatgtgcacaactatagaaaatacagtgtgggagcgtgaggactgtgcattcatcagcgtagtggctgttttgcgacgctcctttcccttctccagcagcttgtacacatcatccttgctgtgcactggtatctcctccaggccctggataatcaccgatcccttcttggtgctgtcatcgaaaatgcgtatcttggtggtgtcatcggtggacagtagatcgcacagctcctcattgtacagttccaagtaggaaatgcgcatagtgtactccacctccatcatgcgcagctcatcgaaaaggtgactcagagcgcgcggtatgatgccaatgtcagagtcctaagcgggaagacaaattggaaaaggttagattagcgattcttagaaaagaaaaactggtttcgatggccttgagccagatggctaagaatggcaaagaccttttttgtttggttaaactgcgaaagtgagaatgtagggccctacgctgatatggttgatatggttttgatttgaatttttgttcactcacatcttcccaggaggatttcagttcggcagtctcgttgcccaccatggtgtgggtcttccctgtgcccgtctggccataagcaaacaccgtgcagttatagccattgaggacctcctcgatcagcggagacaccacgacggagtagacatcgcactgcttggactcggggccaaaactgcggtcaaaggtgaacttcttggtgagcttggagtccagcgtgtggcgggtgaccacttcccgtggtccgaccacatccacgacttcggccgagcggatgcaacgttcccgagaattaaggggtctacaaaagatatagaagatatatgtagatctttttaaggggttttggttacatatacaaactcacctgacgcgcacatacacctggatgttttggttggacttcttttggggctggcgcgacgtattcccaccagatatgtccatattgatcaattgaaacaattaattgtggttttagcgcgtacagtccaaaaaatgacgcctgtcgcgtgtatcggtatgcgtgtgtgtgtgtgtttgattcctggaaatccttgtgcttcaccttccaccgagccgaatgctgataactgtaactactatttacagaaggctggcgtggaaaaccaattttcgcactatttccaatgagaacagagagaagcagcgtcttcagttgtccgttcaattttaaaataatgcgcaaatagtgtgaccgcaacacggcaccctgaaaataccaacatcgaaaaatacaagtattggaaaactacagaatgttcaaattatttgaattaaataattttttatcttttatttgttctacattaaaccattaaatatgtatagtaaactcttattatcaaataatcccgactaggctatgtggtgaagaatgccctgcctcacgagagactccacctgagctcggggcagatagtgctggctgttcttcttcaggtggatcacctcgccgtcgtccagctcgaacttcccatagtcctccatgcagcgcacctcgatgtaaagtgacttgggcggacgcagattgttggttagatcaatgggcaagccctggttgtagcccgcactgcacatgtaggcagccagggacttggagtagttgttgaagaaggtgacctccggttcgcagagtgcctgcttgatgtccccggggataatgggtccaaactcccacctgagggccttgatcctcctgcaccgctcgtataggtaggccagcaggcacctcttgttcctctggagagctgcgtgcctgaagttgagcaggggccacagactgcgatccccggaagcattgtagctggaggcctgggccacgttctcctcgaatatcgccttgatctcctccagcacctggcgcaccccatcgtcgtcgaaggcgggaattgtctgcgacgatctctccagttcttttagcaggtcgaaggctttctcgccgaacatttttgtttgtcggctcattgttgatcctctctgtttttctttggtttggggatctagtgatggattcgcgccaaaatgttcgtcgacttgtggtatcgatacttggtatttcttttggtatatttcaaaaaataacaaaaatttcatcctcagtagccatgttcctttaaaatagatttgaaacggtgatttatcaaaatttagcttacgaggcccaaattatgccgtcctaagaggaaatgccatcctggttagattggtgcaactgcgggagtg

SEQ ID NO: 4526 - DNA, 3623 bp, DROSOPHILA
ttggtattttcagggtgccgtgttgcggtcacactatttgcgcattattttaaaattgaacggacaactgaagacgctgcttctctctgttctcattggaaatagtgcgaaaattggttttccacgccagccttctgtaaatagtagttacagttatcagcattcggctcggtggaaggtgaagcacaaggatttccaggaatcaaacacacacacacacgcataccgatacacgcgacaggcgtcattttttggactgtacgcgctaaaaccacaattaattgtttcaattgatcaatatggacatatctggtgggaatacgtcgcgccagccccaaaagaagtccaaccaaaacatccaggtgtatgtgcgcgtcagaccccttaattctcgggaacgttgcatccgctcggccgaagtcgtggatgtggtcggaccacgggaagtggtcacccgccacacgctggactccaagctcaccaagaagttcacctttgaccgcagttttggccccgagtccaagcagtgcgatgtctactccgtcgtggtgtctccgctgatcgaggaggtcctcaatggctataactgcacggtgtttgcttatggccagacgggcacagggaagacccacaccatggtgggcaacgagactgccgaactgaaatcctcctgggaagatgactctgacattggcatcataccgcgcgctctgagtcaccttttcgatgagctgcgcatgatggaggtggagtacactatgcgcatttcctacttggaactgtacaatgaggagctgtgcgatctactgtccaccgatgacaccaccaagatacgcattttcgatgacagcaccaagaagggatcggtgattatccagggcctggaggagataccagtgcacagcaaggatgatgtgtacaagctgctggagaagggaaaggagcgtcgcaaaacagccactacgctgatgaatgcacagtcctcacgctcccacactgtattttctatagttgtgcacatcagggagaatggcatcgaaggagaggacatgctgaaaatcggtaaactgaatctggtggatctggcgggcagtgaaaatgtttccaaggctgggaatgaaaagggaatacgtgtgcgggaaacagtaaacatcaatcagagcctcttgactctcggtagagtaattaccgctttggtcgatcgcgctcctcacgttccatatcgtgaatcaaagctgactagactgctgcaagaatctctgggtggcaggaccaagacctccatcatagccaccatatcgccgggccacaaggacatcgaggagaccctgagcactttagagtacgctcatcgcgccaagaacattcaaaacaagcccgaagtcaatcagaagctgaccaaaaagactgtgctcaaggaatacaccgaagaaatcgacaagcttaaaagagatcttatggcggccagggacaagaatggcatctatttggccgaggaaacctacggggagataactttgaagttagaatcccagaaccgcgagcttaacgagaaaatgctgctgctcaaggctttgaaggacgaactccagaacaaggagaagatcttcagtgaggtgagcatgagtcttggtactttgctcctgaccaagaaagtgctgaccaagaccaagcgacgatacaaggaaaaaaaggagttggtggcctcgcatatgaaaacggagcaggttttgaccacacaggctcaggagatcctagccgctgctgatctggccactgatgatactcatcagctgcacggaaccatcgaaagaaggcgtgagttggatgagaagattcgccgatcttgcgatcagttcaaagatcgtatgcaggataatttggaaatgatcggtggcagcctgaacttgtatcaggatcagcaggcagccctcaaggagcagctaagccaggaaatggtaaactcgagctatgtgagccaacgccttgcactaaattccagcaaaagcatcgaaatgcttaaggagatgtgtgcccaatcgctacaggatcagaccaacctccataataagttaataggagaagtcatgaagatcagcgatcagcactctcaggcatttgtcgccaagctgatggagcagatgcagcagcaacagcttttgatgagcaaagaaattcagactaacctgcaggtgatcgaggaaaacaaccagcggcacaaagccatgctggactctatgcaggaaaagttcgccaccataattgacagcagcttacagtctgtggaagaacatgcgaagcaaatgcacaagaagttggagcagctcggggcaatgagtttgccagatgcggaggaactgcagaatcttcaagaggagttggcgaatgaacgagctctggcgcagcaggaggatgctctccttgagtccatgatgatgcagatggaacagatcaagaacttgcggtccaaaaatagcatcagcatgtccgtacatcttaataagatggaggagagtcgactgacgagaaatcatcgcatcgatgatattaagtctggtatccaagactaccaaaagttgggcatagaagcttcccaatccgcacaagcggagctcaccagccaaatggaggcgggaatgctttgtctggaccaaggcgttgccaactgttcgatgcttcaggtgcacatgaagaatctcaaccagaaatacgaaaaggaaacaaatgagaatgttggttccgttcgagtgcaccacaatcaggtggaaattatttgccaagagagcaagcagcagcttgaggcggtgcaggagaaaaccgaagttaacttggaacagatggtggatgcaaggcagcagcttatcaccgaggacagacagcgattcataggccatgccactgtagccactgatcttgtccaagagtcgaaccggcagttctcggagcatgctgaacaccaacggcagcagctgcaaatttgcgagcaagagcttgtacgcttccaacagtcggagttgaaaacgtacgccccaactgggaccacgccctccaaaagggatttcgtttatccgcgcaccctcgtggccacgtcgccacatcaggaaattgtgaggcgctatcgccaagagctggactggtcagatctggacaccacggccactatagatgagtgcagcgagggtgagcatgacgtctccatgcattccgtccaggagctgtccgaaactgaaaccataatgaactccacgcccattgagcccgtggatggtgtcaccgtgaagcgtgggtgcggcaccacccgcaattccaattcgaacgccctaaagccacccgtagctactggtggaaaacgcagcagctcgttgtcacgttccctgacacccagtaaaacgtcacctcgaggttctcccgccttcgtcaggcacaacaaagaaaacgtagcctgattgcattcgatgacagtagtagtctccccttcccagtaacccgtttatgttagtggatttcggatcgctgtgtttgtttggctcttctggatattcattttatctgtatatcaatctttggaatttcgtacatttattatttaaataaactcagtatgctatgtaaagttaaggaaa

SEQ ID NO: 4527 - protein, 1048 aa, DROSOPHILA
MDISGGNTSRQPQKKSNQNIQVYVRVRPLNSRERCIRSAEVVDVVGPREVVTRHTLDSKLTKKFTFDRSFGPESKQCDVYSVVVSPLIEEVLNGYNCTVFAYGQTGTGKTHTMVGNETAELKSSWEDDSDIGIIPRALSHLFDELRMMEVEYTMRISYLELYNEELCDLLSTDDTTKIRIFDDSTKKGSVIIQGLEEIPVHSKDDVYKLLEKGKERRKTATTLMNAQSSRSHTVFSIVVHIRENGIEGEDMLKIGKLNLVDLAGSENVSKAGNEKGIRVRETVNINQSLLTLGRVITALVDRAPHVPYRESKLTRLLQESLGGRTKTSIIATISPGHKDIEETLSTLEYAHRAKNIQNKPEVNQKLTKKTVLKEYTEEIDKLKRDLMAARDKNGIYLAEETYGEITLKLESQNRELNEKMLLLKALKDELQNKEKIFSEVSMSLGTLLLTKKVLTKTKRRYKEKKELVASHMKTEQVLTTQAQEILAAADLATDDTHQLHGTIERRRELDEKIRRSCDQFKDRMQDNLEMIGGSLNLYQDQQAALKEQLSQEMVNSSYVSQRLALNSSKSIEMLKEMCAQSLQDQTNLHNKLIGEVMKISDQHSQAFVAKLMEQMQQQQLLMSKEIQTNLQVIEENNQRHKAMLDSMQEKFATIIDSSLQSVEEHAKQMHKKLEQLGAMSLPDAEELQNLQEELANERALAQQEDALLESMMMQMEQIKNLRSKNSISMSVHLNKMEESRLTRNHRIDDIKSGIQDYQKLGIEASQSAQAELTSQMEAGMLCLDQGVANCSMLQVHMKNLNQKYEKETNENVGSVRVHHNQVEIICQESKQQLEAVQEKTEVNLEQMVDARQQLITEDRQRFIGHATVATDLVQESNRQFSEHAEHQRQQLQICEQELVRFQQSELKTYAPTGTTPSKRDFVYPRTLVATSPHQEIVRRYRQELDWSDLDTTATIDECSEGEHDVSMHSVQELSETETIMNSTPIEPVDGVTVKRGCGTTRNSNSNALKPPVATGGKRSSSLSRSLTPSKTSPRGSPAFVRHNKENVA

SEQ ID NO: 4528 - DNA, 4248 bp, DROSOPHILA
attttttaagaatactcatcgctctctaatgaagaacacccaaatttacagctctgcatttctaagcttcgggtacatggaatatctcaacaaagcgttaatttcaccaaattaattaaatataaaatcagaagtgcaaatgacaaggtatgttgttaattttacaattgaccaaaggacgaaagcttatttccgctgccaaatgagccacttccgtagcatgaacatcgtttgccctgaaccacacccgcaaaaagtcaaagaaacgtagtgcgatgtcgggtgttaaaaattctctccatatactcgaggttacgatcaagtcgaaaaaatttaaatgacaagcgactaatgggaattgccaacagtttcgccgggcaggtggtgcgaaagtttgccacctctggccatcctttgcatcgaaaatcagctaacaacacaacaaatggcttcatttatttgcgtcttttgtgcgatgttgcacggaacttcctgccaccaggtggaaaccgacggcagctgaggaaaatccgctgcgtggggattgagtttttcgggggagtctggcttagatccggcgctccccaaatccaaaagtgtgcaaagtttacactgaaaaggttgccgcctccgaccagtggcaacaagaagcgaaaagaaacataaactatttatatgtaagagcaagttgcagctgcactttgcagtgattgaatgcccaacaccgacagccgttaatgtgcttggggtttttcattgagataaacttttggctggccggaaatacacggggtaagtcgcactttaaagttatcgccctttgcaggcggaatttctacgaagattaccactgccttgccttcttaacttatttatgaatttaagcaagtagtttggctatgcagtcttatacaagtcttacctgaaagcaaaaaaaaaaaaacccgattaatatacctttaaaatagttgtattttttcgaaacattggtcccatttttctaggtaatttggttgcgatcctcattcacctgatcgttgctttggaacatttttgagccaaacttttgtctcttagcagtcaaatctgtggtaaccatgcgcttcatttccatctcctccgcattaactttaatgcatatatctatgaataagcacaggtcaaggttcttcattttcttggccagctcgaaggcttcggccagaatctccttttcccgttcgatcttgccgagaatcgcgtgggccttgcatataaccatgagactcagaaagctccatataacactcttgcatttgatggcctctgtggaataaatttttatattttgtggccgtcgtttgtctttgacttaccctccagggccattcgtgccatggagcaggccccatcaaatgagttacaattcagatgctcttgggccaattcgtgcagtagataggcccgttcaatgtgatactcggcaaaccgcatacgattttccagtcggacgacttgtttcctaaaataaaaaaaaactttggatcaaggatattacatattatcaaataaaatcatacttaaaatgctccgctttgggatcggtggtagccgatctggttatattcagagcactcgttcgttttgtctttgattttttcatgtccagactattactgaggggaagtctaaaaagtgttagcagacgttgtttgccctgcaagacagtcatattgctgggaattttgtattcattaatgcgagctaaacccaagtagttgtagacctcattagtgaattcaaatttccacggcattacgcgattcgtcttgatggtgacatagtcgcccatgacttcctcaataaatgtggttagtttctagaagttaattaaatcataacataattaaatataaacttgtaaaattttaagcctcacattgagttctccaactcgaattagcaatcgaatgctgcgcagaatcttgaacatattccgcctcgtctggtactgaatgcgatataggttttcctcccggtgcttattataaaatgcctcgttgggatatttctgttgatgtaaggcgtacatgggacttcgggtatgcagcgttttctgaaaattaccagaagtaattcactgttacagggtcactgttacagggtctattaaaatgacatgatccaaccgtaagagtgcgttccgctttataattgctagccatcagtttgcccaaatactcggatgactttttgcaatgcttgggcagcacattaggatcatctcgcagtgtcttcagaaaggccacatccacccagcatttgttcagatacgtctggttgtatatcttaaaatgcctttttcgcctagccatttccagtggggacaaatgggtttccttaagttcgcaattgtttttagacattcaagaaagaatatgttaagctaaaagttacctcgttttccattatgctaaccacgtcgcaagtatccttaatatccttgggctccttagccaaactagccatcatgcgattgatcaggcgctgcacagacatggtggtatcatctgataatgtgtcatgaaagttctcatttaactgaaaaggttggcaatatatgcaactttttgatgctttgaagaggtgcaaagttgtgttaccacattgagacggtcgagaacaggacctctttggccggagctaaatcgctttaaatgacaatgcagatttattttggaatcttccaagcgattggactcgtacagagcatcgcagacttccagactgacattgggattggttactggtggctttcggctcatcaacagatctaaatacaaagacgcaaggttaaaacgttcccatttcaaaatgttcgactaaccctctgctcgggagcaatccttcagagcctcggaggctaggcccatcgatcttttcagctgactacgccgcatcagagctctttcattgaacggattcagatccagagcgctgttgaaatacctaagtccgtttgcgtaccgctgttgggtgaaaaagaacatggcccagtcggagtacatagagcccagacgatccggggaccacgcatgtgcctcccatggctgcagatgaggctgcactccagcaattggtgcctggagaccttccgataagctcatttggctgggcattgcgatatctcaattatttatgggcttcgggtcccaatcaaagaaaaaaaaaagtaaaaacaacaagtataaaaaagaggtgtgctttatgtggaccaatttctgtttatctgacattttgaaggatcaagctaaggcgaaatcttaaatgtttatttaagcttgagaattatggctactttcatttgctttttggcttttgtgatcgtgtatgagttttattttcgcgcgtatgtcatcttcaatattaatcagatagttggttttaatgccatttgaggtcgtgtaggcagttgagttcgaggacagggcataccactcgggaataggaggcaagcaaatcggacgcaccaagggagaaaatataaagggatcaccaatgctgacaagggcattttgtgagctataaaaataaataaataaatattaggcgtagaaaaatatataagaaatgagtactttccagcttaccctttatatatactttctacacggtataccttataagaactctcatcatagttattgaaagctaccaagtgctctccgataacaatggcatatagcatcacgtagatggtacgcatggtaaatgcattgtttctcgacaagaacagagtaagcactgattattttgctcacgcatctgaacgagaaattagacatggtcaaggcatttgtgaatagactcacagtccaaggaatcttctttatttcagacactataatgccacattcgggaacgcagtggcggcgattttgtttcttttcaagaacccaaactggtgattcggatgttcaacgcaggttcgagtttgccatgaagtcttttcctttggcttgtaacctggagcgaaggtcatgttggccaaggttccagtaaacaacttgctcgatttgtgtgtgcaatcggcagtatctcgattgtaatgacaagcagatcgaattgagggatcccgggtgcaaatctttctgtggcactgcgacttgcagtccgaccaggacccttgccactttcggttgaggcagagattaagatcactaccgtacagctgtgtgttgtcagagcaactcaatcgcacaacagtac

SEQ ID NO: 4529 - DNA, 1623 bp, DROSOPHILA
ataaagcacacctcttttttatacttgttgtttttacttttttttttctttgattgggacccgaagcccataaataattgagatatcgcaatgcccagccaaatgagcttatcggaaggtctccaggcaccaattgctggagtgcagcctcatctgcagccatgggaggcacatgcgtggtccccggatcgtctgggctctatgtactccgactgggccatgttctttttcacccaacagcggtacgcaaacggacttaggtatttcaacagcgctctggatctgaatccgttcaatgaaagagctctgatgcggcgtagtcagctgaaaagatcgatgggcctagcctccgaggctctgaaggattgctcccgagcagaggatctgttgatgagccgaaagccaccagtaaccaatcccaatgtcagtctggaagtctgcgatgctctgtacgagtccaatcgcttggaagattccaaaataaatctgcattgtcatttaaagcgatttagctccggccaaagaggtcctgttctcgaccgtctcaatgtgttaaatgagaactttcatgacacattatcagatgataccaccatgtctgtgcagcgcctgatcaatcgcatgatggctagtttggctaaggagcccaaggatattaaggatacttgcgacgtggttagcataatggaaaacgagaaaacgctgcatacccgaagtcccatgtacgccttacatcaacagaaatatcccaacgaggcattttataataagcaccgggaggaaaacctatatcgcattcagtaccagacgaggcggaatatgttcaagattctgcgcagcattcgattgctaattcgagttggagaactcaataaactaaccacatttattgaggaagtcatgggcgactatgtcaccatcaagacgaatcgcgtaatgccgtggaaatttgaattcactaatgaggtctacaactacttgggtttagctcgcattaatgaatacaaaattcccagcaatatgactgtcttgcagggcaaacaacgtctgctaacactttttagacttcccctcagtaatagtctggacatgaaaaaatcaaagacaaaacgaacgagtgctctgaatataaccagatcggctaccaccgatcccaaagcggagcattttaagaaacaagtcgtccgactggaaaatcgtatgcggtttgccgagtatcacattgaacgggcctatctactgcacgaattggcccaagagcatctgaattgtaactcatttgatggggcctgctccatggcacgaatggccctggaggaggccatcaaatgcaagagtgttatatggagctttctgagtctcatggttatatgcaaggcccacgcgattctcggcaagatcgaacgggaaaaggagattctggccgaagccttcgagctggccaagaaaatgaagaaccttgacctgtgcttattcatagatatatgcattaaagttaatgcggaggagatggaaatgaagcgcatggttaccacagatttgactgctaagagacaaaagtttggctcaaaaatgttccaaagcaacgatcaggtgaatgaggatcgcaaccaaattacctag

SEQ ID NO: 4530 - protein, 510 aa, DROSOPHILA
MPSQMSLSEGLQAPIAGVQPHLQPWEAHAWSPDRLGSMYSDWAMFFFTQQRYANGLRYFNSALDLNPFNERALMRRSQLKRSMGLASEALKDCSRAEDLLMSRKPPVTNPNVSLEVCDALYESNRLEDSKINLHCHLKRFSSGQRGPVLDRLNVLNENFHDTLSDDTTMSVQRLINRMMASLAKEPKDIKDTCDVVSIMENEKTLHTRSPMYALHQQKYPNEAFYNKHREENLYRIQYQTRRNMFKILRSIRLLIRVGELNKLTTFIEEVMGDYVTIKTNRVMPWKFEFTNEVYNYLGLARINEYKIPSNMTVLQGKQRLLTLFRLPLSNSLDMKKSKTKRTSALNITRSATTDPKAEHFKKQVVRLENRMRFAEYHIERAYLLHELAQEHLNCNSFDGACSMARMALEEAIKCKSVIWSFLSLMVICKAHAILGKIEREKEILAEAFELAKKMKNLDLCLFIDICIKVNAEEMEMKRMVTTDLTAKRQKFGSKMFQSNDQVNEDRNQIT

SEQ ID NO: 4531 - DNA, 3531 bp, DROSOPHILA
tttatttttgcattttttcgctgcatttttctgacacggtattggtgcgaactgcccctaaaaaacgcgctggtgtgcgtgcctgcgttttgtggcctttggcattagcatttggttaacgttaacgggcgaccactgcaacaattgccagcccatttgatatttgtggcggttagcaacagaagcgcactgcaaatgctcttccctcccggccctcgttcgccactgctcgcacacgcttgccgtctcgctttatgtttgttttgattgtattatacattatttggaccatgtacgagtattggcttgggatcggatcgactgatattgggagtgagtctatttatgcactcgtccagtgcattcgagttttgttttgctttgcttgttttttgcatttaatggccgcacttttttgcacggcactctccaaattgtttttaaaatgctaacttttttcttggcgctttaacttatttatatgtgttcgcggcaaaatattttactttgtgctttggtttacgcttcaaagaaacataaatatgggaaatggaaattattaattttttacatgttttcaacggttgggaattaatcaacgttcggcgaaaaaaattgcaaattcaattaaaaatgtttattaatgtttcaatactcgaaatatatagttttgcgataacgtcgctctgggccatgctagattatttatgtggtgcgaataagattttggcctggctttatatttaattagccgaatttcatatatggaaataatgggtgttttctgagagtatcttttggtgattcaataaatcaagtattgcacttgagatgtcaagtactcttgttagccgcatataattcaacaacacatacacaacatgttagagatccaattattattagttcttcaactgtagtgaataatgaaaaaaaatacaaaataaaataaaaaagggtgactgcatccattctcgatgtctcagtcataagactttcactataggtgagtactgctaaggttgacctgaaacaggaagtattcagtgaaagatttgtatgatatgtttgattgcttgtattgagtttggcttattcgaatatgaaattctatccaaatccgttaaagggaaaccataggtcttaccattgatctaaagtaggtcttaacagaagaccatcccagattggacgagctgtcccagtgacggtgattgtaccggtcctcaaagtcataggtgctgcccaacgaagtgggaaggggatggacctccaagaactgagaccaaaatccggcaggcatcagaagtagcaccttcagcacccgctgccaagtgacgacattttcgagggttagatccagatctccgaacagagttggagcgaagatcacggcaagattgttgaccgtcatgcggacagcaggactttcggcaattttctgccagtgaagcattaagtaggccaacgtatccctgtgagcctgatgcagctccagaaccgctaaatataccgccatctccacagccagacgatcttcgtgccgcgtggcctcctcgaaatcccttcggtggtaaatgggaatcagagggtgaaccaactgccgaagaaagtccttaacacaacagcacagtgtgtgggtgtctttattgcccaaatgcggcgtggacttgccacgcagcagcttccgacgcagtcgtttgcatttctctcgggtggaggacacccggtagagtccctcctgctgcaatccccgcgcctcgatctccgttacacaatggacaattaaggccggcaccatgggcgccacccgaggcgcataatcgctgagacatcctctcttcgtaccgatttgaggctgggggatgcagttcaccgtcagctggcggcagcaaccgatgtggcagcggagcggacacgcccgacacctcaggctggccatggcgaagcggatcctggaagaagaccagggacacgcggttagggaggtaaatgctggtcagagagggttgggatgttatttaacttttcatgttttccctgaattcgaaatcctctcagaagttccaccattcggtgattgcaactcaccttttgcggcagtgtacgcagttccccacgttgtagtagtaggacttaatcttgaaattgtgctccctcagcagccccgagtgggactgcgagcagaagtcgagtccgtccgtggataagccatcgcagccactgggattcatgtccacgcgatcctgcagcgagtccagggactgcgatccaaacatgcggtagtgctcgctgaggtcatcgtaggacctgtactcccgcagaagcctccgtttgttctgcatcgtggggcgaacgggcgacaaataaagtcgatttgagggcgtccgactcccagagccactaatcataaagttggcgaattgattcagctgttctggtcagttggcaatttccgaagagaggccacttcggcttgagtcagctacgcagaagttatcggctcgcttctccgaatactcgaccgaaatgtttatttactcttacggtttatttggaatcgggtgaaagctgatagcttaaatagttctggcagcacaaaaattcgatcacccatagagagtgcctactgtgggtcgtacatttgtaaatatttctggataattcatacacacatctagggtgctccgcagaaatttaatgggcgactaaggtgttactaagaaatatcaaaaatgctgttttcaatacaaaaaaaaagtgaatcaaattattataaacattttttgtgcctaacaataacagatatttgccctgtcttcttcatataaacaagtcagtggtgatctttttatattttcgattcaattaaatcgttaaagacaatcaatcacaccgagattcaatgtcacgatacaaaagctaaaaatccctaaaaacaaaaagaatgtagaaaatcgaactaaaaaaacaatttgctaaagtatctatgaattctaagcgcccagaaaatggctcaatggcgccgctaaatggatgaaaaattcatggaaaaccgttttgcggccaccagacatagaatgcaaccagcaaaaatgtagcacgaaaaaatgctgcagttcatgtgaggccggaacgtcagaaagcgaaaatgttgagtaaacgtgctgctaaaaaaacacaaaaattagaatttaaagggacttcgagcttggaacttttgtggaaaacgaaacatggatctgtctgttgatttaatggcatcattggcattgatttttatgcgattttaaagtttggatagagtaaaaacaaaattatcatggcacttttcagttttgggctgtgaattgaagagcagcgccagcaaaattaacgagcaaggcggggaattggatttttatgcttttttgtagtcgttttttaggcgtcagctgcattgacgccggtgtgcctatgtgtgcgtgagcatttgagggtgtgggtttaggtgtgtgtgagctttgggctgaaatactaaggatggttgcc

SEQ ID NO: 4532 - DNA, 1275 bp, DROSOPHILA
atttcggtcgagtattcggagaagcgagccgataacttctgcgtagctgactcaagccgaagtggcctctcttcggaaattgccaactgaccagaacagctgaatcaattcgccaactttatgattagtggctctgggagtcggacgccctcaaatcgactttatttgtcgcccgttcgccccacgatgcagaacaaacggaggcttctgcgggagtacaggtcctacgatgacctcagcgagcactaccgcatgtttggatcgcagtccctggactcgctgcaggatcgcgtggacatgaatcccagtggctgcgatggcttatccacggacggactcgacttctgctcgcagtcccactcggggctgctgagggagcacaatttcaagattaagtcctactactacaacgtggggaactgcgtacactgccgcaaaaggatccgcttcgccatggccagcctgaggtgtcgggcgtgtccgctccgctgccacatcggttgctgccgccagctgacggtgaactgcatcccccagcctcaaatcggtacgaagagaggatgtctcagcgattatgcgcctcgggtggcgcccatggtgccggccttaattgtccattgtgtaacggagatcgaggcgcggggattgcagcaggagggactctaccgggtgtcctccacccgagagaaatgcaaacgactgcgtcggaagctgctgcgtggcaagtccacgccgcatttgggcaataaagacacccacacactgtgctgttgtgttaaggactttcttcggcagttggttcaccctctgattcccatttaccaccgaagggatttcgaggaggccacgcggcacgaagatcgtctggctgtggagatggcggtatatttagcggttctggagctgcatcaggctcacagggatacgttggcctacttaatgcttcactggcagaaaattgccgaaagtcctgctgtccgcatgacggtcaacaatcttgccgtgatcttcgctccaactctgttcggagatctggatctaaccctcgaaaatgtcgtcacttggcagcgggtgctgaaggtgctacttctgatgcctgccggattttggtctcagttcttggaggtccatccccttcccacttcgttgggcagcacctatgactttgaggaccggtacaatcaccgtcactgggacagctcgtccaatctgggatggtcttctgttaagacctactttagatcaatggtcaaccttagcagtactcacctatag

SEQ ID NO: 4533 - protein, 384 aa, DROSOPHILA
MISGSGSRTPSNRLYLSPVRPTMQNKRRLLREYRSYDDLSEHYRMFGSQSLDSLQDRVDMNPSGCDGLSTDGLDFCSQSHSGLLREHNFKIKSYYYNVGNCVHCRKRIRFAMASLRCRACPLRCHIGCCRQLTVNCIPQPQIGTKRGCLSDYAPRVAPMVPALIVHCVTEIEARGLQQEGLYRVSSTREKCKRLRRKLLRGKSTPHLGNKDTHTLCCCVKDFLRQLVHPLIPIYHRRDFEEATRHEDRLAVEMAVYLAVLELHQAHRDTLAYLMLHWQKIAESPAVRMTVNNLAVIFAPTLFGDLDLTLENVVTWQRVLKVLLLMPAGFWSQFLEVHPLPTSLGSTYDFEDRYNHRHWDSSSNLGWSSVKTYFRSMVNLSSTHL

SEQ ID NO: 4534 - DNA, 2997 bp, DROSOPHILA
cgaacgccatagaaggcgtgtttattcgcaggcataattttaaacattatgtagcattcccattaaggttactacaatatattacttcggagaggcactctcaaacaactcttcatctcaacaacaatttacaatttctaagggtatttgccaggccgacctccaaacattttcgtcccatcctttatttagtttattttgcctttcataattcacagccaaccgagcggcaaattagccaaaggaaggaggaggccagaggagggtgaccatgtcgggtaggcgggcccaatctctgccggcgcacatgttggagccagcgaagccgcaacgcggacgctgtgtagctgccatctgcttctcgtggaaggtgctcacctgcattgtgtcccatgtgctgctcgtgcttctcgtggtttcctattgcgtgggcggtgcctacctcttccagcatctcgaacgaccccacgaactagaggtgagtgggtgattttgctggaaggtctcaaatgctaaaaatccaaaatccccatgcaggtgaagcgagacatacagaatcttcgcgttaatctcacggagaatatctggctactgtccgacgacgcagtggtcctaagggaaagcgattggatggccaatgtcagcaagcacctggccaattttgaaaagcaaatccttacggccatcaaggccgacggctgggatggcgacgaggatctgcgcaagtcccagtggacctttgccggatccctgttctactcgattattgtgataacgaccataggtgagtatgttttttttaagcttatggattgagttcttcaaagtcatgtgtgagtaaacatgggaatttatttgcttagtctatacgtaaactatgcctacactaaggtgactacttccaactcagcctaagggaaaaaggagggttgagtgggaaagtaatagcttcagttccatatctttaacataacaccttccacttctaaaacacgaagctctagaccttcttactgagcttatcattcacttttctgggtgacgctgccacactcttagcactcttaccatcggccacagctggcgatttctcgtcatagccgaagcctcctcctagaggtggaaaacttccaccgtatccgagtccaccgttgcctactccaagttgacctaagcccagtcctcctgccagaccatagccctcggtgtactgaggtccaccgaactgttggtttgctgggtactgtcccaatcctgggaactgggcacctgcgcccgcgaattggcttccaccgaagtcgccacctggataggagccgtaagggtattgcccattgccaggaaattggttgaggccaagtccattactggggaagttgttaaacccaccacccacgctggctccggggaatccagctccgggaagtccctgtcctactcctccgtatccgcctggatatccactaatgccattttgagctccagagaatccaccatagcctggctgatagggagtggggtatagctgcggtctccctatgattccggtgggtccgccaggtccgactagcactccggggtttccgttatagcctccaagtcctccgaactgtccggcattggtctgaccaccgtatggattaaactgacgggtgcctacgttgggagtgtccgatgacctggtgggctccacatcggcatagtcctctatctcatcattctccggttcgcccggaaaaggtcttcgagtcgtgggctcccgcctcagcttttcgtcgtacgagttccttatgggggaactgcgattgatgtcccgaaaagagcgctccctgcgattgtaggacctccagacccactgatctcgatctccatccgaagacttagccgccactgatccaagaaggcataggacgatgatgaggcaatagcttggcatgattggcacgctttgttcgattacacactgacccgatttttgcgcttgatcgcggcaagctcccgcaacagaatagttcgaaaatgcgaccggcacacactacttatataaccgcacccgagaaccaaaaaacaaatacaaccgccagagacatcagcggcgatgacgacgcacaaactcagtcaagcgacgagggcagccgcaggtattcgcattcggcggctgcccgaccaatgaatcaacgatcgtgccagacagaaatcttcagagatctgtggcccaagtcttggcccacgttgattcacctgaagcgcgaccagaccgcaatccgcccaggaaccaatgaggcaagcggatgagtcggacaattggttttgtccacacagcgatcacgttgaaatcgcataaatcacggtaattgaccaccaccgatcgacctaaaagcttattcctgggaatttccatgagttggaaaacatatgcttgcttcctttgcagggcgggagtcacaagtcaaagattcagctcggacacagtcaggtgagcagccagcacgtggttgacctctaaaaatgggttcattcgggtggtgatggctttcaaagggagcgagggtgtgtggagcgtgtcaaatgaaaccaaaagtggattgctgccatccaattgtttgtggtcaaaacaacagcaaggtcaaacgccactgaccgatcgtgattatcttttctggcatttcagatttttagattttaacgatgggaatttctcattattagtataccctaacacacagggggtgttggtgattagtgattactcataaaaggggaagtggtgcatggaaggttttcaatcgaaggccttaagcaaaccccaagaactctataaactctcctactttaaaagtatacagaaacctttttcactttaacccacttagagcattcaacttttcggctttcgagtggaagtatttggtataaatcagtttattagctctggctgttgatgatgggagcttagttttacgcttttcgtctgcacttttccccgatatggattta

SEQ ID NO: 4535 - DNA, 997 bp, DROSOPHILA
agcttgccgcgatcaagcgcaaaaatcgggtcagtgtgtaatcgaacaaagcgtgccaatcatgccaagctattgcctcatcatcgtcctatgccttcttggatcagtggcggctaagtcttcggatggagatcgagatcagtgggtctggaggtcctacaatcgcagggagcgctcttttcgggacatcaatcgcagttcccccataaggaactcgtacgacgaaaagctgaggcgggagcccacgactcgaagaccttttccgggcgaaccggagaatgatgagatagaggactatgccgatgtggagcccaccaggtcatcggacactcccaacgtaggcacccgtcagtttaatccatacggtggtcagaccaatgccggacagttcggaggacttggaggctataacggaaaccccggagtgctagtcggacctggcggacccaccggaatcatagggagaccgcagctataccccactccctatcagccaggctatggtggattctctggagctcaaaatggcattagtggatatccaggcggatacggaggagtaggacagggacttcccggagctggattccccggagccagcgtgggtggtgggtttaacaacttccccagtaatggacttggcctcaaccaatttcctggcaatgggcaatacccttacggctcctatccaggtggcgacttcggtggaagccaattcgcgggcgcaggtgcccagttcccaggattgggacagtacccagcaaaccaacagttcggtggacctcagtacaccgagggctatggtctggcaggaggactgggcttaggtcaacttggagtaggcaacggtggactcggatacggtggaagttttccacctctaggaggaggcttcggctatgacgagaaatcgccagctgtggccgatggtaagagtgctaagagtgtggcagcgtcacccagaaaagtgaatgataagctcagtaagaaggtctag

SEQ ID NO: 4536 - protein, 311 aa, DROSOPHILA
MPSYCLIIVLCLLGSVAAKSSDGDRDQWVWRSYNRRERSFRDINRSSPIRNSYDEKLRREPTTRRPFPGEPENDEIEDYADVEPTRSSDTPNVGTRQFNPYGGQTNAGQFGGLGGYNGNPGVLVGPGGPTGIIGRPQLYPTPYQPGYGGFSGAQNGISGYPGGYGGVGQGLPGAGFPGASVGGGFNNFPSNGLGLNQFPGNGQYPYGSYPGGDFGGSQFAGAGAQFPGLGQYPANQQFGGPQYTEGYGLAGGLGLGQLGVGNGGLGYGGSFPPLGGGFGYDEKSPAVADGKSAKSVAASPRKVNDKLSKKV

SEQ ID NO: 4537 - DNA, 2426 bp, DROSOPHILA
ttcttagcctcatgagctgtccgaaatggtgtttggcagagaacccgccttgattgggaaagtccgaggctgaggctgaggctgagtggcggagaaggccgaacggccgaaagctgggtatccaatgtgttgtgtccaatccgaggaatgtcgttcaaccgacacccttgagaatagcgctacaaattaatacattaggctctgggctctggctccaacttgtcattgccttttgccatcttttgccatttttttttgccatctggccaggcctaaacgagccccaaatggcaaagttgatctccggcgattagacgcaaatggcaatcccatagacctacatcgtgtccacgtccccgctctgccatagatgcaattgaatcgaaattgtttcgatccgagccaaagtccgttggcactcgccaccagagacactatgcgttttcatcgcaacgggcatgataaataaacgccgcgataacggcgacttttcatacgtaatttgttttatgcctggaaattaaattaacttgtttaccagccagccatttgccatcaactggccaagactgacgctccgctttgcggccgtaatgtctaatagatctcagtcgctttggccaggccaactgtcataatgactctgttatgtgtgggccattatataaaatttcacttttcgccgcttgttgagccaaaaaggctctcctatttccatttccatcggagacagttttgcaattgctgaaagatcacgaaccaattacactcgagaaatatgagtcttaaagtgcatgaatatcgaaaaagtcaacgaggagttatatgatttataacactaactggctattgttcgactttatccgattaagatgtcttcagctcacagatacttatctcgaagatacatttttgtacttcaaacaactcttcttctcatcttcctttggcaacaactttcatttagtatgagtgtgtgaaggggggggagggggcgagactagaagcaactgttgatcgagggcagggatccgctgcagtacttccatgtggaccaagcagtccatccctgctggcgctggatcttccgggcgcacttcacggaattggtgatgtcgtcggttaggagggcattgcagctcaagccgcactcgttgtaggagaagcgtccgtcggccggcttgcaccagtacttgttgttgatctgaaagatgccgtagtcattggatccgttggagttggccggtccaacgacgccggtgcggaaggaactctcgtgctgggcgatgcaggtccacttggccagctggtcccggggaacgcccagtttggacatctccctggctagggaacacctatccatcgttcgggcctgggtagcgactgctgtgagagtcagagcacaaatcacaagaaaagctttcatcttactgaattcatttataattcgatgagcggtcgcgaaatatttatagccgaagagcatgcaagtggtcgcagttgagtcaacatggtagaatcagcaatcagtactgtttacccatcattagggtgcaaacaaggtggctttcccatacaatgtaggtagttcaattcactccttcgttgaattaaatgttccaccaagttaagttcttatctgtaggttatgtttgttgttagcctatcatttgtttaccatcttagccgctagaaaatcactcctactatgcttcaaaacaggcacgtcacttcgagtacctccaaaaatacggaagtctttagccaccagatatggtggtggttccttcactctcgagcggacgatctacgcattaaatacgtcgaagtgaagcgtatctcagctttgtgcgtaagagatccattcggttgaagtcggctgaagtctgtcttccatcaactattcggaatatttatctctaataaagtaggcattgcattgtcttggccattccgcggtgggtccctgctcacgcaactcgggtggggttgcatgtgggggctaattattcaacgttattcattgtgcggcattcgagctattcgaacagtgcaaactgcactgcatgactacggttgtggctgtggcagtagctctttctctggcccagacgaattcccatcccgtctgttgcacggcccaagtttaatgtccgacttcgcagtggtttcatggcgaaacagctccacttgactgcagctattagcccccggtcgtgctctggttttatggccggccgaaagtgtgattaatcatctggattaccacttgggcggccccggagctctatctttttcggctactcgaactcgatgggctcttggcagctcaatgggccagccccttctaagccaattcagtcagccaattcaccgtcattgttgatatagtagtatgtgcctatgcaatattaagaacaattaaa

SEQ ID NO: 4538 - DNA, 426 bp, DROSOPHILA
atgaaagcttttcttgtgatttgtgctctgactctcacagcagtcgctacccaggcccgaacgatggataggtgttccctagccagggagatgtccaaactgggcgttccccgggaccagctggccaagtggacctgcatcgcccagcacgagagttccttccgcaccggcgtcgttggaccggccaactccaacggatccaatgactacggcatctttcagatcaacaacaagtactggtgcaagccggccgacggacgcttctcctacaacgagtgcggcttgagctgcaatgccctcctaaccgacgacatcaccaattccgtgaagtgcgcccggaagatccagcgccagcagggatggactgcttggtccacatggaagtactgcagcggatccctgccctcgatcaacagttgcttctag

SEQ ID NO: 4539 - protein, 141 aa, DROSOPHILA
MKAFLVICALTLTAVATQARTMDRCSLAREMSKLGVPRDQLAKWTCIAQHESSFRTGVVGPANSNGSNDYGIFQINNKYWCKPADGRFSYNECGLSCNALLTDDITNSVKCARKIQRQQGWTAWSTWKYCSGSLPSINSCF

SEQ ID NO: 4540 - DNA, 3392 bp, DROSOPHILA
agctcttcgttggtctctacggttacgggaagttcgtcgggccgcgaaattatgggaattggcaacacccggatgggaacggccagcgtttgcaccttggacttgacccgttgcgtagcaatggtgatcttgtagaagtaccggatgttgtggcctctgtacgtgggtgggccatcgcggggaatgaattcattgaaaaagtctgcaaggcgacttgctcgttagtaaaaccaaaaagctaagaagtagggcaagctcatcactcacacatcttggtctctccaggctggaggcgcaggtcgcagaagaggatcttgggcttggtggccacaatcacctctcccggcgcctgcgtcaccgcatccaaagccgtcctgccgatcatctccgtgagctccgcggctcggtcgcccgcggatgtagagtagctagttttccggtagcagtgcagctgcgccgaggcccaggccaggttctcctggcttctggtcggttttgcatggtgaatcaagggaagaaaaacagttaacaacagctcggctcaccttgcttcgttggcattgtggacagcctgcgacgcggctggctcgtcggagaacaccttgtgggtgaactcgatcaggcactggactctctcgcccgtggcgtagatggccgagtccgcacgcagcagtttcgccttaatttcaatcatttatttacttttttatttggtcgcgactcccgtagagtgaccgtctgcaggaattgttcgataggcccgccgatagcgatagcagccgtgcgcgtacgccaaccactttttaaatgtcccacctctgataagtcgtgttactgaatttaaattttctttttactctagcagaatcccaggtaggccttgggtataagctcgaaacattgtcattgctgtcgcgcacgagaacaaccagtattcagctatattttataaaatccacgcattatgttcaacggcttaccaaccttgatgaaatacccagaccgatcgccttttctgtgcggtcccagcggatttacattcgacaattgtctgcggtgagttggaacacagttacacctaatggccagcaagccatattcaacacccaaccttttacaaaccaaccttattcaacgaatgacaaaggaaaacatttcgtttgttaataattagttggttaatagttctagtggcacaactttgttgaaaaaaattgggtaagcccgctcttttgaaaaatgaatcaattcattgcccattgatacacgagataagcattttggctcccctaagattcaccgaattcccatttggttgaaagagatggcatttaggtttgccaatgtttgaatcgcaatatttaataaagagttgctgacacggggtatcttgtagtgcagccacttcgctgtggcgacttttgcttatgtgttcaattctcgtccgcagcaacaaacaactaaaagagaatggccttgaggagccgaatagctttactactggcaccactgtggtgggcatcgtgttcgacggcggagtaatcataggcgccgagtccagggctaccagcggcggcatagttttctcaaagacgtgccgcaaaattattgagctgcaggccaacattttgtgagcatctagctatctatgagtacgccatagacataatataatggtaccttgaaaccacacagtgccgcgggagctggaaccgctcgggacacgaaagccctggtggaactgacgcgggcgcagctggagcttcaccggatgaacactgggttccgcaaagtgccggtgtgctgtgccaaccagatgatacggcagctgctgttccgtttcaacgggaatatagatgccgacatgatcataggcggcgcggataacaccggagcgcatctcttctgcactcgcagcgacggctccacggacacggcgcccttcacgtccatcggctccggctaccaggtatccatgtccatcctggagtcacggtggtcggaggacctctccgaggagtccgcctgcgccctggcttgcgacgccgtggccgcgggcatgaagaacgacctgtgctccggaggcaaggtcagcctctgcgtcgtgcgctgcgacttctcggtgcaatggcccgagcagctcccccgccaggtcccaccaactcgcacctatcgcctgtcacccaagcccggccgaaccaccattctatccaccttggtgcatccggtgctttcgtggcggggcgccctagctctgcccgagccaggaggtagccaggagccagggcgaggaccaggcactagtggtgccgccagagggcaggaggccccgcgcagatccaacagtctggacgagccggaggccaaaagaaagaaacgcggagggagataggacccggcttgggtgatcctcaatatccttaccacaaatttcttgattggtcgtaagcgtttagtgagttaccgtgatttcaaactttccatctggaaattgaagcttgttgcgttatcttgtgcaaattacacattttttgtttcgagcacgaccttccaccaggaggaaaagagctctgttacccggatatttgtacgtagatggattaaatcaaattaaaccaaattatttaaaatccaaataaaccaaattatcaaaaaaggttttcagaagattaaaggccgcgaaacaagccctaaaactgttttcccgtcaaaaaggatctatctgctatgacataaaaaattaaaatttttaaataaagtaaaaaatacgtaagagaatggacaaaacaaatctaaaaatttgaaaaagttagatcggatggttgtagtctttgctgagtggttgatgaatgtgctacgccgtatcggtggcaaatttaggacatgcaaaaatttggctttatcaacaagtggctctgcggtcatactgcctgtattctgcgcaatcctgcctgcggtcacaccgcggaaaaatgtcgaaggcgcgcgttgctcgcgtttcttgagttcttgattctcatgaaattgacaacaaattcgcaacaagtgcggtgatctttgttattctctgctcttcgcccgtcttgaaatcgcagtgtgtgtgcggttgtcgatttgattcgtttcgatttggtcagtctcgcgatttcgatttctccgcaacatttgtattcgcatttccctgcgcacttggctatcttagacgccgacgtcgactgcgcagccgccgcgccgcgacgtgaaatgtgcaataacaagttaaacaacaactacgtagcagcaacaacacatcgacagagttaaccaatatttaattgcgggcttaattaaattagccggccccacagtgcagtgcaaaagtgcgcaagactaaaaaaaggaggacaacgccg

SEQ ID NO: 4541 - DNA, 933 bp, DROSOPHILA
gaccgatcgccttttctgtgcggtcccagcggatttacattcgacaattgtctgcgcaacaaacaactaaaagagaatggccttgaggagccgaatagctttactactggcaccactgtggtgggcatcgtgttcgacggcggagtaatcataggcgccgagtccagggctaccagcggcggcatagttttctcaaagacgtgccgcaaaattattgagctgcaggccaacatttttgccgcgggagctggaaccgctcgggacacgaaagccctggtggaactgacgcgggcgcagctggagcttcaccggatgaacactgggttccgcaaagtgccggtgtgctgtgccaaccagatgatacggcagctgctgttccgtttcaacgggaatatagatgccgacatgatcataggcggcgcggataacaccggagcgcatctcttctgcactcgcagcgacggctccacggacacggcgcccttcacgtccatcggctccggctaccaggtatccatgtccatcctggagtcacggtggtcggaggacctctccgaggagtccgcctgcgccctggcttgcgacgccgtggccgcgggcatgaagaacgacctgtgctccggaggcaaggtcagcctctgcgtcgtgcgctgcgacttctcggtgcaatggcccgagcagctcccccgccaggtcccaccaactcgcacctatcgcctgtcacccaagcccggccgaaccaccattctatccaccttggtgcatccggtgctttcgtggcggggcgccctagctctgcccgagccaggaggtagccaggagccagggcgaggaccaggcactagtggtgccgccagagggcaggaggccccgcgcagatccaacagtctggacgagccggaggccaaaagaaagaaacgcggagggagatag

SEQ ID NO: 4542 - protein, 206 aa, DROSOPHILA
MNTGFRKVPVCCANQMIRQLLFRFNGNIDADMIIGGADNTGAHLFCTRSDGSTDTAPFTSIGSGYQVSMSILESRWSEDLSEESACALACDAVAAGMKNDLCSGGKVSLCVVRCDFSVQWPEQLPRQVPPTRTYRLSPKPGRTTILSTLVHPVLSWRGALALPEPGGSQEPGRGPGTSGAARGQEAPRRSNSLDEPEAKRKKRGGR

SEQ ID NO: 4543 - DNA, 17841 bp, DROSOPHILA
ttaaatgcaggtgtgccacagggttctgtcttaggacctacattgtttaatatttttacacacgatattccacaagctacaaactgtgtactttcactgtttgctgacgacgccgctgtctacagtgctggtttctcgtacagcgagataaatcaatccatgcagagttacttaaatgaattagacatatattacaaaaaatggaaaattaaaattaaccctaataaaacgaatgctatattttttacaaaaagaaggaaacctcgttatcttcctgatagacagttgcgaatactagactctccaatacaatgggttgacaacattcgatatttgggtataatttttgataaaaaactaacatttaaataccacatcaacaacacaattatgaaagttaataaaattatttgcacactgtaccctctaataaatcgtaaatctaaattatcaatatccaataagatcataatttttaaaacaatttttaatccaatattaatgtatgggtcacctgtttggggtagatgtgctcaaactcatatcaaaaaacttcaaatatgccaaaacaagctattaaaattaataatgaacttaccttattacacaaacactaagtacctacatataaaagcaggtgtacaaaaagttcaacaaaaaatacaatattaacaatcttttgtttcaagtcttagtttttaagttagttgtaagtcaattaaggtttttcttctcccttgttttccttaataaataataaatattgttatacaaaaaactaaaaacaggtcaactagacataattaataaatatttcagatgaaagccttagctaaacactgtaaatacctaattataccattagctttaatgaaatgtacatatatatataagggataaagcacaaataaataaataaataaaataaattcattacttaccaggagtttcttttactaccaaagcatatagaattaatgacatcgtcgagggggaaagtgcatttgaaaataatttaatagaatttatttttaacaaaaatagaattactaggggctacaattaaaagtgtataatttatgcatgtacgtaggtttacatttaatttttgcacgtttcgatttgatttgcatttcggtcggcctcccaaccgcactaaaaactaaagcctagctatttacacagatcgatgcagaagtcatagttgaaagttcatagtttccccctggaatccttccaggagattgtgctgcagctccaattctatatatctctatctctggttgcggaaatgccatgttatccggaaagtgtggggctataatggcatatcggcaattggctaaaatactgtcatggccgatacttgaatttctgggttggctgacccaattgccactgcggtttgatatggtttcccgggccatgtagttctccatcggatcgccagccagaatccccttgccaagcatttggaagctgaatatccactcatgacagccttccagcaatcgggcgatatgtaaagtttgtgctgctgtgccgaaggagtccggcgatattgcttggtggccaaccaccacctcagaagtagaagctctcgcactgctgctgctgctggtggcgttgtcgctgctgcaaggcgatgttgctgccgctcaagctgctgctgctgccgccactgaccccgccgctgaccccgccagtgccaccggcggcagcggccgcctccaactagaatcataagtgctggtactcgcccatgtcgtacatggcggtcatgggcatggcgcccatcacgctgtgcaggtgcgaataggccacggcggcggtcagtggaggcatttgcatctgggcagcggccgccgcactcacgcctcctccgccgccgccgccactgctcttggtggcggcgacattggcgatattgctggcgggatgtggctggtgcggatggtgctgcaggccttgctcggcggcgacatgctgcagctgctgctgatgcaggccgttgttgttgccgctgctgttgccgggtgaatgctgctgctgttgctgctgctgctggtgctgcgcactctggctgggcaacatgctgccctccatctcggagtcgctggaggagtcaaggtgctgcttgtccgtggagccgctgcaatggagatgaacaggttgcgtggttagcggaggttattgatttagaatgctaaagccagcataggctactatactactatacttctacaactagcattaatacatcatattgagcacttcatgatctttatgttccaggtctcatctatcccttatgtcgaattgaaactatcgcctgctccgcctgctgaagacgtgacccgtggcatatggtttttggatgtcagcatcgcttacgctaaaatgtgtcaattgctgcaactaatttagtgctgtcaacacacaaacgcactccagtgcataatttatttataaacaaatgacaaatgacaggggcacaggcattgcaattgaaacgaattccggaaggaaatcgtctgccgctcgcgtttctataaatggtatcatgttcgccgttgaggtgtcgcctcagggaatccgaatggagtgaggagcatgcgagatgaggaagcgagatggcatgccctccccggggcattcggatatgaggcatctgatttcagtcccaggatgactttccacatttccaggggtttgcttcaagtgggtgcgagtgctgcacacccccgcttgcatcttaagtagctgacttttattgtttgtggctgaaactcattcgaaactcgaacgccactttggggttaatgtgagtcctgccccctgcactaatggctaatacccgaccataacaagaccgaaactcgagcaaatgccaatctccctcccgcaatctcacccactccgctggcaatcatcggcaaagtgttaatcttgtcgccaattgcatggccgagcacaatcagtaatcggttatcagcagccgcatcgcggaaccagtttgcgaagaaattgatgacagccacgagcaacatcagcaaacaacatggggcacctccaggattggacccaccaaactttgcataccctactgataacgatacttctttcatatacctaatagtagatatttgttaaacttgatatgttacttggaattcctgatcttagtagccattcaaaaccattccacttggacctaatgtttaaaagcctttaatgataaagagacacttggtcactaaacacatgtcgaattaaaggaattatcgacaaatccatttgtccagcgaagcaatcttcattgagggtattgttatttgggggaagggggggaacgaggctcgttcggggcaatgcgaaacatttaagcgcacactcgacaaatttgcgatctggcacaatgggacagagacggagggcaggacaggaccgatctgatggccggcagatacaccacttccccagctgccgcggattccgattcctcatttctgattctccattcccgattccaaatcctcgattccgagcgggggatctgcagtaggaggagtaggaggaggagcccacatacggcgcagctgtacgatatcggcaatcgtgtaattgtagattgtatccaccgagtggcagccaccaacagcgatggcatgccatccacttcttgcagcgtttgcatgaacttgaacttgctccagcgatcagaggcgcagtggtggaggaggaggaggaggatgaggaggagaaggaggcggcgggcgcgagaccatgtgacatgtgatggacactgctccctacttccccaattttccgaaaacgagttcgcgctgtggacattaaagtgacgctcgttccgatccgctccgttccgttccaaaccgttcgaggcaaaaatcgatggcctaagcacagcaaacatgaggaatggcccatcccagagcgaaaagtggggagcaaacaaagggcagcagaagcatataaacaatgatatcgaattaccagagtttcgtagttctgccccccatctctggcggctctgcaacacttattaacacatacaaacggacagcgcccactcttgtcccgtcccatctcccattcccatccccatccccagtccacatccacatctacatccctgtccgcatttccagtgattgcattataaacacacaaaaatgcctcggctcggtctagtttggttttaccggggcaccgaacgggagcagcgagtctcaaggacaattcctgggccaggagtgagtgtcgcatatagtttataacaaaatggaatggcaaccgctgaggagcagcaggttttgggtctccgtcctcgtgtgtggtacctttggctgaaggttcctcgggcttttcttcccgcacatttcttttcatatttctttttgggtccagagttgtgcccagtgagggggaattaatttttacttgtttgcccaattggttttttgtagccgggctctgtcttaagcagattcattagcttggtaataatgcatgatcggattatgtttaactggaaacggaatcggtgaggggtgaatcggtgggttgggccacaaacgagtttgccacgtgagtgagttggtctataaaggtatttaacattttggcaagacatctttcgcatcgatctgatgtcaattgattgggaaaatagaagaattgagaatggcccatgacataaccccaactaactttcacacgaatgagtggagaactgggactggactgtggcttccaaggaattccgttgctaataaaaattataagccaataaatccttaaagaaaacaaacaaacaaacaagaggctcagggccctgcaagatcgctgagatcggtgagatcgggatatttggagagatacgggcagatcaggaagatcgggaggatcgagagggccaaggaacaggttgagttatcgcattgcgcgatcggtacacaaatctcgggacgtgtgctcagcaggacacccaactaaacgggcaacggcgatccataagtggaatctgaaaaggtgttgatcataaattatcatttaatttacgcatgtgtgtggctgttgttaatgttcgtggcgaccctctgacactcgaaaacgctcgctcgaggatgggggaacctggacctgggtcggtcgtctcacctcggctggggcttggggttctcctgctcgtctagccgacgtctggctggttattgttgggcattgtctacaactatgtaagatcccaaagattaacccaaagtccgagcccagcgctgtcatcgttataagatattttattatcgctccggcgaagatcccgaaactcgaaggtggaaagctgtacgtagcctgtgtggcgtgtggagcattttatactggtcgagaattgttttgacagtttcttataattttgtggccttttaattgcccggcccgaggcaaatcggctgattcctgaggagagctaatcgcgtccccaggccccccgccgatggcaatccaacttttatgtaatccccaagtcttttcagcactttgaggtttacacacttttcgtgggagcacctagaggaagccccatggaaaacaattgctcaggtcaagtcgaatgagcagctaaagaagtttccataaagaaacaaatatttgttttatatattttcaactattgtaactcaacccattggatacgcaaagatttaagaaaggaagtggaactgagagcacctgaacttcacttggagttttttttcaggaaattcgaataaagtaatgtattgtaaattacaccacaacagtactaatttcattttctataccttttagtaatgatattaatgtaaataaccaatcatcctgtttgagtaatgcaataaagcagcatgcccagttcttcattttcgggagctttccatactcctcgttcgcaccagatgagatctaattattgtcaagagagtgtacacttgacacccactcccggaaaagcgcgatgagcggttgtcagtgcggatggcaagcgcctccgggcgattccgtaccaccagccggtccatcatcaccaacaacatcattatcaacgccatcggagcacggatcgggatggagagggagcgggcatgaactgggacagcagcgagattgggaacgggaaccgaactggcgaactgagcacacaaacacaaaggcgaagatgtagagtagagtagagaagagaagagaccctccgacgggcaaaagcgcaaaatacataataataaaaacagaatgtacaataaaacgaataaaaatgaataacgtgctggcggggattggagcgagggaccggcggtgggcagcggggagtgcggggttgtcagggcgaacgaataaagaacacacgcacattttgtggtaacccgataccctggccagctaccctccagccaaccgtggcattcgacgaacgcaaaatgatgacgatgtctgggggagatgcggattcgatgggcaggggctggggtaggggcaggggtaagggcaagggaaggggagtgggatggacttgggactggaactggaagtggaactcggactgggtcgcctcggtggtgaatacatacatggagatgcaggggcaggggaagctcgtctgcaattgggactgtctgtgtgcaagagagggagggaagaacgcttaaggtactggattcccggagaaatggctcataatgcctggcagatcaatcaaatggcccctgaattcttctctttcataacgaggattccttgaaacagcaaagaagcatctctgtcttgggttagatattaactcattggtttaaggatcgttattctgctagaaggtttggccatatggatgatatcttgaaatactaagttatataacaaaatttaagtttaggacaatgttgaaacagaagaacattttgaaaatttttacatccttaatacaggtatataagatttgtaaaattgtatcttttcaagtatcttttacgaatgtttggcatttggcttatgctacctttcaacctgaggtcattaatcggatatttatgtaaccgaaagtcccagaatgccagaatgctattgtaaaggttggaaagttgataggaaaatatcggattacggctagattgtttgggttagttcttcaaaacttttcacccaactttgcattaaacaatgcgacggaaacccgatattgttattggcagtattttcgagctctcagtaagcagtgcccttcaattcaattcaaaatttacaaaattcttcgtaaagagaatatgcacaagacctggaataaggcgttccacaagcgcaagctggtgagctcagagcgtaataatgcatcagcatgcgaaactattcccaattcttccagtggaggagcgtgtccaagcccggaaagctggtgtactacatgcagccgctaatcgagcacctgttcgacacctggatgcaaccactgccctttccgacgctcctcaagttcatctacagctgggtgctgatcttcttcatcatgattccgatgctctatccgctgctcgtcctcctctcctactacggcatattccagtacgcggcggaggagcacttcggactgaagacgcccgagaagtgggacctcctgggcgccgccgccaggctgtggcacttcgaggtgaccaacaggaagtatctcctgttcgtgtccatgtacattgatcgctaccgagtcgttttaaccgccatatcttcgacagtcgactatatgcgcatggctctgtggttcgtcttcaactgaaccaacagccggagtccttcgatccctacttgcgaatcccgtttgcgggggagttggcttagtaactgcctttggagtggataattttaggtctttgggtggaagtgtttcgtacgaagaacttaaccaattaaaagttgagctgtattctattctgtaattctatgggtatggatataggatgaatcgtttggttccatctacctagtctttgagcactctgtcctccattctcttttggcccagcgaaggtagtgcctatgcaaacaataaccactttgccagttgctgggccgttcaaagtgccgctttggattcagatttggcgccgttgtggtttgctggctgccacaaagctgcatggaacatagatacacacaccctcatgcaaaagtaaaaaaacagaaaacgaaaagagcgcagaggagaggagcaaagcggagtggggaggggaggggaaacaatatgaaaaagttaaagtagcagcacactgagttgctcatcgaggcaacagccataaacatatatcaggttacctccaggaggagctggaggtatgcagctacgcagtccatagtacggcaaactatcgcagagaacgaacgacgtgtatctgtgagatactttcgacgactggccgtgcatgggtgtgtgcgcgagtgtgttagtgtgccttgcggttgccacggcatccaatttataatattttttgcattatttctgttttaccattttttatttccatttttattacgacaatttctcgcttttcgcctgccgttcgtgcggcgaaactgggcgtaagtgatataccatttagcataatggaactatcctggcgaaagtttgggacttttgccaatttgacccggctaatgattgtcccacccaactggaatggctagaaagacagcggaatggccactatcccattagaaatttgaattttcactctctcggctgtttgcacttcacatgacttccagccggatcgcaggacaaacaaaaggatgctcgtcggccaaaggatgttttatgtttgagaatctaactcctatctttcgaggatctacgccatccctctgcctcaaagtggaaacatccgaaaggagtggctcaactgcccgaaactatttgcttaagcggaaatgcagatgttcagatgttcaaatcgggtggcggaagggaagtggagggaagtgaagtgaaaggactggggtttttaattagtgacgaggcctgcgagacatatgccggagatatgcgtgtaccgaaggcaaacatcaacaaatcaaataaaaatacaaataaaataaatatataggatcgttttggaatctggaacaacatgttaatgactttgtcagcgactctttctttctttccctccgcatttaaccacatctcgtgtgccagttgcgtgttgtccttggcactaattagccagcccccccattgaacgcccacccacccgataccgcccactcggcgaccttgaaagtaaatgccgtcagcttttgtaattgaaattttaaatgcaaattaatatattattttttgcggtgccttgcacgcgctgacacttgtcagatgtatcgcaaataaagcataaatatactcgtatgtgcagatgcccccctccccctgccacccgcaactcatatgtacgtatgaaacgctgatataagcaatctagatatatctatctatctttggagtacgcccaaaaatatctcagttgtccccccccagtgaatcagacggggcaatcagcttagatctatagtaattagtgatttggtgcaactcactctttgtgttcggcagctcgatctctttgtcgtcggttcttgaaccaattggaaacctgtaaaagcacagaaatagcttagatacatttgtaagcattcgcaagattctgccccatgattaatgggatgcaattaacatcctctgcgaggaatttcaattgaaatttgtcaaaagatgcgtttgacatttatatttcacttcagccgctcgcatctctgctctttgcatcttggcatctgggcattgccatcgactcacctgcgtggtggtcagtcctgtggcctcggccagatcgcgtttctcccgcggcgatggatacggattgtgcgagtaccagtccctcagtacggagcgcgatttttcctgcggatgaaaaggtgtcattttaatcaatacgtatggagataaaccaattataagcccctaaaatcaatgttgtcatatatcaaattgtaactaatatgaatacgagtgaagtgaaagcacttaatagtcaagcttttctatctattagaaacatatctaagagcgaacaagaacctacagttctctttatttgtgaattattttgttttgcgagatcttttaaaattaataataaacctagattgtatagaaagcaaaagggtattccgtttactacccaactgtgtcaatccttttttctttatattcccaaattgcgtcaaaactggatgattcgtggggcgtaactaggactcagcccacatttccgcgcgctacttgaggcaactgtaagcccgtcgaagagcaaacaaagcgaatcccgtccaggatgtgcctccgataagcccgaaaggcgttacccccagcgcaatcaggcggttcgcagtccatgcaatcagacaggcgagcgggcatttgtacgatttccgcgcttgccacaattaaagtggaaagcggccaggacgacgtggagctggtggcccgaactcaccttaaaacagtagctcgtctcctcgccatcccagatggtgcggggcaatggaaatttacggcgaacacgatatttgccaacagcacccaagggtcttccgcgcagtttttcggcttccacataatgcgctacagtcgtggagaagaaaggagggggaagtcagtttggttgcgtttctggccccaaagatttgggcttgggcagcgcagcgggctggaggtttggaggatcggggggttggacggttggacggttggaggctcacctttcaaccacagggcctggagcttggcgtgattctgggccgagaagtggtgatgctcgagcaggcggtacagctccttgtattgtccccggtggaatgcgacgaccgccttggccttcagcacggactcgttcagctgcagcttatcacattgtggcagcgaccagaggaagcggcccagtctttcgatgttgcccgcctgctggagaacctgtaggtgtccgggtaaagatatacattataatgtcatctaaatatttcactaaatctattgaagctatcatgactaatggtgatttccttccataacttattcttacacattctacttatagtttgtgattacctcgcaaacacaggccacctgctcctgggtgaagccgaagctgggcaggttctccctgccgccggagcctccaccactgaccactccgccgccgccgccgccgttgctgctgctgttcagatggaggccaccgcctgctccgccgccgttgtgcgccatgatgtccagagtgctgttgttgttattgctggtgctgctgttattgttgttgttgttgtgcagggccaccgatccgctgagaccggtgggactataaggaggcgtgtgacgggcggtgagaacggcagccgcattggccgcggccaagtcgtagaaatctgtggcgggatgctgtaacattttctgcgggaatcggttgcctggctggatgttggtggggtggatttcaaggacaccgctacaagttgcagaagggatcgatcagttgaactggtgaatggtgtaacctaaactagtagttgcctaaatctttggtgttttgagcgctgcaatgataaaagtaatagaaaatcgccataagtttatgtttgcatattgaaaatacaaatatacaatgtgtgtacaggcttaaaaagccactgtatgctaaatagataatatctgtgttgcttggagccataaaaacccacgattgcaacacacaattttaggaaaaactcgcgccacattctgcgtttagtaattagccccctagtattcatctttttattaccccgctcgattaatatttaaacagctctctaattgagacacattaggctgtgaaaatcaccattgaatggcaagtgattcgaacaaatgccaaacaaaacaagcgcgtctgcatgagtttgccatattcataagcattagagatccaaattcaaatccaaattgaaatcgaaatcaaaacagaagtgtacagtacagtggagaacctcgatccgaccccatgttgtcaaacatgattaaccgagtccgggggcaattattaatgcggcatgttcgatgctcgataatcggaaatacggctggccattgccatcgtggagctctctaacctgtccgcacccaaccgaccaagagatctcttacgaaaataaactctttacacaatatagtacgtgtatatggggcgcatggtgtttcggtattcctccgatttcacatttcacatttcccatttcacatttctgtattcggttctaagaatatttctaaaattaccaggcggcagcgacgacgacgaccatgcctccgccgccatcgcgagggagtgagcgagaggcgcgaacgtatcccccagatagaatatctatgaggtatagacgatgttttcacatttcaaaacaatgcaatcgatctgtccgaataaactgatatatgtagatatatcagccacagatatctgcgtatctaggcccctccccccccccccccacaaaagctaaagctaaagatcgggctatatgcacactgattctcgtgtatcggagtcgagatattcttggatctgctttcggtttcagttctcgtgtgtgccggccagattatatatacaaaaaaacaaggaacaagaaacaagaaaatagagattcgttctggctgccgctgtaacgaaaataccaacgccaagttggctgctcttgagtcatcggcctaggccagatcccccgcagccgccgcctcgccgaagatttccatcgattcgatttcttcagctcgctgcgattcttctttctccgctgcttgtattttgtattttcgatggcctgtttcatgtttgacgcaagtaaacaagcaaaatgcgaacgtgaaacgcaatacgcgataaattttcaatctgttttggccaacagcaatccagcagttcagttcacaagtggataatattcgatggacacaatgcattctggacatattgccgaactattagagccgatttacgcctcattcgatcggattctgagctcttcagccacattggaccatagcatactggcataccaaggtttatggccctgtaccgttgcacgatcccaagtggaagtggaagtccctgccccaaaacgaagaagaacaccagcagctacgacagcagcggcctcgaaagatattctatctgtatcttttggctgcctcttcagttcgccttgtgggagatctgttatcgcgcgcctgtagctgcctgacttttgtggcattcgaataaaattaatttaatttattttacaaattctgtaatttattatctattggtttctgtttctgtatcgtgtttgccccattccccttcccctgtgcttcttcctacttttataagattttaatttgaatgtcgtggaatccctggaaatctgaaagcggacacctaactctattgggctgttaatcaaattgaattgttcgagctgccgtggctgcaagcgttgttcgcctaattagtttgtaatcaaagtcagcttacgattgacttgttgatggattcgattcaactcgcagggcagttccaaagccctaagtcctaagtgcacttcgggaactctgcaggtgaagtgtgccccagctcgaggagcacccagctcaacttggagcatggtgccatcgcaatcgcaaaaagcacaaacagtgcgcctgtttctcgcggctaacaccgaaatcatctgctccggcgtctgtgtttatacaatgtaatcgaatgggaatgggattgagactgtgactggggattggggattggggattggggattgaggactgggaagacgtgtgccatgcaacctgttgtgggccagcccccgttccgggtaattcgaacggctttctggccgctggtcgggattagtaagcgctgctgctgccaaacggtcgagacaatcgctgctatccgccagatactatttttaacattttccgtttaattgccgcgtgagggagctacgcacaaagaaatcgaatagagcgcggcgcaatgaatgaaatttgtcaatttaatgggttgcacacacatgtgtctctgcctccgcagccgaatgtatctgcatctgcatgtcggctgcttttcgccttgctgcgccgcatttgccaaactttgaatgaaactgaagtgcactggtcgaaagtcccgccggtggggagctcgtccccaaattacgacggattctgcacgccggtgcgtaaaatgatcaaagctgctgcggccaaacttgcgtatctgtatctgtttctgcccgagtcccgaatctaggcgaatggaatgcgcaaatttgtcaatttggccacttccgagatggaatccacatggctggtatcttgatgatccgaaataggcaaccagaaccgtacgcaacatctgctcccatctctgcactcaattaatcattcgacttctgacgacaaacacgcgttggccaattcgtttaaacgctcccaatcccccgaatatcgcaaatatcgaatttagccggacaaaagtgggtccacgcccactcatcctcacacgaagtacaaaagttgtcggccaaacagtcgctatagttaataatttcataaattttgtggcgagaaacgaaatgataaagccaaatggtttcataaataaacactgtgtgcgttggtttcgagcaccaaacggttggaaagcctttgcgatgaatgaatgacaactggaaactacttttcctttggatcaaatccatctcatatcttttcctctaattaataaatacatctgaggtgggtgggccgttgagtagccaacttggaaacgtggaaaacttagaaaaaaattgagcggtgaataaaacaacagaatttttcttttggtgtgtaaacaagtttcctttccaaatataagtgaacatgcaattcccgtgcttttgccttcgtttcgattccctcagaattgcttctcaagtgcctcgagttggttttccgatggcttttggccatttggaattcgccaatgccacgccgccaaaaagcgaagtgcactttggctctcagctctcctcattgaaatcggcaaaacgttgtgaatctatggacttcgatgatagattgatccattagaaagcggatagagatacgccgtgacatttatggactgcattaatgttttcgctgcacacgctttaaaggctatttaaagcactaaaatatatttttaaatgaagtcttcaaataggcaaagtgattgatactttctcagagaactttaggcttttctaatcaagaataacgctttgctgtaagttccattttaaccgtatgggatgtttaataaaaggtctatgttctatgatcttatctataggtgataagtgatttcttgaacatgtggttagttcttctaaggcttagtttgacctattgaaattattatttttctgaaacttttgtatatatttatggttttataattttaaggttccaatatggaaatgtataatctaatattagctatatttattcacataatcgtcccgaaatttatcatagttattatatctcctttttcaagtatcaatgccaattttattttaaattaatcccccatataccattcgtttttcttattgtgaaagaatatccgtcctacttatgcatctacatatatttttgccatggtttctagtgttccacagtaaacttttgccgtcggcagcatgaaaactgaatctcgctgctcacctgtattttgattatttattgttgatacgtatccgagtttgttagtttttgtttgttactctttgtttgggtttgtgccttttgccttggctttccgattcgacttgtgctatatccgcaaatgttagagttggccaagaaggcgctgatttcggctgtgcggcatttccttgatttgcattttggccaaactcttcaaatcgaagccatgtgccgttcgcgcacgcacacactcttagtcgcgatcacactgggcactaactaacacaagcttgccgttgaatattgctcatacgcactgtgcgaacacgtgttgcaaattacttttcgcgaaaacttcgctgtcctgcgcgactcggacaaattgcacctgcaaatttggtgggcaaagctgcgacgacagcactgaggcagtgccaacaaaaaatggccgcccgcggattgattagctcaattttgctcgcttttctctcgcttcgtgtgcgtttatgtggcgcgatactgatgcgttcattcaggaaacacgcaaattaaatataactttgtgcgcgggacgtcaaaagaccgccggatccggcctggattactaagcgagcgacgtgggtagaacgggcagcgaaccgcacgcgacggaatctcgaaaacaactgagaactctccggttctcaaacctaatcgaaccgaaaacggccgagacaaaaggcagaaaatggttggtgccgctggcggtgtgcgtgcgccagagcgagatggccgactggtcgtgcgagtgtgtgagtgagcgaacaccaagggggtgaactgcacagtgggatgcaccgacactttgtgcgtcactttccaaaaacgttataggaaaataatggaatcaagtgaagcgagacttacattcactgacttttataaagtcactgggcacacacagttcatgattacacatatatgaactgatgataactcagaattcactacgttttagttgttttcaatatcttgcctttacaagtgtttttatttttattctattttattttattgtattctaatgttttcgtagtaagacatagtacatttttccgttattatatgctattgtatcttcaaaacattagaaaatggttttatatatttttaaagtggcttacaattaagttaagttaagttaagttaattggacaaatatttttataaacgtgtagccattgaatttgacacacggtgccaatcgacaacagtttgacagccactgcgagaggggcagcgtgcgaaagagcgagagagcgcataaacaggttgaccgaaagaacgccccctcggcttacctgttcgcacacacacacacacacacacacacacatagatgccctcacgcacaccggcgcactggaggacagcaacgtgctgattggtcagcggaaacgcatgccagcaaaaaggcatgcgcattgggcgccatattgaaaggcggaaatcggaggtgattgcaactgcatcgctgctcctccccaggaactcctcatcctggctgaaaggatgcccggtgcaatagctgccatcctacaatgccgtttgaattactcaccgcaatagttccatgcatctctcgtataattgcaattactggccttttctcatattcattcactccacttttttggtttaactcaaccttgtggtccttccacattagtgcggtttgcattgtattatttaatgattccgaaggagatgaagccgtttggtaattgaagccaactaattgtgttaatgatttactaatatatttagtttactaaatatttactatatacacaggctcctttcgtcttcaagtccttgttcatgataactgaaataacttgaacctaatttaatttcaaactattaacatgatctagagacacctgtacaaagtgcagcgatgcgttcagaatgcctaactttctttttgaatacaaatagtcaac

SEQ ID NO: 4544 - DNA, 3104 bp, DROSOPHILA
gaattctgagttatcatcagttcatatatgtgtaatcatgaactgtgtgtgcccagtgactttataaaagtcagtgaatgtaagtctcgcttcacttgattccattattttcctataacgtttttggaaagtgacgcacaaagtgtcggtgcatcccactgtgcagttcacccccttggtgttcgctcactcacacactcgcacgaccagtcggccatctcgctctggcgcacgcacaccgccagcggcaccaaccattttctgccttttgtctcggccgttttcggttcgattaggtttgagaaccggagagttctcagttgttttcgagattccgtcgcgtgcggttcgctgcccgttctacccacgtcgctcgcttagtaatccaggccggatccggcggtcttttgacgtcccgcgcacaaagttatatttaatttgcgtgtttcctgaatgaacgcatcagtatcgcgccacataaacgcacacgaagcgagagaaaagcgagcaaaattgagctaatcaatccgcgggcggccattttttgttggcactgcctcagtgctgtcgtcgcagctttgcccaccaaatttgcaggtgcaatttgtccgagtcgcgcaggacagcgaagttttcgcgaaaagtaatttgcaacacgtgttcgcacagtgcgtatgagcaatattcaacggcaagcttgtgttagttagtgcccagtgtgatcgcgactaagagtgtgtgcgtgcgcgaacggcacatggcttcgatttgaagagtttggccaaaatgcaaatcaaggaaatgccgcacagccgaaatcagcgccttcttggccaactctaacatttgcggatatagcacaagtcgaatcggaaagccaaggcaaaaggcacaaacccaaacaaagagtaacaaacaaaaactaacaaactcggatacgtatcaacaataaataatcaaaatacagcgctcaaaacaccaaagatttaggcaactactagtttaggttacaccattcaccagttcaactgatcgatcccttctgcaacttgtagcggtgtccttgaaatccaccccaccaacatccagccaggcaaccgattcccgcagaaaatgttacagcatcccgccacagatttctacgacttggccgcggccaatgcggctgccgttctcaccgcccgtcacacgcctccttatagtcccaccggtctcagcggatcggtggccctgcacaacaacaacaacaataacagcagcaccagcaataacaacaacagcactctggacatcatggcgcacaacggcggcggagcaggcggtggcctccatctgaacagcagcagcaacggcggcggcggcggcggagtggtcagtggtggaggctccggcggcagggagaacctgcccagcttcggcttcacccaggagcaggtggcctgtgtttgcgaggttctccagcaggcgggcaacatcgaaagactgggccgcttcctctggtcgctgccacaatgtgataagctgcagctgaacgagtccgtgctgaaggccaaggcggtcgtcgcattccaccggggacaatacaaggagctgtaccgcctgctcgagcatcaccacttctcggcccagaatcacgccaagctccaggccctgtggttgaaagcgcattatgtggaagccgaaaaactgcgcggaagacccttgggtgctgttggcaaatatcgtgttcgccgtaaatttccattgccccgcaccatctgggatggcgaggagacgagctactgttttaaggaaaaatcgcgctccgtactgagggactggtactcgcacaatccgtatccatcgccgcgggagaaacgcgatctggccgaggccacaggactgaccaccacgcaggtttccaattggttcaagaaccgacgacaaagagatcgagctgccgaacacaaagacggctccacggacaagcagcaccttgactcctccagcgactccgagatggagggcagcatgttgcccagccagagtgcgcagcaccagcagcagcagcaacagcagcagcattcacccggcaacagcagcggcaacaacaacggcctgcatcagcagcagctgcagcatgtcgccgccgagcaaggcctgcagcaccatccgcaccagccacatcccgccagcaatatcgccaatgtcgccgccaccaagagcagtggcggcggcggcggaggaggcgtgagtgcggcggccgctgcccagatgcaaatgcctccactgaccgccgccgtggcctattcgcacctgcacagcgtgatgggcgccatgcccatgaccgccatgtacgacatgggcgagtaccagcacttatgattctagttggaggcggccgctgccgccggtggcactggcggggtcagcggcggggtcagtggcggcagcagcagcagcttgagcggcagcaacatcgccttgcagcagcgacaacgccaccagcagcagcagcagtgcgagagcttctacttctgaggtggtggttggccaccaagcaatatcgccggactccttcggcacagcagcacaaactttacatatcgcccgattgctggaaggctgtcatgagtggatattcagcttccaaatgcttggcaaggggattctggctggcgatccgatggagaactacatggcccgggaaaccatatcaaaccgcagtggcaattgggtcagccaacccagaaattcaagtatcggccatgacagtattttagccaattgccgatatgccattatagccccacactttccggataacatggcatttccgcaaccagagatagagatatatagaattggagctgcagcacaatctcctggaaggattccagggggaaactatgaactttcaactatgacttctgcatcgatctgtgtaaatagctaggctttagtttttagtgcggttgggaggccgaccgaaatgcaaatcaaatcgaaacgtgcaaaaattaaatgtaaacctacgtacatgcataaattatacacttttaattgtagcccctagtaattctatttttgttaaaaataaattctattaaattattttcaaatgc

SEQ ID NO: 4545 - protein, 416 aa, DROSOPHILA
MLQHPATDFYDLAAANAAAVLTARHTPPYSPTGLSGSVALHNNNNNNSSTSNNNNSTLDIMAHNGGGAGGGLHLNSSSNGGGGGGVVSGGGSGGRENLPSFGFTQEQVACVCEVLQQAGNIERLGRFLWSLPQCDKLQLNESVLKAKAVVAFHRGQYKELYRLLEHHHFSAQNHAKLQALWLKAHYVEAEKLRGRPLGAVGKYRVRRKFPLPRTIWDGEETSYCFKEKSRSVLRDWYSHNPYPSPREKRDLAEATGLTTTQVSNWFKNRRQRDRAAEHKDGSTDKQHLDSSSDSEMEGSMLPSQSAQHQQQQQQQQHSPGNSSGNNNGLHQQQLQHVAAEQGLQHHPHQPHPASNIANVAATKSSGGGGGGGVSAAAAAQMQMPPLTAAVAYSHLHSVMGAMPMTAMYDMGEYQHL

SEQ ID NO: 4546 - DNA, 3741 bp, DROSOPHILA
agggtttggccagcgtagtgaatcgcctgctgaactgatcctttaccagctctggagtgactgtggaggccgcgtccaggtactgcaccactggaatctggcccatttcgagcacgggaacctgtcgcacgcgaagtcccggtaggagtacttgggattgggccataatcagtgcaaggagtccaaccagtggtataagatgcagcctcattttgagttgatgcagcttggagaatgctggtgtcccactgttagcttcacactttatacttatccaggaaattccggaagtctcttaccttccccaagcatcgggtgattgatctgcaattggcttaccgcatctgctctgctcgtgtccgttcaaccggttaggcagtatcgttattttgaataactggaattggcgtgcggaatgttaatggccacagtcttcagttcgaagctcacacttcaaaatgtgatatcaaaatgttcattttgtaattgtaattgatgtacatagcacaagttttgaacgacaagtataaagaaaaagacaaagcgaaaatctccttcaattcgaatcttaacagctcataaagttatgaggcagagtttccaccctctgaccaagaaacgaatcgtatttcatcctccctacatcttgcagagtaaattaaatagaataggtatagtgattccgacatagatatttcgtattttgaatgcatccaatggcatggcaggggaacgcttacataagcattctatcacaagtgattagactaatttagaaagttaatctgttaatttcattaagctcactgatagctctcccactgaatgacatttttgagtcatagtcacaaaagatcacaaataaatcgaattgaccattcacagccagactcaaacaaatttcagacggtgaaaacactccttcaatccttagaatcagtgaagtcgggccattagacgcttgcaggaatacccctaactccattcagaagagcttcgactttggccggttggattttccacctacatacgtacacgatgcatgtgtatttgaattaactgaataagaacgccgattagcagctcagtaggcggaatcagtagacagcgatacaggtgagcggtcgtttatctactccataccatacagcgtgctaagtcgcagctgcgattccagtgatatcgcaatatcgcgcaatctgacatcgaatctttgaaggcgacttacggcgaaatgtctggcgatcgactggatgtgattatctttggggccagtggcttcaccggcaagtacacggtcttcgaggcggtcacggtgctgcgcggcttgcgatggggcatcgctggcaggaaccgcgagaagctggaggcggtgttgaaggagatgggcgccaaggccaagaaggacctctcgcaggtgcccatcttcatcgcggacgtcaacgaccaggcctccctgcttgagatggcgaaaaagtgccggattgtggtgaacacggcaggaccctaccgctttcacggcgaaaacgtcgtgaagtgctgcatcgaatcgggcacgcaccatgtggatgttagcggcgagccccagtacatggagaccatgcagctgaggtacgatcagctggccagggaaaagggcgtgtacgtggtcagcgcctgcggctttgactccatacccgccgacatgggcgtcgtctttgtggaaaaaaacttcgacggcgtggtgaactccgtggagaccttcctggagaccggaatcaaagaaggcggcagtggcggaggcactgccggcctcaactacggaacctgggagagcgccgtttacgggctagctcactctgacgagctgcgcggcatccggaagcagatctatccccagagactgccaagattctatccctttctcaagccacgaccgctggtcttccgctctaccgaggttgacaaggtgtgtctaccttttcccggctccgaccgctcggtggtaatgaggtcccagcgcttcctctacgaccaggacaagaaacgtccggtccagatgcaggcctacgtgggattttcgtcttggctggtcgccggcggtgtcatcttttttgccaccatcttcggtctgctgtcaaagttcaagctgggacgtacgctgctgctcaattaccccggtctcttctccggcggattggcctctcgttccggcccaagtgaggagtcaatggagcgcacctatttcaagatgacttttaaggccagtggctggcttaagagcgatcgcctggccgagagttcaaaccaatacacggagtccccgaccaagacgctgatggtccgcgtatcgggcatgaatcccggatatggagccacctgcgtggctgtgctctcagcggcactgaccattcttcgtgagtcggacaagatgcccagcacaggcggagtgctgcctccagctgccgccttctctaagaccggactaattagcgagttggagaagcacgaccacggcatcaagtttgagattctggccaacaagtaatgtccagaatcgcacttctccctcccagcggctctcttttaatcaccttacttggctgtttgttactcgcggtttgaactgtaattatataagcacttattaaactaacccccacatccgctgctgttgttgccgatttcaaagtccaggcgaaacgggttagatctaattcagtgaattttgcacctcagaataaattaagatgcgaaaaacagattttcctaccttaaaatgtaaatattatcttggctaacatcgccaggtgcaagtcgctatgaacatgactttctgatttcaagcggtttgattcgtatattcgactaaattttaattaagatttttgtattttacaaagacgtaagaggggattgggtttcagaagtttttaaaaggaaccgtaatcgacttgttgctttcgtttgctctttctaaacggccttatatagccttaaaagtgagaaaccctttggattagttctccaatatattaatacaatacttcttactacttacttccatcaagagaacacagttaactgaagtgctattactttataagcaggttgaatgtctggtttggagcataaatctggagaggattcgcagcgtagacggtcacgggcagattccataccatcgtctccacgggcatttcagacggtgcttttagctcgccggactccggattcggaatgccaaagtcaatcaaagttgtggtcacaaactcgaaatgcaatcgccatcgcacgtcgacgaggtctgtgcggaatgtgggtgttacgtgcagcggaatgggtaccacgacctgggtctgcagcgttgcgtagcacacttggtgggaggtggaaatggtcgaaagtttcccggttggctcaggcgcctccttaacctttgagctagccgatgtggccgacttgtggaggttatctgccaacactccgctagctatgctggccatatcaaaggagttcatcgaggagacatcatcgcccgtcgaggattgcgactgcagctggtgattttgcactggttgcggtcggatggaaagctcctgctgctgcagctttaccgaaaactggacgcagcgcacctggtaagatgcagtaggattttagaaagcgcattatgagtaatgacaaaaaaaatcaccaacctttcgggggttaacgccgggatcaaagtccaggctgcccacaatgtcctcaccgagctta

SEQ ID NO: 4547 - DNA, 1680 bp, DROSOPHILA
ctttggccggttggattttccacctacatacgtacacgatgcatgtgtatttgaattaactgaataagaacgccgattagcagctcagtaggcggaatcagtagacagcgatacagtgatatcgcaatatcgcgcaatctgacatcgaatctttgaaggcgacttacggcgaaatgtctggcgatcgactggatgtgattatctttggggccagtggcttcaccggcaagtacacggtcttcgaggcggtcacggtgctgcgcggcttgcgatggggcatcgctggcaggaaccgcgagaagctggaggcggtgttgaaggagatgggcgccaaggccaagaaggacctctcgcaggtgcccatcttcatcgcggacgtcaacgaccaggcctccctgcttgagatggcgaaaaagtgccggattgtggtgaacacggcaggaccctaccgctttcacggcgaaaacgtcgtgaagtgctgcatcgaatcgggcacgcaccatgtggatgttagcggcgagccccagtacatggagaccatgcagctgaggtacgatcagctggccagggaaaagggcgtgtacgtggtcagcgcctgcggctttgactccatacccgccgacatgggcgtcgtctttgtggaaaaaaacttcgacggcgtggtgaactccgtggagaccttcctggagaccggaatcaaagaaggcggcagtggcggaggcactgccggcctcaactacggaacctgggagagcgccgtttacgggctagctcactctgacgagctgcgcggcatccggaagcagatctatccccagagactgccaagattctatccctttctcaagccacgaccgctggtcttccgctctaccgaggttgacaaggtgtgtctaccttttcccggctccgaccgctcggtggtaatgaggtcccagcgcttcctctacgaccaggacaagaaacgtccggtccagatgcaggcctacgtgggattttcgtcttggctggtcgccggcggtgtcatcttttttgccaccatcttcggtctgctgtcaaagttcaagctgggacgtacgctgctgctcaattaccccggtctcttctccggcggattggcctctcgttccggcccaagtgaggagtcaatggagcgcacctatttcaagatgacttttaaggccagtggctggcttaagagcgatcgcctggccgagagttcaaaccaatacacggagtccccgaccaagacgctgatggtccgcgtatcgggcatgaatcccggatatggagccacctgcgtggctgtgctctcagcggcactgaccattcttcgtgagtcggacaagatgcccagcacaggcggagtgctgcctccagctgccgccttctctaagaccggactaattagcgagttggagaagcacgaccacggcatcaagtttgagattctggccaacaagtaatgtccagaatcgcacttctccctcccagcggctctcttttaatcaccttacttggctgtttgttactcgcggtttgaactgtaattatataagcacttattaaactaacccccacatccgctgctgttgttgccgatttcaaagtccaggcgaaacgggttagatctaattcagtgaattttgcacctcagaataaattaagatgcgaaaaaca

SEQ ID NO: 4548 - protein, 430 aa, DROSOPHILA
MSGDRLDVIIFGASGFTGKYTVFEAVTVLRGLRWGIAGRNREKLEAVLKEMGAKAKKDLSQVPIFIADVNDQASLLEMAKKCRIVVNTAGPYRFHGENVVKCCIESGTHHVDVSGEPQYMETMQLRYDQLAREKGVYVVSACGFDSIPADMGVVFVEKNFDGVVNSVETFLETGIKEGGSGGGTAGLNYGTWESAVYGLAHSDELRGIRKQIYPQRLPRFYPFLKPRPLVFRSTEVDKVCLPFPGSDRSVVMRSQRFLYDQDKKRPVQMQAYVGFSSWLVAGGVIFFATIFGLLSKFKLGRTLLLNYPGLFSGGLASRSGPSEESMERTYFKMTFKASGWLKSDRLAESSNQYTESPTKTLMVRVSGMNPGYGATCVAVLSAALTILRESDKMPSTGGVLPPAAAFSKTGLISELEKHDHGIKFEILANK

SEQ ID NO: 4549 - DNA, 3610 bp, DROSOPHILA
gtcccaaggaaccacttagtcacaaaaaatcacagataaagttcgccagtagatttttgtgcacgtgggttggcgtttgcaggttattccatgattatttgccgtttttccggtgtacagactcccattatggtgtccgcggaaacccaccttgttgttcgatgaatgtattaacaccgctaaaaacaaaaacagaatattattaaaggaaaatatacagagaaatttaatttacttacttcgccggaaacgaaagcgaaaagaaggaaatagtgtggctgcctctagacgccacaaaaacgcgatatgttaagtgaaacagcgcgccgttgctcgaaagtgtgctgttaggggcaaaataaacctcagttgaaaagaaaacccttagtaaaaataagacaatacattgtttaaattttaatttgtattcacagtttatgcatactcaagatacgaaacatgggttagtttaaatcgggttgaagaaaccatatgctcttctctgttaaaactataaaaaacaactgcttaggctcatttagatggttcctttctaacattcaactttatgtatgaaattattaaatataattgttttcctctgtaattttacatttttagttttaccaagcttttgccaactaaccacattttaaagaataaaagggataaattatagataaatatatcctttaatatggtaaatttattccgctgaatagaaaaagcaagtaacactatctgcagagtaatggggtatacaagattcgtattaaaacgcagaaaaagtcatcttcgattctctaaggtgtacataattgttcttgattggactaaaactagtcttgtaatctcttgttttatatttagattacagatttaattattttcaaatttaaatacaaattctgacagatttgcccctgaaatgttatcgacaaacgaatgtggttatcgccgactcgcgcaatcgcatagagttttttttcagtgccgaaaacaacatcaaaatgttcataacaatgttgggattttagagacagccacaaaatttagaagcacatgtgccctgctagatcgaaccgaacctgagaactgatcgccgaaagaagctgcagattgttgcataaaccgcgcgcgcagctaccgctccgaactcgaaaaggtgctccacgggtctccgagctttccgaactttggatgcgccgcgatgagcttgttggtgcaagtgttcaagtgggaccagcgatgtcccatgctccacagggtggacatcctgctgcggcgtggcgtcaagaagcaggcggtgtatccgaccaagtgagtggggtcctgaatcctcctgaaaattgcataacacgtcatttgtacagactggctgaggtgggtcgcctggtggatgcccgcgacgaccggtacgagacgggccaactattcctgcaccgcatcttcggctaccgcggcgttatactcttcccctggacagcccgcgtctacgaccgggatctgcacaatcctggcaagattagcgccaccacgactacgagcgccaatccgacgcagcagaaccgcaccaaagaggcttcgctccgcgtgaaggccaacacctccgcttccccaacggctgctaccgctcagagcgccgatgcccccacctcgaccgcctttgagacgaacgcggctgaaagtacaggcaccacaaacctgggtaccacctcccaagtggatcccaaagaggtcaagggcaaggtgcaaaccttttatcaggtgctcatagacacccgcgattgcccgtacattgtaagatgggtctagttttgcttccttcgttttctaagttggcatttcgtgtctttcagcgcgcccagaccgaggcggtcacctttctcggcaaccaggactccaaccgcagcctctacgccatccccgggctggactacgtggcccacgaggacatcatgccttacagctccagcgagaagagtccgctgcagcacgagctgttcgataagttccttacgcacgctccggacgcggacccgccatttgtgggccaggacactctgaaggcgtggcaggagaagaaccatccctggctggacatgagcgatgtacacaaggagaccacggagaacgtgcgcattaccgtgattcccttctacatgggttgccgggagacgcctgctagttcggtctactgggtgcgttaataagaaactcctttctttagtttaacgtcataaagtacctttccagtggcgctactgcatccgactggagaacctcggcgagctgagcgtgcagctgcgcgagcgccactggcgcattttctcactgtctggaaccctggagacggtgcgcggaagaggagtggtgggccaggagcccattctgagcccccggctgcccgcctttcagtacagcagccatgtgagcctgcaggctcccagcggccatatgtggggcaccttccggctggagcgcgaagacggatactccttcgattgcaagattccgcccttctcactggagagcaagccggacgacctagggacgcccacaccggccacgcccagtgcccacgataaaaagcgcgacgatagcgattaagaggcagttgttcacccgtagttaaatgattttaaaacgcaatcttttctgacaatgcatgcgtacatgtgtttagtgcaaattacaataatcaacaaggacgcagagccagttttgattctcagccaagtcgcacggtctttggttctagctgaatggcaaagtcaaagggtctccggttgtcgcgggtgtcaaagatgctctgcagagcgtcgagtgccgcagtctctgtggctgttttcacatcttcaccgaatcccttgcccagtagctgccggttggcgtagatgcctacttggtaggcggctagcacagtgttctttccgcagtctccaagcaggcggggctccgcttcgcccagctttcgctcctggcatatcttctccagcagctggattggttcctggggagtccacacctccaacaggtccttttgattcagttgcgtgcagatgaaatcgcgtacaaaaatgaaagccctctcgattccactggaactggccagggcgccaataactgcgtgtaaagatttggcctgactttcggccgagggcgggtattccgtagactgtatcagatcctttgtgcccaggtgggtcgagacgtgagcaagcgtttcggtgctaagtagataactggcgatcgcctggagtccttcattagggaccttcggtaactggtgctgcaggaaggcctcaacgtaggcacgggcaatttgttggcccttctcgaccagatcgctattgtgaggcatctggaggtcagactcctcaatgcctagctgccgacgacgatcctcctcccgctctgcaaacgatttctctgtaaaagcacgctgcagctccgacaattcaaaggattcgcccaaacgcttgccgaacgcgaagagctccgatcgctggttccactccacgaacccagaacgccgctctggcttttgtggtcctagtttcttctgccggtgggcgagctcacgtaacgttggcgaaacccatcgctt

SEQ ID NO: 4550 - DNA, 1443 bp, DROSOPHILA
caacatcaaaatgttcataacaatgttgggattttagagacagccacaaaatttagaagcacatgtgccctgctagatcgaaccgaacctgagaactgatcgccgaaagaagctgcagattgttgcataaaccgcgcgcgcagctaccgctccgaactcgaaaaggtgctccacgggtctccgagctttccgaactttggatgcgccgcgatgagcttgttggtgcaagtgttcaagtgggaccagcgatgtcccatgctccacagggtggacatcctgctgcggcgtggcgtcaagaagcaggcggtgtatccgaccaaactggctgaggtgggtcgcctggtggatgcccgcgacgaccggtacgagacgggccaactattcctgcaccgcatcttcggctaccgcggcgttatactcttcccctggacagcccgcgtctacgaccgggatctgcacaatcctggcaagattagcgccaccacgactacgagcgccaatccgacgcagcagaaccgcaccaaagaggcttcgctccgcgtgaaggccaacacctccgcttccccaacggctgctaccgctcagagcgccgatgcccccacctcgaccgcctttgagacgaacgcggctgaaagtacaggcaccacaaacctgggtaccacctcccaagtggatcccaaagaggtcaagggcaaggtgcaaaccttttatcaggtgctcatagacacccgcgattgcccgtacattcgcgcccagaccgaggcggtcacctttctcggcaaccaggactccaaccgcagcctctacgccatccccgggctggactacgtggcccacgaggacatcatgccttacagctccagcgagaagagtccgctgcagcacgagctgttcgataagttccttacgcacgctccggacgcggacccgccatttgtgggccaggacactctgaaggcgtggcaggagaagaaccatccctggctggacatgagcgatgtacacaaggagaccacggagaacgtgcgcattaccgtgattcccttctacatgggttgccgggagacgcctgctagttcggtctactggtggcgctactgcatccgactggagaacctcggcgagctgagcgtgcagctgcgcgagcgccactggcgcattttctcactgtctggaaccctggagacggtgcgcggaagaggagtggtgggccaggagcccattctgagcccccggctgcccgcctttcagtacagcagccatgtgagcctgcaggctcccagcggccatatgtggggcaccttccggctggagcgcgaagacggatactccttcgattgcaagattccgcccttctcactggagagcaagccggacgacctagggacgcccacaccggccacgcccagtgcccacgataaaaagcgcgacgatagcgattaa

SEQ ID NO: 4551 - protein, 410 aa, DROSOPHILA
MSLLVQVFKWDQRCPMLHRVDILLRRGVKKQAVYPTKLAEVGRLVDARDDRYETGQLFLHRIFGYRGVILFPWTARVYDRDLHNPGKISATTTTSANPTQQNRTKEASLRVKANTSASPTAATAQSADAPTSTAFETNAAESTGTTNLGTTSQVDPKEVKGKVQTFYQVLIDTRDCPYIRAQTEAVTFLGNQDSNRSLYAIPGLDYVAHEDIMPYSSSEKSPLQHELFDKFLTHAPDADPPFVGQDTLKAWQEKNHPWLDMSDVHKETTENVRITVIPFYMGCRETPASSVYWWRYCIRLENLGELSVQLRERHWRIFSLSGTLETVRGRGVVGQEPILSPRLPAFQYSSHVSLQAPSGHMWGTFRLEREDGYSFDCKIPPFSLESKPDDLGTPTPATPSAHDKKRDDSD

SEQ ID NO: 4552 - DNA, 16095 bp, DROSOPHILA
tcttaaaatttatggttcaatgaatacaaattctttaataaattatacgttaatcgttgaaaagggtgttaagggtagatagatacgcttcatatcctataaattcttgatcagggtcaaaagcctagtcgatctggccgtgatcatctgtcaatatgaccgcctcgatctcgatctcactaaagaaagttgagattagggatgcagacgtagacgcatcgcaagtttttttcccgcattgttaccacgcccactctaaagccagcccacaaaccgaacaatacggcgtcgcccacacttttaaatgttatttattatgagccttataaatttctatcgacttgcctcgcccactcgaactcccagaaacttagcgaaactgtccagcccacactttttcgttttcttattagtaacgataaattttccttgtctattgctattgattcgccacagaaatgttttgtatgcaatcccacagttgagttacgggtatctgatagtcgaggaacaaataattacctgttaagaatttggtgttatttttatacccttgcaaaagataatgaaattttattgacaaattttttacaacattaagggaatttatttttcatcttcgactgttgccgaatattccctgcgtgccataactttacaccttatataattcccgatatggacatggctagatcgaatctcccaatgattctcatcttaaatacataatccttttgggtggaaaacatagtacatcctgccttggtcctactctcgccgaattggtaatcataaccacctcctcgtaggtaactattagtaaacaaatatataaaaagatcaaaaaattcaaatgaagcggtaaataagcaaacgaaatatcgatgagcatgaactaaaaatcgaattcgaagaccaaaaggagctaacctaaaatccaaggctatcgatacttaccgagcgcacatcgatagcaagaaatcgacacaatgagtaacaatcgacatcggtccacccctgtctcgcagaaaacaaagaccaaaaaccaccaaacagcaaaggcggtgtatttcgatagcggaacgcgaaacaatcgacttcacctgtgcgcgtgatttgtgctaaactcattgtgaaacgagcgcaccgaaagtcggcgagttttctggcggatatttaggaggcccccaccgcagccactcacacacgcaaacatgaggctgtttgcggcagcaacagttgcgcttgtattgcttctgggccaagcagctggcgaggagcttgcggaggagcgagcgggacaggcacagggcgatgcggaggtgagtgtgcgtgtgttgttttgttatgattcagcagcgcggctatttccacatcaaaacgctttcggggagcaaaaagtaacgtaatccccttcaaagtgactaaggcttgtgggcagggattacggttcgacattaagcgggaaatatgcaattttacagttaactctcactcgctctcacccgcttacccaaaaacacatacacaggagctcacctaaaccgaacacacctatactcacacacattcgccatattggctgacgtcccttgttttttcctctttgaagtacactgacaagaaaggatgtcaactgtccagcctcagtggctgaagtgcaatttcaacaatgattttcatcttcaatgaaatctgcgatattccaaacaaaaaatgtttaattgcgttttaaaaaatagcccattcttgctactctatttctctgaagagctttattttttcagctttccggtcagtgctctactttcctcttttcgcttttctacgcctgttttggcctttgtttattctgcgacgtgtcagctgtttgcttattttgaccgatagaaccccattgatccccagactgcgttgtttttgcaactgcttcttatcggggtattttaataggccccactagtccgtttaaaattgctttgtgcccggaattgcgttttaatttctgcgtttaagtgcacttccccacaagcggaaggggaatttaaatttgcaaggcttttttttacgtccgttcaaacgcaggccactgttttttcttttgcggaaagccttgcaaatcgaatgattgctagcaagtaactcaataggtagttatgaagctaacgaaaagaaatgggattcatctctccatcaagcaccacctcctatattaagtttgtcccaaccatccgtttgtatctatttactgtttcaacttagttattttagtttttgcacacaaggggagtatatctgatatattttttaaaagttcagatcttctacattgcttacactattagctacagcaaacaattgcccacttagtattgagatttttatccagcacattgttacgcaaacaaatttatttagaaagagatgagtatctcaacgaacaataggaacgttttctgtttgcattcataattagaatggcaatacaggttgaacacagatgctgaaactagtcattctagagacttaaacggaaatgaaataaatatatatagaaaaaattgtatcattgtgattttatatgattatttttcactcctgcaacacaagaatagtagtataaggaattaaaatgagggtacattttattgggcagattgaacggcaaaatcaattgactgctagatatgaccaaatttcttagcaagcaatctctaattgatgatatcaactgaaataaataattccgagaagtctgtgtaaacttatgagcacaccactgcgagaacctgaacagatttcgaattgtgattaactgatccatgattcagacgagaaacagatttcaatttaaataaattaaattttctgtttgtggtactccaaaacgacctcctcccgcccctgagccaccaagtaatgggccagattaatgactgagaaagcaccgcatggcgcccccctaccttccgaggaaagatggccgggctttgggatgatgccatttggagcagcgtcatcaatatcaattaaatagccggtagccagcagggcgagaacgagaaacagaaccagaaaaaatcgcacagcattcatcatactccacaagcaaaatatttgtatatgcaaataattaaatatagcgtaaaaagggttcaacgagttaaagccacagcattatggatgggggaggggttgcaatagtccggccacttgaattatttaccgcgtcgcatttaaaatgttgaattttaatttaacgcatgcctcaatggaagcaaaaataagtttaaataaatagtgcttgagagcgagttgtgcaagggtcgacagagtgttaccgatgggtacatcggtaaactatgtcaatccaaaaatcttacgacaactgggctaggcactagccatttacaagcataacaagtttcgtaaaaaacaataaatattaatgctgtatagatgttctttcttggatgttgtctgtttcactttttggactagaattaaatatcgattaggtttttggtgctcgttgaagaaaccccatgtgttaaaatcaaaaggtatgcgcaaagaagcactgaaacacacacacagagactagaaagaatgcatgggaaaatttgcataaatgaatattattgcggaactatatgcgcggataaagccacatacacaacacattcgcgcaaatatttatgggtacacaccagcataatatgcgagtataatatacatattcattcagtcaagtccgcggcaagattcgcacaaaacatgcttacttacttacggggccactattgtctcacaaatctctgccggcggactggagtgtttggaggaggggttggggctgccatttaggaaatcaaatcagatgattcatgaaccacaaaaacaagccagcaagaagcgatggacgaatctatcgacgtctctgccagcaaattgtcggcggttgtcaaatgcgaatcttctttctggcgtttggctttatgcaaatcagccctgaaagtgctgactccgcccgtggaggactccatccatccacccatcgatccgtgcatttgtctgggcgtccttcgtataattttgagcatgatttgccgcctaatggaaatgccaaaggaaattacggccctgggcccactaaatggttcggccagcccaagacaacgaaacccaatcactcccactatcgctgtcccgcctccaatccaagtcccttttcctataccaataccaataccaataccccactgccccccacacacagggtgcaaattagcacccaggggagctgtgaaggcaaagtttataatgagcttggccaggaggggccatctttgggtaaatggcggggagtgcggcatgtgtgcttgtgtgtctccattgtatgattggaaatttaagcacgcatcccaagtgctgatgcattaaatatatagaatcttcaaaaaattaagatacttcatctcggtccctagcaacaatcaaggttggaatacgtgtgttattatgagctatatacctattcgattttagttcgtttggttactgtaagagtttagctatttccacctcttgatttctgtcagcactatgccattgtgccatggtgaagcgactcggattgcgatggttaatgcataagcttaaaactatgagtggagcggggtggagggcggaggtcaggggaccgtctattgactgtgggttgggttgccgtgccatcatgccgatgggggctgttgggatgggactaaatctgcaggtgtcctgatggcagatagcacccaacaatgcgaatatcattccatagatggttgcgtgaagcgtggacggaatttaaaattttaccatcggttattagttggtgcaaggtttggaattccccaaatcagcacataaagtgcacgctcatatgtagtaagcattcgaagactcgatttaaaccccaaaatgttaataccaaggcagaataaatcaatttctggcggagctgactggagtaaatgagctcgcacgcatggtgtacgtttactcaattttcgaaacgaatgatttatgagcaagaagtgggttatattagtactgggacttatatgatctatgaggtatctatctatcagctgagaagaattagatgtaggtcagtacagataagaaggtatggtggttttcgtgtacaaaaaattgcaattaaaagaactcatttacatgatctcttcaaaattgcacttagctttctaatcgtaagcaaacacggatgagtcaaaggacaatataggcaaaagaaagaaaatgaaaactacattttaaggacccactacagccaatgtgtattcagaccccagcacaaggagataaaagtagattttattaagaaatcgcgtcttcgcacagcattatgtaaattcagactcacagcaggcaaccgaagaaagccccttccaaggttaatgtctttattaacactaaaacacgcccaaaacgtgcgcatcttatcaaggcccaaaagcgtggcatcttcaccttggactcaagtgcgttgcacaacgcagatactcagattccgactcagattcggattcagtgagctaacctgctataaccccccgaaagttttaatctcataccggtttctcgacttgtgcataggtggggtggggatgggagcttgggattcacagagccggtcgtgcgtaagtggatttcaaaatgttaatgggctgcgtgaaaaaattaagtcgccaatgacagaatattgccgcgatgatgatggcggcgctgcatttatttgcacggcgaacgggccaatcgctttaattaaactttaattaaaaacaacacaagccaaattgccaatttgcagcgactgcgccgctgctgcgacgtaacgtttgttcgctgatgtttgcgatgattcaattaaagtttttcaacactggcttaataccctgttccccctcgttccgagggcattacgtttaatatttccccggaaccgtttacactggcagattttgtgtttacactcgagttcagtaagccagtgactgcagcaggagcttatcgtgttggcgcgttgtgtttgcccagatcagggaattcgattggctgattgatggaaagtgttccgaaaagtaagcgcgccaaaatacacacattaagtacatatacagcttatggtgcgcagtggagttaaacggcactttttagttaaatcagttttccataatttaggtttgtggcaaatccgtgtctatattattggagttactcaataactgaatagaatgaaatgaatgtagttaccatacactagacgcaactattttttaactactataccattaccgaatgcgatactgtgaacactttctggcactcgaagataccccttcacatattaaccagaatgttcgggtgacagaatccactatctataatccctagatgcgctcagtgcacacgagtgtactgaaagatggcaacaggcttacgaccgactgcgtattgcataaattggttgctcttttgccaaggagttgccaggacaacaaacggagcgaagttaccagtgggcgtggcgcagaacttaaaaacccatcatcgtattttggtatggcttgcgatgttgtttaaaatgccataaagtttaattgaaaaacaagctccggcagcacagcgcatagctccaacctacaatggcttcatcgcccatcgctccatcgcatagtaccaatgctccattcccggaccctcgatccacccactcaacataatcagcttgagcatcaggcgggcatcaacgtcgcttgcagtgacgcaaccgctgtcaaaagtttttatgcatttttcggctttttgtcacgacgtcagcggcaatgaggatgaacgaccaaaacgtcaacaagacgccaagtattccagtcccccaaactacccgatgaccccatccatcccgtcccacatctcatcctcacttttctgccggctgctgtcgctgtcaactgcaatgtttcagcagcaatagcagaaatacacttatgaaataatgtggtttcacagctgccactaagtccattaagctctaagctacatagggcttaactgaacgttaagacagaatttgcgagctatgaatataaatgatatggcctaagaatattttattttaaaagatggtcgcgaaattgtcttagtactctcttgcttttcaccttagtactttgtcttttaaactttacaaccaattatcaataatgttatccataggtaaggaattattgcaaaataaatgcaatctatttgtcgggattcttgagacatcgatactgtcactacacttcaagatatttcattttttcaagtggtcccaccgaagcaacagtcaaagcaatccaaagattgtgggccgcctttttgcgattccgacttttttttaattattcagcaaaatccgtctgcagtgttccactgactgtctgtcaacggttttctgcatttgtgtctcatcatttatcgatggattgtgcggcattgccccaccaaccggttcgatgtggctcgcatcgtttcagtttcgttacggcggttaattagtttttgtggcctgaaaagcccagtcaagcgttggccagtgattgacttgattggtcgtctgatgtcccgatccattgccgcattttgaccgcaattgcagttgcaattatgcggagttcattaggctttaggcccggctggccgagcaggtgcatatgggggcggtgtggggtgcatcgattaactgagcctttgggggaggaggtcgtggtgcttgcaatgctttcatttgaaattaaccttaaacccccatgtgctgtaatgctttcctgaattggaaattaaggggatattcttgctaatggttggtggcttattaggtgcaacgtgcattgcaaaatgtttagtcatttagacaagctctcccagcataacatttctattaataagaagaataggttaatcaatcaaaattatttgaacaggatcgatggcatcacaaatcataatgataattaagcgtttaatttaacaaaaaccatgcctgttgtattctgtgtttaaactgatgggagaactaatttgggttgactggtctaataacccggtatactggtataaatcgaaattaaattaaatttgtgggattaaccatgttgatggtgaactggcttatgcttgttagccgcacttaacagtaaatcacacaatcaccacacggcttggcttgccccattgaaacatcacccactcccttacaaagacgcactaactccaatttggcatctggatcgatcatcaacgcctgctacaattccaaacgaaatctctatgtgtgtatcctcatatgtgttttgccttttgtttcgtccttccccacaacgcataccaatccccaaacaccccaatccgttcaaatcctcaaaacccgtacaaatagagcacggaatcttcagaaacaacaacggaccaggcggtgagtgagcccccgatcacgctggtccacgttctgaatcccggcgagcgggagtatttgtcacccaacctgattggtgtccagaacattgcgatgaccttcctgccactgtcgatgaactttgtgaatatcatcgacgcctttcgggaaatcaccgccggagtgcgctatgagatcctgctaaacgcgctagacacaaaggcaatacagccggcggaagcggacatagtctgccgcctggtcatcctggaaaagccttggctgcgcacccagtggggcgacaagcaccgcgaactggttacctccaattgcaccgacccagcggtgaactcggtggccggagatccggcagagaaggcgcgactgcttaacgagaaatatgtgagtaatagcatctttaatggcggtcagaggaaagaactgagcgacgcagagatggccaatctggagtcacagatactcactaacctgggacctatgaggcggaaggtcagtctgaccaaaaccgcttcagcggctcctgttcgtgcaccttctcctgctgctccttctcctgccgaggctgcccctctggattcggcagctcctgctgtattaaccgcatctatagcagtcaccaagcttagtccacctgacgccactaatgagacggccacggcaattagcattgataatgtggaagaaaaggcagaagaggtggaggacaagcacgaagaggaggtcgtagccaccaccacaatcgccacggagctgaacgaaaatgagaagcgttggctcgacgatttcctatcggtgggtgcgtatgacttcgagaagagtcaggagaaggggcagcaacaggaggaggccggccgggagcagaaggatcccgaggtggaggctactaccataccgacagcattatcatgaatattctcattatcatcccagacacacacacacacactcacacacacagccagccccatcgttcagagtctctgtctttctcatataaatactcagcccactcattatacatactcaccctaatgcgaacaataaaaaaggaaaatgttatttaattgaatttatttaagcctgccttttcacctgatgacgatggcgatgtgatgatgatggttgggttcgtcggcatggcagaacacttatttcaccttaataatcaaatgagtttccgctctcaaattacggccgcaatctgtttaacccgccgtatcttagccgtattcgtggcacctgtgcaggggccatctgcacctgtctatatgtcttggctgtgaactggggttgggttggccccaagtgccggtatgtatgagaggttaagtgggtggaggctcaggattcccctcccgctcgccgtgtagtgcccgcggtgtcgacagaagctgaaatacacagagtggtgcgaggcaagtgttctcattatccttgtgctctactttttacagcagttggctctgtggtgccacgcacagtgggtctgggcgatttgtctccggcggtcggtggccactttccacccgacttcgcgtcgagagcataaggggttaagtaatcaatgacacaatctgcaattttaatggtggcgacgctgctctagagcgtgggttttccaagtgtgagccgtttgatcgcaatccattgattggaaattttgtgagcaggagtatctacattgtaccatattgaatttaaactgaaggggcatttggtctttaccggatttaggaattaaatagccactgcggggagtgtaacttttgacttccaattaataaatccattatttaattactttgtttaaatccagctgccgaagagggaaataaattacatttgaacgcgataattcgcttcaatcttcgttggacatgttcaacaatcggaaattcctttgccaacattatttccaacccatataagtgcctaatgagctcctggaaaagtcatcgcggaataaattaattaagtgctttgaaaacgagaaccattcagttcagttgcattgctgatttacggcaactgtcagaaagtatagcgccgcgttcagcacttcactgtctatacatccgaatggatttcacggaccattgcacactgctcccacccacaggagccacatactccatgcccagggttctcctctgttgccccagggtcgtggaaacatcatttacgatataattcttattgaaatacacatttgaattaacagttccccccgtctcgatggaatgagatgggataggatgcgatgggatgggctaaaatgggttggatagtaggccaggccagttgaactgagatgaggctggaaaagggagtgcttagcaggcagcttaatgaattcatgttcggacacagtatgcacacatctatagggatgaccacggactcccagttccagcgacggcctctttttgtgttcctgtatttttaattatacacacgtcgtagccattacattccattcggtattgttgtcgctacataggtgacctcctgcacttcaaaagtatttgcactgcatttcggcttgaaagtttctaaagccgcacattggaatttttgaataaataagtatatatggataactccctccaagggcaaacagtagtatagaagatataattcgttcttttcctcctcaacttacatgttttcctagcccttgtaggccataaaatgtttcgagtgtggttccacctgcaatccttattcgcattcgccatgccagttgcccgggtgtgacagcaggagcagacatttggctcctggctgtgggtgtggatttggcagagactggggctccggatcctcagaaaccaactcccatcaacggcatcaacatattactcgtaccatcatcgatgccaggcggcaaacgaatatccagccgaaatgtttggtttaattggttttgtgttcagcattgaatggtttatgggccgcttgtgtctgtcgatgttattgttggcgtatcccacattctgggggatgggagatgcctttggaccgccatgttccttgccgcaaactcttccagccacgtgtactagaacgatgtgtcgttttgtcagattcggtaatgtaaattcagacatatccttgttttacctacattcgcatataacttatgttccctccactcctacccaccactgctcgtggtgtcggaggtctgatgtggtgacagctgtgtgtctgtttgtaatggataagtgtttccctgttccgtaattagcacaagattagcgaactcacagacagcaaacaaagggctgatttggcttgtcttttggcgtgatgcgtggaatgtatgggtgggatatattgtataggattaatggaatcttcacttgtctgtttcccattcaagcctaaagaaataatgaaggtatataaaaggaggtaaggactacctgcaaaacatttcgaaaataaaggtcaaagtagggcctggagtcgagctaagttgtcaatgtcgtttgcgtcccagtccaaattcagtttacattactcggttacctcagtccgaagccactagacatatattttttaatattttgtaaggtgcgtaaatacttaacatttttttttaaagtttattgatcgataaacacggtttgtgcagagattccttccattatggaacgattcgcactgacaacctgcattcgccgtgtctggatcatgtccggatggctgcgccaggaggcggcaatagcagccggcatgttggtggtgcagcgacaccaggttgagctgaggaatgaggaggaggaggggctcaaagtcggacagcagactgcatccagtggcggtgacgtgggcgtggactcgcaaggaagactccgccgcgtgcggctgctagacgactacattgtgccctttgaatgcggtctttgattctcgatccccatctcctgttcaccgatatggttctgggccacagcgcagttagttcatttcgcattcgaagcagttggcattcaagtagttcgattcgtgaaaccgcttctccaaattttggtcagacggaatcttcattgtatgcgctctacgtggacggagaacgaaaacaaatattttaatcgaagatatagccccaaaaagcatgttattgtaaaattttatattttcacgagtagttcgcgttaatctcgacgttttagcgacattaaaattaaacaatcaatggtgaacactttttatggtttactgagcttataaatcgagattggaatatttccgagattccataaaaagttggaactagcctggaattaaatggcatccgtttgaaaggcttttaaatacccattactcatgaagtggaagtggaatcttgatggaaatgtgcaaaaaataaagaaaattcgagaggaaaagttcatttattgcaattgctgtgtgtcatgtgctgcatctgcgtcagtagaatgcgtaaactacattttctagcatttcttgtttatatgaacagacggatgattggaccatggccatgcagttactgtttatgtaattaagctagattactatgttatcaacattgtcccagatttttatgcatgtatacattttttgcaggtccatcgcagcagacgcagcgcgaacgatatcttgggtaggcataagccttacgatgaagaggcggcgaaggcgcagctgcaaaaatctctggacaaactgaccgcgggagagggtccccattacaagtaagcttgtatccattaattcaagtgactaaaccaataatgtaagagcaaagggtatgctagatttagcgtaacagagttacaatctgagttgatctggtcataaccataaaagctagaaagttaagactaaacatgcagaatgtagagaagtaaggttcagaaactattcaaaaatgtaacgtacacacttttgaagaacttgtaggattttcttcattttattatattaataagcattaagtagatttgtctgattcattataattgactcgctcgtttgctgtgctctagaattgtgaaagtatactcagcctcgcggcaagtggattcaggcatcttgacccgcatcgatgcggatctaatcgacgggtcggaggagcagcaccgctgtatcgtggatatctggacaaaggtctgggtgaggaaggatgagcacgaaatcacctttaagtgccgcaaccagccggtggtccaggcccgacacacgcgatccgtggagtgggccgagaagaagacgcacaagaagcacagccatcgctttgacaaggtggaccacctcttctacaagttccaggtgcgatttggccgtcgctacgtaagcaccgccgagcgccagatgcgcctgcgcattttccgtcagaacctgaagactatcgaggagctaaacgccaacgagatgggcagcgccaagtacggcatcacggagtttgctgatatgaccagctcggaatacaaggaacgcacgggactctggcagcgtgatgaggcaaaggccactggcggatcggcggctgtcgtaccggcttaccatggtgaactgccgaaggagtttgactggaggcagaaggatgctgtcacccaggtgaagaatcagggatcctgcggttcatgctgggccttcagtgtgaccggcaacatcgaaggcctgtacgcagtgaaaacgggcgaattgaaagagttctccgaacaggagctgctggactgtgataccacggatagtgcctgcaacggcggcctcatggacaatgcttacaagtaagttacgagggaatgaacattacgatgtagatacttatgtaataattcctccgcagggccattaaggatattggcggcctagagtacgaggctgagtacccatacaaggccaaaaagaatcagtgccacttcaacaggactttgtcccacgttcaggttgccggcttcgtggatctgccgaagggaaatgagaccgccatgcaggagtggcttctcgccaatggtcccatttcgatcggtaagtcgatgcagaaaattaaccccaaagcccacttaaccagatcatttctctaggcatcaatgcgaatgctatgcagttctatcgcggcggagtttcccatccgtggaaggccctgtgctccaagaaaaacctcgaccacggtgttctagttgtggggtatggcgtctccgactatcccaatttccacaagaccttgccctactggattgtgaagaactcgtggggtccgcgctggggagagcagggctattatcgcgtttatcgtggtgacaacacttgcggcgtcagcgaaatggccacttcggctgtgctggcctagacttgctttgagtccaattatatacaagcatacgactatatctaggttaataatttagccagtaactttgtgtacaattaattctgtttccatgttcttcaaccgtcacgataaggagtcgttgagtttcaaagcttcgcctatatagtataatcatttcagacatctgtaatctcacgaaaaagtctgcatccacatattccgctttaattgaaaataacaataaattgtacaagaattaaaacctggttgggtttattattgaatccatgacagctctggccgcagcaacagttggtcaagattgatggttggttggatcaagaaaaatgttgaatttatgtgagatgtattcaaattattcgattaaaatggtttgattaaatatgggtgccagagtattattggctgttaagaaatatttataactgcttcaattactggaacatttgacccagtgattttgatgattgattttcaaacactttgtcagtgtgtagaagtgcaatatgttaattagatttagaccagggccgtcgcaccgtgggaagccatagaaaatgagtgtttctggtgcagaaccagccagctcagtagcagcttgaagcgcatcgcgggcggtagcggagcaatggccatggacgactacgatgatgacagtaagtgaacacagacaaaaggatgcagatacaaaattgcgtaaaaatcattacccagtgagcagcgtgggcgtgaccacggcccgaatcgagaaccagcaccaacagcacccccaccagcagggtcagcatggacaccaccaacagggccagggtcaaagccagtacagcgcaggggcggtcaaagtgggcggatggcgatacgaggacgccagtcgctacatcggcgagtggaaccagcgtggccaaaagcacggcatcgggcatctgcagttcgccgatggcacccgctacgatgggcagttccaggagggtcttagtcaaggagtgggctgcctctggttcgcggatggagcaaagtcagtttcaataatattagtgatgtaaacctaaacgaaatattgtagcacttgaaaactattcttgtagccactactcggggagtaagaggaaatgctagtatatatattcttgatcagaaatggtttagctataatttacctagggtttgcatccagtgaagaaaattgtatatgatgattcattttgcacatttttaagacagatacgaaggcgagttt

SEQ ID NO: 4553 - DNA, 1882 bp, DROSOPHILA
tcgacatcggtccacccctgtctcgcagaaaacaaagaccaaaaaccaccaaacagcaaaggcggtgtatttcgatagcggaacgcgaaacaatcgacttcacctgtgcgcgtgatttgtgctaaactcattgtgaaacgagcgcaccgaaagtcggcgagttttctggcggatatttaggaggcccccaccgcagccactcacacacgcaaacatgaggctgtttgcggcagcaacagttgcgcttgtattgcttctgggccaagcagctggcgaggagcttgcggaggagcgagcgggacaggcacagggcgatgcggaggtccatcgcagcagacgcagcgcgaacgatatcttgggtaggcataagccttacgatgaagaggcggcgaaggcgcagctgcaaaaatctctggacaaactgaccgcgggagagggtccccattacaaaattgtgaaagtatactcagcctcgcggcaagtggattcaggcatcttgacccgcatcgatgcggatctaatcgacgggtcggaggagcagcaccgctgtatcgtggatatctggacaaaggtctgggtgaggaaggatgagcacgaaatcacctttaagtgccgcaaccagccggtggtccaggcccgacacacgcgatccgtggagtgggccgagaagaagacgcacaagaagcacagccatcgctttgacaaggtggaccacctcttctacaagttccaggtgcgatttggccgtcgctacgtaagcaccgccgagcgccagatgcgcctgcgcattttccgtcagaacctgaagactatcgaggagctaaacgccaacgagatgggcagcgccaagtacggcatcacggagtttgctgatatgaccagctcggaatacaaggaacgcacgggactctggcagcgtgatgaggcaaaggccactggcggatcggcggctgtcgtaccggcttaccatggtgaactgccgaaggagtttgactggaggcagaaggatgctgtcacccaggtgaagaatcagggatcctgcggttcatgctgggccttcagtgtgaccggcaacatcgaaggcctgtacgcagtgaaaacgggcgaattgaaagagttctccgaacaggagctgctggactgtgataccacggatagtgcctgcaacggcggcctcatggacaatgcttacaaggccattaaggatattggcggcctagagtacgaggctgagtacccatacaaggccaaaaagaatcagtgccacttcaacaggactttgtcccacgttcaggttgccggcttcgtggatctgccgaagggaaatgagaccgccatgcaggagtggcttctcgccaatggtcccatttcgatcggcatcaatgcgaatgctatgcagttctatcgcggcggagtttcccatccgtggaaggccctgtgctccaagaaaaacctcgaccacggtgttctagttgtggggtatggcgtctccgactatcccaatttccacaagaccttgccctactggattgtgaagaactcgtggggtccgcgctggggagagcagggctattatcgcgtttatcgtggtgacaacacttgcggcgtcagcgaaatggccacttcggctgtgctggcctagacttgctttgagtccaattatatacaagcatacgactatatctaggttaataatttagccagtaactttgtgtacaattaattctgtttccatgttcttcaaccgtcacgataaggagtcgttgagtttcaaagcttcgcctatatagtataatcatttcagacatctgtaatctcacgaaaaagtctgcatccacatattccgctttaattgaaaataacaataaattgtacaagaatt

SEQ ID NO: 4554 - protein, 475 aa, DROSOPHILA
MRLFAAATVALVLLLGQAAGEELAEERAGQAQGDAEVHRSRRSANDILGRHKPYDEEAAKAQLQKSLDKLTAGEGPHYKIVKVYSASRQVDSGILTRIDADLIDGSEEQHRCIVDIWTKVWVRKDEHEITFKCRNQPVVQARHTRSVEWAEKKTHKKHSHRFDKVDHLFYKFQVRFGRRYVSTAERQMRLRIFRQNLKTIEELNANEMGSAKYGITEFADMTSSEYKERTGLWQRDEAKATGGSAAVVPAYHGELPKEFDWRQKDAVTQVKNQGSCGSCWAFSVTGNIEGLYAVKTGELKEFSEQELLDCDTTDSACNGGLMDNAYKAIKDIGGLEYEAEYPYKAKKNQCHFNRTLSHVQVAGFVDLPKGNETAMQEWLLANGPISIGINANAMQFYRGGVSHPWKALCSKKNLDHGVLVVGYGVSDYPNFHKTLPYWIVKNSWGPRWGEQGYYRVYRGDNTCGVSEMATSAVLA

SEQ ID NO: 4555 - DNA, 6559 bp, DROSOPHILA
ttttcaagtcgctgacgcacttaatgtcgcgacctcgcccccccttaacccctgcgccgtttcttatacaaatagtaaatcagctttaatttgcaatctaatagaaataacaacgcagcccgcagccaaatgcgactgggggaatgcaaaagatttcgttaatatgcatttcccagcgaactaaaaaccaactaagtgagcgattgtctgagttccagttgcacggcggcaaacgcggcatacgcggcgtatgcgcattatgtaaaatcgctgcatttgcccagccttcgatggcgaaaaggggtcgccgtgggtcaatcggagtcgatcgaggaaacggaaccctgccttgtggttccatggactgcgaggtgacgaggtggcgaggggaaatgccatatacaatataatacccatacttgtaatgcgagtgcacaattattcccattatttatcaatatttatgatcataagcccgccgtgcttctcttactttgtatctgctcgggctaccagttatttctcagatcaatgacaatgtatttatttgcatgcaagtagaacaccactattagtcacagcgatcactgatcacctgcctcacctcatgacttcatgattttgtgagttctgctatccaatatccagtgtttacaatagctgttcttctcgatcataattacttatttactctattagaagggccttgctgcggaattcatagagaaatgtgcaaaatatctaaatcttttgaagctctcagagaatctaataaatacgtgttttttgctggaaaaatcgctatgcctcaggcaatttcaagggaaataactttttaatttaccttactcatttctttagcaagcaattatatttgttaagtcatgactaatatcacttgatatatcttgtgttacgaaagtgttgatatgatctcataattattaaaagtttgtatatacaattactcggtgttctagattaaaactaatattttcttgggataaaaacatatggtttgaaatttagttattgactcaccctctcttcttcgcgtatcatctcggcgatttctggcttgatctccatgtcatcgtgatgggatcccaccgccgcgccggctccacttcccgccactcctgttcctccagtcggagcactggcgcccgatccactgccagatcctgctccgcccgctcccgctgcgccagctccggcggctgcggctgccaaggcgctggccatggcgtgcgagtgggccagctggtgctgggcggccagttgctgggcatgatggtgcatggcggaggggggtggcggcacgatggcggccatgtggggcggaagggcggactggacggccacgcccccgggtggggagtgcatggcggcgccgctgttcccattgctgtgacctgtcgctgttggtgctggtgatttcctctggtttgctactgcattcatggcgctgttcctgccctccaaggtctgaggattgggggaggcgaagggattgcgcacaatggtggaggtggtcatggccaggggttggctctggctctgtcccggagtgccggatgagcccctctccgagatctcggactctccgccctgaagggatggacttggagtggcgtagctgccatccctggaccgcttcctttgtcgctgattcaagtccaagactccctcgggcagcagtctgggcctcttggccttcatctcctcatcgggatcggcatcaccgtcctgctgcagaattgcagtggccgaggccagttcctcctcctcgtcctcatcgtcgaaggcggacatgggaagtgcggaggcgcctccctcgcccctgcccgcactgacctccgccagacccctgatcttcagggtttcggccactttgagcagggggtttatctgatcctggcagacgttgatctcccccttgtacatgaactccaccagggccttcaggtcggaccagctgacgtcccgcatgatgatgatggggtgctggcagggattgtcgtagaacagggcctggaagtagggtgagcaggcggatagcaccatcttgtgtgccttgatcgagtggccttcgcaggacaaggtcacgtccacgaaggactcgctctgaaggagttcgtcaaagacattggtcaggttagactgatagttgttccacctcaggcagaactgctgcccctcgccgctgggaggaactattttgcgcctcggcggttttgtctctggattggttttgatcttggtctccacgggagaggatctctgaccgaattcaaagagcgccgatccggctagcttaagatttggttgaggctgtggggaaactggtagggagcgcgacttcttggcctccaggcacatgcgcagctcggtatgttcgggatcccggagacccaccacttcactggaggtcagaggtcgtggtgggggagtcaaagcttggtcgttcatcggactcgccttggacttcaccagctccgtttccacatccttctcgggtgacttgacttctccaacgctctccgtatctttttgcatttgatcaaccacctcacttggatcctgcagagtgggttcaacctccctttcgggtgagtactttctgttctggtcctctagatgacccaactggggggactcttccaccatcttaggctcttccggtggagccattgtgtagtcactcgcctcgaactgatcgatttcgccgatcagttccgactttatttcaaagtccacaatctgtttggtcatgtccatggtgctgttatagagttttccttcttatcggttgtcttgcaggttttctgcgggatttctaacacattttcgggggcgaaacgagaacttttcctgggagcagttcaaagctgaaagagaggaaaactcacatgattgtgcgaacgggattgacatatgtaacatacaatatatggacagctagtatgaaagtcttgtatacatttaatttgtttcaattaactcggaataagatatttaactgccaatcaaagagaatgctggctataatatggctttatcttgtctgccacattattccccctgccaatcgaatatattttgggatctataacgataacgaacgtggcaagtgttttattcacatcaagctgaatcagcgggcacatttgtgctcttagtcataactctattaaataagcctattaatcttgccccatctccctgccagtcgaaatttccatgaatttctattaatttatgtttagtatttgccagccaccagccgaacaatcgccacccaccacccaccacccaaccccacccactgtaacgcccaggccagaaatgtgctttattagctaaaagctaagcacacatttatttatgtttaatttggcttaatttatattactgagctgcaattattcgtagtctccgccgctcattgttgtatttatacgcacatatctatatacatacatatatatattgtatatatgcatatacatatatatttatatatggatgcgtatatagcggctttgtaagtgtgtgcgcgcgattattgcttattttgtattgttgtctctggatacacttgcatgcgcacagcgcccgtctatagatttatatttaattaaatattattatttatggcagagctcggagagagtgggcccaaagtaattatatttatttaaatattttgtataattttaatttatgtgtgtttgtgcagcacacttgggctcggttcgcttgggtcgtttttgtcggggtggaaagttgctgccgccatgaaatttaattatatttattattattgttattataatacttcttcttgctactttttatgtttattattatttcattccaattaaatcttgcggccgcagctcctcggcgccgtccacagttattatttttgtttattttattgttgttctggatccggatacgaatccatggactcatcgtcgagggagctgaagagctgaacagctggagaattgaggagctgatgagctaccccgaatcctcagagtttcccgaactgtgggctgcggaggaaaatcggtcctactcctcttcctactcctgctgctcttggcaacttttggtttattgttatggccgcgctccgccttttgttattccccttatttattcatgtttgttgcttttatcgtggctgctcgcattaaatttgatgattcttgggaaaaactcggcctcaaataaataaataagtaaattgccaaatgcagaagattcgcacatctccaaagtcgacacatcaaagctgattttatgattattcaagattttcatttatttattaccaaagcctggccttaaataaattcaaaattatgttttagaatgagtttcagtttttcgtgaatgtggaagcaaaaaactaattttttccttcatatacaattataactgctgacaagtatctgactcgaaatcctaaatacttcaaactccctgatttcttgcctttccacactcttctttcctgcttcctcgtaatatattattttcgtttaattatttatagcaagcgcagctgttggcagccaaaaaaataaaacagcaggcaagctgggcactttatttatttattatttctgtatttatttatttaattcagtctcgaggttttgtatccttaaagtgggcccgcccgcacacaaaaacgaacacaaatacacgttgagaaacgggggggcggtgtgcgggcgctcggacacatttatatattgcatattgtatttatttattaacgcttatttattatttatgcagcaagtaataaattacagtctggattttctcgtgtttcgctcggctttcgctgtgtgcaaaatgtttacaaactgtttttggcgcgtgccacccactcggaaaagcgggagctgtggaaaggcaggagctgtaggaaaagttgctccttcgagtgggttttcttcttaattttcctgggcgcccaaaaacgaccaagcaacattgctttttacgaccttttcgctgggtggcttgtgttataaattaataaattacaatttctttggtagcgccaaggaaaatgcgcggaaaatgtgcgagggggtctggcggggatggcatttccactggataacttatgtagaatagtacatggtcgaggtataaaatcgattttcattgcagcccagtcatttgtcataaataaagcaccataattaatataataatcaacgcacacatacatttttcgtctggtattcactcgatgggttcacttttagttcactttcttgttttattaaatattaacagaatacttgtgtttatgttctgtttgttttgttcactgcatgcaacacatgctgttctgcttgtcgttgttgcacgtcacttgttgttgcttttgctttgctgtctttgctgccgcttctgtcgttgttgttgttgttgtgggtattattgttgttgttgctggctttcagtggccgtaaaaacaaacgctgcactccactcacgccgaaagtcagatacgaactgaatctcacagataaacgaactgaatttcaaaaaattgaatgaaactcgacgccgcgctgccgacgtcagctgcgctgcccgctctctcgcggcgaatgagagcgccggcgtggtgttttccggtttttgcggcgaattgggaaatcgacagagcggcggtttaagagcgaaagtaagtgtgctctttgctttctttgttttgaattttcagagatcttgcttgaaaaaaaattgaaaatttcgaaatttttagaaatgttagaaattataattaaaatgaaatcgtgattgtataagaggagaacatattttattaatctggaatgcaattgttttgttatttttttatacattttagtacagattaatagttttttattcgaatcatatttctcatcataaaaaacatacatttcactacgatttttatataattgtctaagacccaacgtttcttttttttttcgttgtcacataaatttgcgaaagtagtttttactatatcaacatacttcatttacaattaaaaacgaatcatatttattataattagtttgaatacttattgaaataagttctcttatttatataaatgccatgcttaccaataaatcgcaaaaatcttaacaaatcgccaaagcagcatgctaaggtcgcgaaaaaattgcagcctacacctgcaacttgaagagaatagcaacagcaacttgcaacctagctgcagcagcaacaacaacagcaacagcaggggcaagaaagagaaactggccaatgtccagtaagaaagtgtttcaaaatagttgccaaccctctttcttcttcttctgcatcatccttaacctccttgttgttgcttttgctgcttaggcacagaaactatggcaaaaaagagcagagaaaaagtggcgacagcaacacactcacaacttggccacgcccctaaaagtgccgtaagagggcgcgagtgcgagtgggacagcaagctgcttgctcctacaca

SEQ ID NO: 4556 - DNA, 2186 bp, DROSOPHILA
cagttcgtatctgactttcggcgtgagtggagtgcagcgtttgtttttacggccactgaaagccagcaacaacaacaataatacccacaacaacaacaacaacgacagaagcggcagcaaagacagcaaagcaaaagcaacaacaagtgacgtgcaacaacgacaagcagaacagcatgtgttgcatgcagtgaacaaaacaaacagaacataaacacaagtattctgttaatatttaataaaacaagaaagtgaactaaaagtgaacccatcgagtgaataccagacgaaaaatctttgaactgctcccaggaaaagttctcgtttcgcccccgaaaatgtgttagaaatcccgcagaaaacctgcaagacaaccgataagaaggaaaactctataacagcaccatggacatgaccaaacagattgtggactttgaaataaagtcggaactgatcggcgaaatcgatcagttcgaggcgagtgactacacaatggctccaccggaagagcctaagatggtggaagagtccccccagttgggtcatctagaggaccagaacagaaagtactcacccgaaagggaggttgaacccactctgcaggatccaagtgaggtggttgatcaaatgcaaaaagatacggagagcgttggagaagtcaagtcacccgagaaggatgtggaaacggagctggtgaagtccaaggcgagtccgatgaacgaccaagctttgactcccccaccacgacctctgacctccagtgaagtggtgggtctccgggatcccgaacataccgagctgcgcatgtgcctggaggccaagaagtcgcgctccctaccagtttccccacagcctcaaccaaatcttaagctagccggatcggcgctctttgaattcggtcagagatcctctcccgtggagaccaagatcaaaaccaatccagagacaaaaccgccgaggcgcaaaatagttcctcccagcggcgaggggcagcagttctgcctgaggtggaacaactatcagtctaacctgaccaatgtctttgacgaactccttcagagcgagtccttcgtggacgtgaccttgtcctgcgaaggccactcgatcaaggcacacaagatggtgctatccgcctgctcaccctacttccaggccctgttctacgacaatccctgccagcaccccatcatcatcatgcgggacgtcagctggtccgacctgaaggccctggtggagttcatgtacaagggggagatcaacgtctgccaggatcagataaaccccctgctcaaagtggccgaaaccctgaagatcaggggtctggcggaggtcagtgcgggcaggggcgagggaggcgcctccgcacttcccatgtccgccttcgacgatgaggacgaggaggaggaactggcctcggccactgcaattctgcagcaggacggtgatgccgatcccgatgaggagatgaaggccaagaggcccagactgctgcccgagggagtcttggacttgaatcagcgacaaaggaagcggtccagggatggcagctacgccactccaagtccatcccttcagggcggagagtccgagatctcggagaggggctcatccggcactccgggacagagccagagccaacccctggccatgaccacctccaccattgtgcgcaatcccttcgcctcccccaatcctcagaccttggagggcaggaacagcgccatgaatgcagtagcaaaccagaggaaatcaccagcaccaacagcgacaggtcacagcaatgggaacagcggcgccgccatgcactccccacccgggggcgtggccgtccagtccgcccttccgccccacatggccgccatcgtgccgccacccccctccgccatgcaccatcatgcccagcaactggccgcccagcaccagctggcccactcgcacgccatggccagcgccttggcagccgcagccgccggagctggcgcagcgggagcgggcggagcaggatctggcagtggatcgggcgccagtgctccgactggaggaacaggagtggcgggaagtggagccggcgcggcggtgggatcccatcacgatgacatggagatcaagccagaaatcgccgagatgatacgcgaagaagagagggtgagtcaataactaaatttcaaaccatatgtttttatccc

SEQ ID NO: 4557 - protein, 583 aa, DROSOPHILA
MDMTKQIVDFEIKSELIGEIDQFEASDYTMAPPEEPKMVEESPQLGHLEDQNRKYSPEREVEPTLQDPSEVVDQMQKDTESVGEVKSPEKDVETELVKSKASPMNDQALTPPPRPLTSSEVVGLRDPEHTELRMCLEAKKSRSLPVSPQPQPNLKLAGSALFEFGQRSSPVETKIKTNPETKPPRRKIVPPSGEGQQFCLRWNNYQSNLTNVFDELLQSESFVDVTLSCEGHSIKAHKMVLSACSPYFQALFYDNPCQHPIIIMRDVSWSDLKALVEFMYKGEINVCQDQINPLLKVAETLKIRGLAEVSAGRGEGGASALPMSAFDDEDEEEELASATAILQQDGDADPDEEMKAKRPRLLPEGVLDLNQRQRKRSRDGSYATPSPSLQGGESEISERGSSGTPGQSQSQPLAMTTSTIVRNPFASPNPQTLEGRNSAMNAVANQRKSPAPTATGHSNGNSGAAMHSPPGGVAVQSALPPHMAAIVPPPPSAMHHHAQQLAAQHQLAHSHAMASALAAAAAGAGAAGAGGAGSGSGSGASAPTGGTGVAGSGAGAAVGSHHDDMEIKPEIAEMIREEERVSQ

SEQ ID NO: 4558 - DNA, 3605 bp, DROSOPHILA
cgaatccgagtccgaagcccgggcagctgcattcagctacagcattcaacttggcaacaggaagtggcagcggtattgttgccgcttatctgacgcggagatgcttccttgagatttatttggcatctaggcaaaaggcatcgccatagcaagcgccatcatcgtcatcatcatcaccatgatcatcgccatcgtcatcgccactgcagttgttgactttggctcatggcctttttgccaattccagctgaacgatggtgccgacttcttcggtttattcggttttttcggcacttatctaacttccgggtgtcgtaggtcggaatcgaatttttatgagttgcatcttcgtcgaattgctgccattgaatcatcgccgaaactaccgatattgcctcatccacattcacaccgggagcaacgcttcgtccgcagatgcgcctgtttggtatgaccattcaagccgtaattaaaagcatttagtttttatgtttatgtttatagttatagttttatttcgtttcagctcttcgaaaaatgtttttgtacatcaattttcgtgtctgtggtccgtatgggaattacaactaagtttaagtacatatttacaaaataattttttccgcagcccggctttgccacatttcgcccatagaaagatccctagagtcattattgtttttgttgttttattgaatttcgtataacttaaagacaaacgcgcgcatgactaatttgtacacttgtgggagacggcgatgaaggaggcggggtatgggtaaatccaacagataacgaaaggtatgaaaggtgttttgtacaaaatgcaggaggaagtgggatgccttacaacattaagtctatgtaacaatttgagtggggatcgtgatctgcggaggatggggcaaaccccaagggattagcaggatcagcgggagcagttatcagatatcagtgctgtcgcttggctggtggccaagcggagactcctgccgcggacctagtcccatccgtggccatggctcactggcacccacaccttctcccagacgggcttccacaccttcttccactcctgcaccttgacctccttccagacgggcacgttgaccgactgccactcgtccttccacgcctgccgcttctcggtggcccacacctggcgcttctcggtgcgccagatctgaaccttctcctcgatccaggtctcgcgcttctccttaatccagatttgtttcttcacgggcttccacacctggatccactcgtccttccactccagcttcttgtcctgcttccactcctgcaccttctccgtcttccattcctgcttcttctcggtgcgccactcctgcttcttctcggtcttccactcctgcttcttctcggtgcgccagaccttcttccacacgggcttccagatcagcttcttgcgccagagatcgtggctggtgtactcccagccctcgtggtccttacccaagaacttttcgccgggaatgcccattttcacctgtgcgaattttcaatttagtgcctatgtcaacggagatcgggaaactacctacccattggggctcaaacatttgcttccagtctgcgacctgtacttccttccaaatgggcacttgtatttccttccagtacgggacctgcacttccttccaaatgggcacctggatttccttccagacggcgacctttgtgggcacccaaatgggtttcgttatcttcttccattcggccaccttaacctccttccaggcaggcacctctctctcctcaattttcggcttctttacgatcttccagtcgggaaccttctcctccttccagacgggaacctgaaggatatccacgcatgtttcataagatcttcggttgaaagagagagtcccattgccataccttgacttccttccatattgggaccgaaaccttcttccacttggtttcccacgcctccttcttaacggtcttccacacctggacccaatcctccttccaggtgagcttcttcttccacactccctcggggggatgggcgtaggctaagcttatgattagcgcgcagctggcgctgagtagctgtggaagaaattagaatgtaattatgtttgttgagtccatgatgtgtatttgcttatatctattttactattggattgaaagtgataactgatgattctgttccgtattaaagatgcttagatcaaaagatttgtgtttcgaatcagaagtctaaattaactttcaagtacgatttcgtaatttttgtaatctttgctgtgttccaagacataaacttcaaccttatgtgggctttaatttcaacgcgactttggtgttttatgtgatatttttatgtgttttttattattaagttttgggttttgcacagttatgttcacttcatttatatatttccgaattccacaaatgttttcatgtttgtttctcgaggatgcactatggtatcttggagctggtatctttcgtatttctcggacactgaccaacagacttagggatctcatgcttggtatcccttgcaccaccaacagcgcgttaaaacagaaggagctgatatgtgcctcctctgaggtcttctatgaacactattcgcatttccctacatgcacatctatttatattttgaatggtctcgtctccgagccaccgactccggcgtcgcggtcgccgtgggcagagcagcggcggtggcaaaaacaaaagaagagccaaatccacaccgccagcggaccaaagctctgccgcttggccgctctgcccaggtgggttgctccaggtgcaaaatgcacgcagcagcggcgtcgcgtcgctgccgacgtcccatcgaaagcaaaagcaaggcaaaagcacggcaaaagcaagagcaaagcatagtaaaagcaaaagcaaactgaaatcgaaaaccgcagagagtgagagtggaatggaatggagtaccgctcggcccgccagctgatgaagctgcctcttggaccgccgatgactgcgcggattttcccaaggtaaagccgcagcttcaaaacaatgcgaacaagaccacgaatacgcatacgtactgtaggccggctgtttcgtactgccattggactcgagagcttggacccatgtgcccatggaccagtggacccacgggtcacttgagacccgtcttcgcggagtggatggacttggtcagaagaagatttggtaaagtgcaacgccatccaatcctacgcagctgaaaattaagagatgtacttttatatcgtgattcttctgttggcttcttcgctgtactgtcaaccctgaatttgttgacttaattatttattttttgttatgacgggtgatagcctaactctaaataccatatccgcaagctattttttaggcgtagctagcggaagtttgccaaaggttcacactgcctgtatataaatagagatctataaataaataaatttcttaacagacagcggtatggtattccaaaataaaacataatttgtatcgccattagtctgatgatacaatcaaggtctttggcaacaaattatttaaatccgtactttaataatttgcgtgggtaccca

SEQ ID NO: 4559 - DNA, 1058 bp, DROSOPHILA
cctcagaggaggcacatatcagctccttctgttttaacgcgctgttggtggtgcaagggataccaagcatgagatccctaagtctgttgctactcagcgccagctgcgcgctaatcataagcttagcctacgcccatccccccgagggagtgtggaagaagaagctcacctggaaggaggattgggtccaggtgtggaagaccgttaagaaggaggcgtgggaaaccaagtggaagaaggtttcggtcccaatatggaaggaagtcaaggttcccgtctggaaggaggagaaggttcccgactggaagatcgtaaagaagccgaaaattgaggagagagaggtgcctgcctggaaggaggttaaggtggccgaatggaagaagataacgaaacccatttgggtgcccacaaaggtcgccgtctggaaggaaatccaggtgcccatttggaaggaagtgcaggtcccgtactggaaggaaatacaagtgcccatttggaaggaagtacaggtcgcagactggaagcaaatgtttgagccccaatgggtgaaaatgggcattcccggcgaaaagttcttgggtaaggaccacgagggctgggagtacaccagccacgatctctggcgcaagaagctgatctggaagcccgtgtggaagaaggtctggcgcaccgagaagaagcaggagtggaagaccgagaagaagcaggagtggcgcaccgagaagaagcaggaatggaagacggagaaggtgcaggagtggaagcaggacaagaagctggagtggaaggacgagtggatccaggtgtggaagcccgtgaagaaacaaatctggattaaggagaagcgcgagacctggatcgaggagaaggttcagatctggcgcaccgagaagcgccaggtgtgggccaccgagaagcggcaggcgtggaaggacgagtggcagtcggtcaacgtgcccgtctggaaggaggtcaaggtgcaggagtggaagaaggtgtggaagcccgtctgggagaaggtgtgggtgccagtgagccatggccacggatgggactag

SEQ ID NO: 4560 - protein, 329 aa, DROSOPHILA
MRSLSLLLLSASCALIISLAYAHPPEGVWKKKLTWKEDWVQVWKTVKKEAWETKWKKVSVPIWKEVKVPVWKEEKVPDWKIVKKPKIEEREVPAWKEVKVAEWKKITKPIWVPTKVAVWKEIQVPIWKEVQVPYWKEIQVPIWKEVQVADWKQMFEPQWVKMGIPGEKFLGKDHEGWEYTSHDLWRKKLIWKPVWKKVWRTEKKQEWKTEKKQEWRTEKKQEWKTEKVQEWKQDKKLEWKDEWIQVWKPVKKQIWIKEKRETWIEEKVQIWRTEKRQVWATEKRQAWKDEWQSVNVPVWKEVKVQEWKKVWKPVWEKVWVPVSHGHGWD

SEQ ID NO: 4561 - DNA, 3004 bp, DROSOPHILA
taattggagccttgccaagattcttcgctattactaattccggattataaatcgtgtgggagcaatgagtttccactctcacaccctctgccttggccaacttctgcacggcagcatcccgggtcacggagtacggctcgatatctgtctcaaaagttagcatttccacgcgccaactcttaaaaatacggggaaaaacctctgcgggcttcccgcgcaccacaaacagacgggaattaagtttccgaagctggttatccaagtcctccagcgtttgctgcaggaatcgccatcgattggcacccacttgcatccaatcgaggattcctggatccaaaatgaaaatcgggcgaacaaagtattttcctggagcagcgttagcggcggtaaaaatgtgcgataatgccggattgtcgtgcaaccggagtcctttacggaaccagtggaccaacgtggacctttgtgaatccattttggcacgtgtccccgatttcaaacggtacctatgcggatttatcgtagaaaatatatttcaaaagcaagagcgttctaacgaacctgccaacacgttttctgaacttatttacactgcgctgcaaggaaagtgtataatgttctggtgagcgtgtttattttgttcacatacgtagatagggcaagtgcaaataatatgaagacaaatttcattgcataatatgaaatttaaatatgttcacaataatattttatgatgtaaaaacgtagaacttgttaaacgttcatgctctacatgctttaatcaatttaaaattacaaaatgaaatgtctaacctctttttacatgttttgagcaagatattgtatatacatttttttaaatctttcaagaatttatgtttcaagtcgtccgtcgagtgtaaacagctgttttgcgattcgaaaataccgaagtatggcaatagcgaccaagttggccatcctcactttcagtattttttgcagagtttatttggtgcacaagcaccggtagtcaatataattataattacattaaaccacctaaaacaagctgatcaaccgcaatcaaacatctcaacgggataataataaacgccagagagtggtaagttcctaacaatacggccacgaagagcgaacagctcgattaactgaaattccctcgcatatctttcgatggcattgcaggcgcacatccgccaattgctcaacattaagcgaggaaaacacggcggaaaaatggatctgctcgactcaatactcaacgccatggatgcgccgcctgccaacaacgagcaacagaagacgctgatcaagaaacagcgcgaaatgttagagcggatgcagaacaaacagaaagaggagctcctccgattccgaaaatatgtagacgaacggatggggcgattcgccaaggacgacaggcgatgcatcgagtttcagccgctggataaagtgcatcgctcggtgatccacgaagtagccgaaaatggcggcttcattgccatgagctttggccgcgaggatgtggaccgacattcggttgtgtacaaaaaggaacacgctcctggcgaggatgaggtcacggcccgtcggaacggagacggttggaacgaggagatagccaaggagtacgcggagcgacggcgggaacgattggcgcaggagcaaagtgacaaagaagcctccacatccgaagcagcaagttcaggctcgtccacatccacatcagcggatcaggactccggcgaagttaagcccacgaccaactacaaggccaagtatgcccacctcatcggagagtcggccgcactgcaggcggcccgtaagacggagaccaaccaaagctacggattcgtgcctagcaagaataagaaggatgtgcgctccatcgaacaaactttggccgacatccaggccaaaaagcgtctgcgattggctcagcagcaggagctggagcaagagcagcaagcgcaagaggcaaccacatccacagaggacccatgagtcgcctgtgacccaattagtatacagatagctcacttaatgcaagactgtcgcaaccaaaaaaaaggattatacttcttaaatcagaatcagagaatcagacatgacatgctcgtcttgttcgcaaactcctgctcgataacatcgacaatatttgacaaaacagagcagtaatcatcttcagggagccaaagatttttaaatttatagtattcatactatgtttttgcccacattaatcgtatttggtaataggcttgatactaatttttatcttaggttagccccattaaattaaatgccctttttttttgagtaatgacagccttgtatcgagtgagattagttttgttgattcagattagtcacatgaaaggtctctgactgccatgtaaatcataagtaataagcaatttcatttgttggccaattaagatccgaaagttgtacatgttttaagcaagttatgtgtccgtagcagagtccgaatcgcaatatctatttatataataaaaacctaaaaaaaaaaacgtcgcaaggttcaaaaaaatcttaaaaacggggcgccactcaaaaatcaccaaaaaatacagaatatttccattccagtattttcttgttcgtcacttctttcttgtcacggtggtgaagaagcagtcacagtttaatgccagccgaaagccgcaccacgtgttgcccattccaagaaaaataaactaaattagcacgatggctaatagaaaacgcaacaaaattttgcttaatacaatagagaaagatatgtcaaatagctgaaagttatatggtaactaaaagatgtgcggatcacgagaaacgagcaattcactttgacagcctggcagctgtgacccaaagagtctcactttgagacttcttgggaccaaccagcatgggaagtttacgcggtaagaataatacagaaagaagatctccacaaccatgatgaaatcgttagatggggacaactgattactgtgac

SEQ ID NO: 4562 - DNA, 921 bp, DROSOPHILA
caccggtagtcaatataattataattacattaaaccacctaaaacaagctgatcaaccgcaatcaaacatctcaacgggataataataaacgccagagagtggcgcacatccgccaattgctcaacattaagcgaggaaaacacggcggaaaaatggatctgctcgactcaatactcaacgccatggatgcgccgcctgccaacaacgagcaacagaagacgctgatcaagaaacagcgcgaaatgttagagcggatgcagaacaaacagaaagaggagctcctccgattccgaaaatatgtagacgaacggatggggcgattcgccaaggacgacaggcgatgcatcgagtttcagccgctggataaagtgcatcgctcggtgatccacgaagtagccgaaaatggcggcttcattgccatgagctttggccgcgaggatgtggaccgacattcggttgtgtacaaaaaggaacacgctcctggcgaggatgaggtcacggcccgtcggaacggagacggttggaacgaggagatagccaaggagtacgcggagcgacggcgggaacgattggcgcaggagcaaagtgacaaagaagcctccacatccgaagcagcaagttcaggctcgtccacatccacatcagcggatcaggactccggcgaagttaagcccacgaccaactacaaggccaagtatgcccacctcatcggagagtcggccgcactgcaggcggcccgtaagacggagaccaaccaaagctacggattcgtgcctagcaagaataagaaggatgtgcgctccatcgaacaaactttggccgacatccaggccaaaaagcgtctgcgattggctcagcagcaggagctggagcaagagcagcaagcgcaagaggcaaccacatccacagaggacccatga

SEQ ID NO: 4563 - protein, 255 aa, DROSOPHILA
MDLLDSILNAMDAPPANNEQQKTLIKKQREMLERMQNKQKEELLRFRKYVDERMGRFAKDDRRCIEFQPLDKVHRSVIHEVAENGGFIAMSFGREDVDRHSVVYKKEHAPGEDEVTARRNGDGWNEEIAKEYAERRRERLAQEQSDKEASTSEAASSGSSTSTSADQDSGEVKPTTNYKAKYAHLIGESAALQAARKTETNQSYGFVPSKNKKDVRSIEQTLADIQAKKRLRLAQQQELEQEQQAQEATTSTEDP

SEQ ID NO: 4564 - DNA, 2670 bp, DROSOPHILA
cagctgctgctgggactgttcctcttttcgaatgtgatgtccaactatgtcatgtgcatcctggtggaccccagcatcgatcccaagcttatgaagaatcagttggtgcgcggacagcacagtgaggactggcacgagtgcgacaagtgcgggattcttgctccaccccggtcacgtcactgcaggaagtgtggcgtctgtgtcctgatgcgagatcatcactgcttctttactggttgctgcatcggtcatgagaactatagatactttttctattttcttatctacttttttctaagctgcatgatttcactaacgtcatcttcgatatttatttacgttctgcatgggggcagataccagctctttatgctgacacatcccgcaccgaactctgcctattttaactcgcttattatcaggataatctactttaagttgcccgatatatacgagctggtgttcactctggtattcgtcctgctgtggatcggggtatgcgtagctacctatgtggcttatgatcagtggtctcgtggctatttttgctatgattttgaacttcaaaacattccttttgaccgaaaactgcgccgaaacttcaagacgttcttgggcaggcgaatgaagtggacctggatctccggatttgttcccagccagctggaccacgacggatttgatctggatcccgacaacgaacgtgtggcagattggtgctcagaaacaaccatcaaggatggctaaataattttatgcattctctgtgttttccaaattaccggtgcgatgaaaaattaaaaattcgaattcatttgattagttcaggcatgcaagaaagctttccaaattaaaaagttaaatatttaaggatgtgttattatgcgatatgtgtatgtttcgttttatttggtctctactgtgcttgctgattttccccaggttggcagtctcgtcagctgttttcctgataacattgacttgccgcaaaatgcttgtttgtttagtctgaaattggcatctggtcaagatcaactgccagtaggtagagaccacatatggagcccaccaattcggagtcgcggcaccgcctaaatggagggggcaggagttccgcgccagcaggctccggagagtacatcaaggtggtggagtcccaatgcgagaccgatggattcgttaatgaacagtggacggaaccggcgatgccaggtccagtgccttggaagaccattattatcattcttttgctgtttatcggtggcattgtgagtagtgattactggtgcccacacatacatgcacagttccttcgaacttctgatctgatgtctttgtcttcaggtttgcatcgcctttgccaccttaaactgggtgacggacacgagccgggagcgatcggatcgggtgtgggcgttgggtatcatcggggcactgaccttcatcccgggaagctactatgtgtacgtgctcttctgcataatgctcaaccgcaacggattcaccatggacgagatacgaagactcggctgaaaaggagaaaccaaagacaccaaatgtttcgtcaaatagagtttattgcttttacactacagttattcacacatttcattggcataatttctttagcaacaatcttaatatgtagttcattatgatacatgtgtattgccccggtaattgtataaaaatattttttaaacacgagcttcgttatcaaaatgtataatgcttggcgtggcttctagtgcgcggaacattggctatctatttaaatagcgcatcgcttgcttaaatatgtatatgttttacaggcatgaactataggttatatgatttatgttatggccattttctctatcaagcttggggcacagtataactttgtgtttcagcttaattatatacagtgttatgcgttacatgttgtatctatgtaggtaagaattctttacaaacaattgcttttcgtgtttacggatataacagggcgcgtgggaatcaaatactttaacaagagtaggggattagtatggggtgtatacacaatacatacacaaacattgtaacgaaattaaactagcgacaggtaacatttcactgctccacgacggtcacctcgatgggcggaatgaacttccacacatgcgcctgctgctcatcgtagctggaggagaacatgaccgattggccgacactctccgcttctgccggacaggagcgggttagcaatgacgacggctgctccgactgcttctgcggattgctggtgcattcgatgctggccttgaaacgtccgggggtaaagaatatcacagagcaagtatgctctttctgctcctgcttctccagtagtggtattgcaattctaagagggttgatattgtctaaatatttaactgcttcgtttcaatatttttcttcagctctcacctatttggtcctgaaatggccacgcgtgtctccaaattgtaattttccattccgttcaggtaatcctgatagaacttaatgctcagcaccagatttctaagtggttgcagggattgattggccagctggatgcttagcagcgaccgctgtcccaccgtgcatacaatctcattgtgtggctgcacgagcgtgtcttgaaagctgatagctaaaggtgtaatacaattgtcattacaa

SEQ ID NO: 4565 - DNA, 594 bp, DROSOPHILA
tgtttagtctgaaattggcatctggtcaagatcaactgccagtaggtagagaccacatatggagcccaccaattcggagtcgcggcaccgcctaaatggagggggcaggagttccgcgccagcaggctccggagagtacatcaaggtggtggagtcccaatgcgagaccgatggattcgttaatgaacagtggacggaaccggcgatgccaggtccagtgccttggaagaccattattatcattcttttgctgtttatcggtggcattgtttgcatcgcctttgccaccttaaactgggtgacggacacgagccgggagcgatcggatcgggtgtgggcgttgggtatcatcggggcactgaccttcatcccgggaagctactatgtgtacgtgctcttctgcataatgctcaaccgcaacggattcaccatggacgagatacgaagactcggctgaaaaggagaaaccaaagacaccaaatgtttcgtcaaatagagtttattgcttttacactacagttattcacacatttcattggcataatttctttagcaacaatcttaatatgtagttcattatgatacatgtgtatt

SEQ ID NO: 4566 - protein, 132 aa, DROSOPHILA
MEPTNSESRHRLNGGGRSSAPAGSGEYIKVVESQCETDGFVNEQWTEPAMPGPVPWKTIIIILLLFIGGIVCIAFATLNWVTDTSRERSDRVWALGIIGALTFIPGSYYVYVLFCIMLNRNGFTMDEIRRLG

SEQ ID NO: 4567 - DNA, 4932 bp, DROSOPHILA
acgaagacttcgcgcagagccgaagaaacgagaaaccgcaactcgcttggccgctcttcggaagagtgcccgcgagtggaagactacgcagccagtcttcagttcgattcttcaaaataggtttttgatttggagctgcaaatgctgtattttgcaaaaagtttcttttacttggcatgctgatggcaactctgttaggctgtaatatcaggtggaagaccaacatgggaaaatctaaaagttggtctttcaaaagttctaaagaattgcaaactgatggatcacaaaagtggcatttgatggaattttagagcttattcatttagatgtgttactatctttccttacagtttttgatagagtatccaatgtgccacatggaattcacatagattcagccccaatcgacttgggtccgtggggaagtggagctactaacagagtgcacttaaacggaaacagtaacaattgaaagtggcaatttggggagcgtacgcgccttaattagattgcggattaagatggtcccatcgaatcatattcatgggtggatccgcggcgacttccacatggagtcgactctaatcagcagcaattactgtgccaattgcccatgccgattccgctgatttcggctttcgattgaaaatgagaatggctcgttggaaaagtgggattagcagcaatggaaacatgatggaggagaatcgaatcgaggcagtcttttcgatcgtctgcgcatcatgccacaaaaccatgccccatgaccagtgaaattgtgtttgccgggcttgttttcttttatttcgtttacttgcctcctctgcgttttcacacttttcacgaatcgacgtatccattgttgggcaacttggctaatggaatcggcaagcagccaccagcgaaccattaattgagcacgctggcggctttaatagttctaaagcagctggatattagtgtcagagtcgcagtgaatcgcgcagcggtactccgctttaattttcacaattaactttatttattcgatcataaacatgtgcatttacgggagaagagagcaggactacttggctagtatttcggcagctcggaatagcgcggcggcgtggaccacagcacgctggagtttcgcttcagctggctgggatcgatgttcgggaatatctgctttaggtccggtgtggtgggcgccaccgagaaaaagctgtcgatgatgtcggttgggcagtggctctgcatagcaattgcctctccccttacgtggcctgaaaataaacacataagtcagaatctatatttaagaacatttcctttagtagtcccaatggaaatcagactgtaatctggtgtatttacttgtatatatttacgatgaataaggtatctcgaaaataactcttcgaaatgatccacaaacttacttcgactccaggtgggcgctgggggacgcttgtgggtgacctttccctcgtcgtctgtcgagtcgtcttcgtgcagcatctcccaggtgtacttggttttcggcggcggcggaagcatcttcttgggcttggcgccggttagctgctgcagtttctgctgctccagctccttgaacttggccttcttgagcgcctcggcttcctcttgctggcgcatcttccgctgcagctcctccagctcttgtcgtttgcgctcttcaattcgctttcgctcctcctgcttcttggcgcgctcggcggccagcttggccatacgctctgcccgctcccgctccttggcttcgcgctgctgggcagcctgctggtgcttttgctcacgcagcttcttgcgctcctccgccagattgtgcaggcccttgcggaagtcgtctccgctgttctcgcgcgacagcgtttttgtggacgtggaattgaccgaccttaggttcgtaccggtggccgtcttcagcagactagtggccttagacgcgctggcaggtcccttcttgggctgcgccgagcttaatggtagtgtgcttgtcgtttgagtcggtgtgaaaaagcgaccaacagtcggagcaggcagcttgccaattttgggagtgttgtttgatcctggcgtgccctgctgaagagtaaaaaaaaataacaataaatgaatcacctatcaaacagttctagaaagcgccaattgatacagaactggtgaatagtctagcctaattctgcctgctatctgcctgctatatatgtgcaactatactgtacctaccagatcttttccccgcttagggcgcatgctgttctgtgcgtttgccgcattctcgaacgcctccacgcgcattttcactggactctgaagcagtgggctgtagaagtgcaaagattgtttagaaggataacatgcatgaagaggcagggtatctactcacttgaaaagctcatgtgtacgggtaggcagttttatagcctttatgctcgagagcagcttggtcgtcggcagcttctcctccaccgactcgtcctccgttaagaggctgtcctgcttactcagaggttgtttcttgtcgttggagtgcacctcaaaagtggcatctccagctggtcctattggactatcgctcgtcggcgcaggacccagtacgagggtggcgttggaaatcgccacggtctcattgacagcagccggagcaactgcagccactgattgctctgcaacgggcggatcttcgagtgcatccttgtatatggatcgctcctgaaccgttcgcgaatcgctgctacacttgcgcgtgcgcgacgagactggcgagctcttgtccaggtcgctgaatcgttccacctttatgggtcggtggctttccacgtccttcttcttcttgcggaccttcttggagacctccgtggatgtcgtcgtgttgctggccaccgtatcgtccggtcgcgctgcctccgttgttacagaggagacggtggtcacatttgccgtggagaccgcattggttaacgggggcactgcttcggtactgagtttctcgcgctttaccttcacgcggagtgtcttcgtggtgttcacgtcctctgtgactgaggcctcctccggaggcttttgctgctcagctgtttctgctgctggctcttctagttccggctccgctagtttattttcctctaacgcctgtgcactggtgaagctgttaaactgggagactcgctgctcgctctcaaccttgacctttacgagctcctcgctgctgggccgccgcatcttacggttgagtgagggctccttgagtaatttctcggtcttcagcttagcggctcgctgtggccttccggagccgagggtggtgtccgccgagacgggcacaggcggaggcggcatcagcgaggccgtggagttgtgctcgtcctcggcgatagccagcaactgggagttgctgacccgagtgctttgacgggccgacgtgttgttggccgtggcgtctggagctgctcaaatggaatatcacaggggttgttggtcgttaatgctttaaaatggccaggatactcaccctcgggctcattctgatcctcggccagtgaggtgagtcgcttggggcgctttttcgtttgctgcggcgtcaccgaagagttctcctgactcttcgctgccggagcactgtccctcggtttggcctccgcctccggctggcctgtgccgtagaagaggtggtccagctcctcaaagtgggcctaaaaaacacatatgacgccatgttgacagtgtcggaatttcgtctcctgatcctggcttaccttgcgcaggacctcgagctccctgcgcaggtccgaaagcgagcccagcacgcccaagatgtcctccatatctagcgactgtatctgacaaactgcaaatccggattcggttccttcgattttatcgtttttttcaaatggcggcaattgcgacgcgcgtcagcatttgataacatgcctttaattgtgcactgttgacagttaacagctcgtcgggtgctgtaaggcgcatttatgcctctgctttccaacactgcacgggcgataaagttcccgcgcaaaatgaaaaacacaaccaaaacttgttttttgagtgaatattgggagatatttatttgaattctttaaaataatattattgggttatttaaatagttacgtactggatttctagccctgtaaattttgaaagtataacattaggtgaaccagttccaatacgttcccgccactaccatctctagaaagcagtgctgcacggctccccaaaaaacatattgtaaacaaatttgagggaaaatggtaagggaaagaacaaaaaggaacatttaaattataaatatagattacggaagagaattaatttgcgtaaaggaccggaaatatttcaaacaagtttcagcaaacgtccagtgctgcacaagcacttccgacgatagtatcgccatggcgagctgaccagcaagcccatctctagcacatttgttaaaaaatttgcaacaagccaacgaaaatcgaccaggaacggtggacagccaaaaccgcgcgctctgcgacgaccaccgtgggatgcacatacgtatgcgcagccgtgccgcggagtagacacagtgcccgcgatccgcgaccagcgaaccgccaaaccccgagaagccagctgcagcagatccacagatcgcgccgcagatccagatcatgggcctcgacttcgacgcagtggaatactgcaaaggggtgaagacccagcagtcccagccgcctttcgcctgtcccgtccgcggctgcgaccgcagctacaagaccatcatgggtctgcaataccatcttatgaagtacgaccacgacaacccacagccgctcacgcccgtgctgactccgagccgcaagaaggcgcgctcacgctccggcggccaccactccacgcctcgtccgcacaaggatcacccca

SEQ ID NO: 4568 - DNA, 2441 bp, DROSOPHILA
aaatgctgacgcgcgtcgcaattgccgccatttgaaaaaaacgataaaatcgaaggaaccgaatccggatttgcagtttgtcagatacagtcgctagatatggaggacatcttgggcgtgctgggctcgctttcggacctgcgcagggagctcgaggtcctgcgcaaggcccactttgaggagctggaccacctcttctacggcacaggccagccggaggcggaggccaaaccgagggacagtgctccggcagcgaagagtcaggagaactcttcggtgacgccgcagcaaacgaaaaagcgccccaagcgactcacctcactggccgaggatcagaatgagcccgaggctccagacgccacggccaacaacacgtcggcccgtcaaagcactcgggtcagcaactcccagttgctggctatcgccgaggacgagcacaactccacggcctcgctgatgccgcctccgcctgtgcccgtctcggcggacaccaccctcggctccggaaggccacagcgagccgctaagctgaagaccgagaaattactcaaggagccctcactcaaccgtaagatgcggcggcccagcagcgaggagctcgtaaaggtcaaggttgagagcgagcagcgagtctcccagtttaacagcttcaccagtgcacaggcgttagaggaaaataaactagcggagccggaactagaagagccagcagcagaaacagctgagcagcaaaagcctccggaggaggcctcagtcacagaggacgtgaacaccacgaagacactccgcgtgaaggtaaagcgcgagaaactcagtaccgaagcagtgcccccgttaaccaatgcggtctccacggcaaatgtgaccaccgtctcctctgtaacaacggaggcagcgcgaccggacgatacggtggccagcaacacgacgacatccacggaggtctccaagaaggtccgcaagaagaagaaggacgtggaaagccaccgacccataaaggtggaacgattcagcgacctggacaagagctcgccagtctcgtcgcgcacgcgcaagtgtagcagcgattcgcgaacggttcaggagcgatccatatacaaggatgcactcgaagatccgcccgttgcagagcaatcagtggctgcagttgctccggctgctgtcaatgagaccgtggcgatttccaacgccaccctcgtactgggtcctgcgccgacgagcgatagtccaataggaccagctggagatgccacttttgaggtgcactccaacgacaagaaacaacctctgagtaagcaggacagcctcttaacggaggacgagtcggtggaggagaagctgccgacgaccaagctgctctcgagcataaaggctataaaactgcctacccgtacacatgagcttttcaacccactgcttcagagtccagtgaaaatgcgcgtggaggcgttcgagaatgcggcaaacgcacagaacagcatgcgccctaagcggggaaaagatctgcagggcacgccaggatcaaacaacactcccaaaattggcaagctgcctgctccgactgttggtcgctttttcacaccgactcaaacgacaagcacactaccattaagctcggcgcagcccaagaagggacctgccagcgcgtctaaggccactagtctgctgaagacggccaccggtacgaacctaaggtcggtcaattccacgtccacaaaaacgctgtcgcgcgagaacagcggagacgacttccgcaagggcctgcacaatctggcggaggagcgcaagaagctgcgtgagcaaaagcaccagcaggctgcccagcagcgcgaagccaaggagcgggagcgggcagagcgtatggccaagctggccgccgagcgcgccaagaagcaggaggagcgaaagcgaattgaagagcgcaaacgacaagagctggaggagctgcagcggaagatgcgccagcaagaggaagccgaggcgctcaagaaggccaagttcaaggagctggagcagcagaaactgcagcagctaaccggcgccaagcccaagaagatgcttccgccgccgccgaaaaccaagtacacctgggagatgctgcacgaagacgactcgacagacgacgagggaaaggtcacccacaagcgtcccccagcgcccacctggagtcgaagccacgtaaggggagaggcaattgctatgcagagccactgcccaaccgacatcatcgacagctttttctcggtggcgcccaccacaccggacctaaagcagatattcccgaacatcgatcccagccagctgaagcgaaactccagcgtgctgtggtccacgccgccgcgctattccgagctgccgaaatactagccaagtagtcctgctctcttctcccgtaaatgcacatgtttatgatcgaataaataaagttaattgtgaaaatt

SEQ ID NO: 4569 - protein, 755 aa, DROSOPHILA
MEDILGVLGSLSDLRRELEVLRKAHFEELDHLFYGTGQPEAEAKPRDSAPAAKSQENSSVTPQQTKKRPKRLTSLAEDQNEPEAPDATANNTSARQSTRVSNSQLLAIAEDEHNSTASLMPPPPVPVSADTTLGSGRPQRAAKLKTEKLLKEPSLNRKMRRPSSEELVKVKVESEQRVSQFNSFTSAQALEENKLAEPELEEPAAETAEQQKPPEEASVTEDVNTTKTLRVKVKREKLSTEAVPPLTNAVSTANVTTVSSVTTEAARPDDTVASNTTTSTEVSKKVRKKKKDVESHRPIKVERFSDLDKSSPVSSRTRKCSSDSRTVQERSIYKDALEDPPVAEQSVAAVAPAAVNETVAISNATLVLGPAPTSDSPIGPAGDATFEVHSNDKKQPLSKQDSLLTEDESVEEKLPTTKLLSSIKAIKLPTRTHELFNPLLQSPVKMRVEAFENAANAQNSMRPKRGKDLQGTPGSNNTPKIGKLPAPTVGRFFTPTQTTSTLPLSSAQPKKGPASASKATSLLKTATGTNLRSVNSTSTKTLSRENSGDDFRKGLHNLAEERKKLREQKHQQAAQQREAKERERAERMAKLAAERAKKQEERKRIEERKRQELEELQRKMRQQEEAEALKKAKFKELEQQKLQQLTGAKPKKMLPPPPKTKYTWEMLHEDDSTDDEGKVTHKRPPAPTWSRSHVRGEAIAMQSHCPTDIIDSFFSVAPTTPDLKQIFPNIDPSQLKRNSSVLWSTPPRYSELPKY

SEQ ID NO: 4570 - DNA, 2475 bp, DROSOPHILA
tttcaaaattttccgtttcctgccgctacagatgtgatactcagaagcagttgtaatttgaggcactgcacacgaaagtatattttaatgcattttaatatcactttcataaaaactaagctgcatgcgtatagcggaaacttgtttttcttacttacgtaacttaattcccaggtgttcattagagaaacaaccaatttgtagatatttattacaatgaattatttctagagtgaatgtcccgaactagtacggcctaataagtcaccttctgctcaagccaacaagagcccattcgatggtgtatacagcaagtaataacttgtaggcattatatatttaaggattggggctctgcgtctcttttctaagctccaatgtcaagtcaataaacattaaaccaaatgacgcagtggcgaatggaattggttgctgttagtaggggttgcttgtaggcgaaagtgcaagaggtgaatgggcttaccaatggaaagttcgtgaacatggaaccgattgatataaattatatgatatttaacaaagtaagcattattattgtacaaaaagaaaagtatttaaaagttgatgcccgaggtccgagtggcgacatgtacattgaacaccctgtacgaactacatatcaccctgtaggtagcttttcttcaacccccaactagcagggtttcgtatttctgtttctttattattattttcccgtttcttgttgtttttgtgccatggcatgacctaaccaactaagccaacaaactgacccaagcgcacccttcacagctacccccgtctcgtcccgttgttggacacttgtcatcgtctgcaaaaccgctttcaacctgaaaccaacaacccaccgtacgccgtttaggggaatttgtacctacaggcggagactcgtgcaataattgtgttgcctcgttgatggggtttgtctttggtctattgcgcactattggtgttgaccattgttggtttttttttgttaatgtttaccttctacacattcataggggaaatagtaacatacatacacacactaaatatatatccaagcatatatatatagtaatcattatatataacacctacacccacaacaacaacaacagcaattatatataataaccataaacaagaatggagaaagccaatccagcaatcacagcaaactatatacacaacaacaacaattaaattaattaatgcaattgatgaaagaacagcagcagcagcagcagcagcagcagcagcagcatcaaccgcaatttcaaaagaactctagaaacagcaaaggcataaaatataacaaaagaaatattttacttaggtaaaacattaaatttattttaaatctaaaataaactaataagcattaaataatacatgataatggtaaataaacacacaataattataatagtagagcgagcgctgatcgattgtcattttattgctgccgcgcgtggcgatatatatatatatatatatatatatatcttttaattaatattttaagtgatcctctccgcaactctcttcgttaattaatgtatccctcctattttttttgacgccttgaaaaagagaaatgaaccaatgtatatgtatatttaaaagagtcactgcatattttttttacaacaccaccttgatttagtaccgtttaacttatgataacctgatggtaatagaatggcggacgagttttgtgtggttagagcgagctaagatctaactaactaagagtttgcgtaggttaaacaaggcatggtcttgcaacaacgtgcagcatgcagcatgcaacacactcacacacacacacacaccaccacctaagaaagcaagaggaaggcagaagaggacagaagaggaggcgaagatgaagtaaagtggaacagattgagaaagagaaggagaatgagaaggaggaacagaaacaaagcaaagccccgagcataatgttaatgttatgttaaaacctaaatttaatgcaaattattaacgcagaaaagaacgaaagagaaaaggaaaaaacaaaaaaaaaaaaagcaaaaaaacaaagcaaaagcgaaagcgaaactgtttaaactataccaatataatatataatcattatgaatataaactatatattttttttttttttcaacacacacattatgtatacatacatactgaataaataaattatttttatttttattatatatcgtatcgtatatcgtatatattttttttcgcgctaaaatatatatgtacagataccattatttagccagtagatgagttatacggacacatacggacatacagaacggaggaggaagagagcgcaggcgtggagctggcgcctgagaaccggcggattagttgcaatatgtagataaggtccaaataaccgggttcccgccaccgtagagctccattattattattcgcatagatagtcagtgtcgtcct

SEQ ID NO: 4571 - DNA, 3477 bp, DROSOPHILA
atgtttaccttctacaccaatataaataatacactgatcaacaacaacaataataataataatactagtaacagtaataataataataacaacgttataagccagccgattaaaataccgctaaccgagcgcttctcatcgcaaacatcgacgggctcggcggatagcggtgtaattgtttccagtgcatcgcagcagcaactgcagttgccaccaccacgcagtagcagtggatcgctgagtctgccacaagcgccacctggcggcaagtggcggcagaagcagcagcgccaacagttgctgctcagccaggacagcggcatcgaaaatggtgtcaccactcgtccatcgaaagccaaggacaaccagggtgcgggaaaagccagtcacaatgccacaagctcgaaggagagcggcgcgcagtcgaacagcagcagcgagagcctgggcagcaattgctccgaggcccaggagcagcagagagtaagagcctcctccgctctggagctcagcagcgtggacactcccgtgatcgtcggcggtgtggtcagtggaggcaacagcatcttgcgcagccgcattaagtacaagagtacgaacagcaccggaacccagggattcgatgtggaggatcgcatcgatgaggtggatatctgtgatgatgatgatgtcgactgcgatgatcgcggatcggagatcgaggaggaggaggaggaccaaaccgaacaagaggaggaggtcgatgaggtggatgccaagccgaagaaccgacttttgccaccggatcaggcggaactcacagtggcggcggccatggcacgtcgacgcgatgccaagagcctggccaccgacggtcacatatatttcccactgctcaagatcagcgaggatccgcacattgattcgaagctgatcaatcgcaaggatggcctccaggacaccatgtattatttggacgaattcggcagtccaaagttgcgagagaagttcgcccgcaagcagaagcagctgctcgccaagcagcagaagcagttgatgaaacgtgaaaggaggagcgaggagcagcgcaagaagcgaaacaccaccgtggcatccaacttggcggccagcggagcggtggtggacgacaccaaagatgattacaaacaacaaccacactgtgatactagctctaggagcaaaaataactcggtacccaatccacccagcagccatctccatcagaaccacaatcatctcgttgtggatgtgcaagaggatgtggatgatgtgaatgtggttgccaccagcgacgtggacagtggtgtcgtcaagatgcgccgccatagccacgataaccactacgaccgaattccccggagcaatgctgccaccattaccacccgccctcaaatcgaccaacagtcgtcgcaccaccagaacaccgaggatgtggagcaaggagctgagccccaaatcgatggcgaagcggatctggatgcggatgcggatgcggacagcgatgggagtggcgagaacgttaagactgccaaattggccagaacacagtcctgcaaaaaccaaacaggtcgcgatggttctaaaatcacaacagttgttgcaacacccggccaaggcaccgatcgcgtacaagaggtctcctatacagacacaaaggtcatcggcaatggcagcttcggcgtcgtgttccaggcaaagctctgcgataccggcgaactggtggcaatcaaaaaagttttacaagacagacgatttaagaatcgcgaattgcaaataatgcgcaaattggagcattgtaatattgtgaagcttttgtactttttctattcgagtggtgaaaagcgtgatgaagtatttttgaatttagtcctcgaatatataccagaaaccgtatacaaagtggctcgccaatatgccaaaaccaagcaaacgataccaatcaactttattcggctctacatgtatcaactgttcagaagtttggcctacatccactcgctgggcatttgccatcgtgatatcaagccgcagaatcttctgctcgatccggagacggctgtgctgaagctctgtgactttggcagcgccaaacagctgctgcacggcgagccgaatgtatcgtatatctgctcccggtattaccgcgcccccgagctcatctttggcgccatcaattatacaacaaagatcgatgtctggagtgccggttgcgttttggccgaactgctgctgggccagcccatcttccctggcgattccggtgtggatcagctcgtcgaggtcatcaaggtcctgggcacaccgacaagagaacagatacgcgaaatgaatccaaactacacggaattcaagttccctcagattaagagtcatccatggcagaaagttttccgtatacgcactcctacagaagctatcaacttggtgtccctgctgctcgagtatacgcccagtgccaggatcacaccgctcaaggcctgcgcacatccgttcttcgatgagctacgcatggagggtaatcacaccttgcccaacggtcgcgatatgccgccgctgttcaacttcacagagcatgagctctcaatacagcccagcctagtgccgcagttgttgcccaagcatctgcagaacgcatccggacctggcggcaatcgaccctcggccggcggagcagcctccattgcggccagcggctccaccagcgtctcgtcaacgggcagtggtgcctcggtggaaggatccgcccagccacagtcgcagggtacagcagcagctgcgggatccggatcgggcggagcaacagcaggaaccggcggagcgagtgccggtggacccggatctggtaacaacagtagcagcggcggagcatcgggagcgccgtccgctgtggctgccggaggagccaatgccgccgtcgctggcggtgctggtggtggtggcggagccggtgcggcgaccgcagctgcaacagcaactggcgctataggcgcgactaatgccggcggcgccaatgtaacagattcataggggaaatagtaacatacatacacacactaaatatatatccaagcatatatatatagtaatcattatatataacacctacacccacaacaacaacaacagcaattatatataataaccataaacaagaatggagaaagccaatccagcaatcacagcaaactatatacacaacaacaacaattaaattaattaatgcaattgatgaaagaacagcagcagcagcagcagcagcagcagcagcagcatcaaccgcaatttcaaaagaactctagaaacagcaaaggcataaaatataacaaaagaaatattttacttaggtaaaacattaaatttattttaaatctaaaataaactaataagcattaaataatacatgataatggtaaataaacacacaataattataatagtagagcgagcgctgatcgattgtcattttattgctgccgc

SEQ ID NO: 4572 - protein, 1008 aa, DROSOPHILA
MFTFYTNINNTLINNNNNNNNTSNSNNNNNNVISQPIKIPLTERFSSQTSTGSADSGVIVSSASQQQLQLPPPRSSSGSLSLPQAPPGGKWRQKQQRQQLLLSQDSGIENGVTTRPSKAKDNQGAGKASHNATSSKESGAQSNSSSESLGSNCSEAQEQQRVRASSALELSSVDTPVIVGGVVSGGNSILRSRIKYKSTNSTGTQGFDVEDRIDEVDICDDDDVDCDDRGSEIEEEEEDQTEQEEEVDEVDAKPKNRLLPPDQAELTVAAAMARRRDAKSLATDGHIYFPLLKISEDPHIDSKLINRKDGLQDTMYYLDEFGSPKLREKFARKQKQLLAKQQKQLMKRERRSEEQRKKRNTTVASNLAASGAVVDDTKDDYKQQPHCDTSSRSKNNSVPNPPSSHLHQNHNHLVVDVQEDVDDVNVVATSDVDSGVVKMRRHSHDNHYDRIPRSNAATITTRPQIDQQSSHHQNTEDVEQGAEPQIDGEADLDADADADSDGSGENVKTAKLARTQSCKNQTGRDGSKITTVVATPGQGTDRVQEVSYTDTKVIGNGSFGVVFQAKLCDTGELVAIKKVLQDRRFKNRELQIMRKLEHCNIVKLLYFFYSSGEKRDEVFLNLVLEYIPETVYKVARQYAKTKQTIPINFIRLYMYQLFRSLAYIHSLGICHRDIKPQNLLLDPETAVLKLCDFGSAKQLLHGEPNVSYICSRYYRAPELIFGAINYTTKIDVWSAGCVLAELLLGQPIFPGDSGVDQLVEVIKVLGTPTREQIREMNPNYTEFKFPQIKSHPWQKVFRIRTPTEAINLVSLLLEYTPSARITPLKACAHPFFDELRMEGNHTLPNGRDMPPLFNFTEHELSIQPSLVPQLLPKHLQNASGPGGNRPSAGGAASIAASGSTSVSSTGSGASVEGSAQPQSQGTAAAAGSGSGGATAGTGGASAGGPGSGNNSSSGGASGAPSAVAAGGANAAVAGGAGGGGGAGAATAAATATGAIGATNAGGANVTDS

SEQ ID NO: 4573 - DNA, 2492 bp, DROSOPHILA
ccagatggatggccccgatttcggcgctcacgcgtgttttccattccactgggttccgagaattcattgataaggcgtccgatggggccctatatgcaaggcacgctcgatggggaaaccccggcagttatgcaaagattgatgagtcgggcggcctcccgatccaaatccaagggatttgtacccattgacgtcagtttggattgctggaagagagtgctgaaagggatgggcaaaaaacaagacgaagaaagtttggtttttatacaagatttttatttttcattttttatcagtttttttcaaacctttttcaattttctttttgtgcttaagttagataacatttttttgtgtgctttcatctgatgttttttttttggaaaagctaacataacaaaactttaatggtatacatgcaattggctgctctccttttaagtataatttacaatttacggcgtacagaataattgtcattatcagtaaatttgcgcgacgcttaaagcgaaaattatacagaaacaaattggctatatttatgtatggttctgtgtacatatgtgcacatatgttttgttggttcggcagctggtcacgcgcttgtgtgtgatgctgctccttggctgtgtgcgtgagtatctgtgcgcgacttccgcgggtatctcagctgcagttactgccgcctcgaaggtcgcctttcagtttcaattatccgccaaggcgccggcttatccatctctgctcccctcctccctctcctgcttcctgaatacagcaggttagggtatatacatatgtcgtattctatatatcctatgtaggtgtacatgtgccggtgggcttctggcagcgccacgaaacgtcggattccctcgggaactctccaagacgttcggggccatcaacccccagcaactggtttccattagagtttgcttgcgcccactgtgcggggccattcaattctgtgacatctggctgtcccgctcacacgcgcctacacagccggcagctggacaatgggctgctggggggcgtcccagtgggcctcgcagtagtcgactagctggttctcggccttggtcagctgctcctcgggggcgtcggcccagaccttctggaccaggcagcacgactcgacggagtcctggccgaggatgcggctcagcttggtggcgtcgtccaccttgatcacgtagatgtcgttctcgtagcaaaaggcctccagcagtacctcgtgcatgtgggtggcagagtcgccgtccttgggctgggccatcaggcagaagagggatccctccggcgacttggagagcacgttgatggcggcggacaggcccacgatcacacgcgcctcgctctgggcccttagaagggccgacttgatggtgcgtccgatgggggcacactccatggccatatcgatctctagctccaggtccagttcgcgctccaggtggtgcatgctgcagttctcctcgacgaccatattgtgggtgttatccgtttggttgtgcgtttgctttgggttttgtgttattttcgagccgttggcttccactttttgggcactttcagctggcactgtttgttgttgcttttgctatgctttgctttgctttcgagtgtttttgtttagcacccgattaacttttgcttatgaaattcttttcgcactgggctttgtgtttcttcaaccgtttgtccgcgctgtttcaattttgagtggcaatttcacaatgaatgctttcggttggcgagcgaacgcttttatagccgcgctctccgccgcctgagaattccactgaatttcatcagaaatgcgagagcgagagctttttaggggggctcgctctcccgctcttgcgctctttcagccaaatcgggttttttcattactttttttgggatccgaaagatttccgttgatgtcgcggcaattagcagattgggggtttctttccatcacacccaaactgcaatctgcagttttggacgctccaaatggggtcaggaaacttggctcccccggaaactcggctctcccactcgcaaaggcagggaaagtgtctcccttaagtaagagcttcgctttcattatctttcgcgcgaaaaaatcgtgtgcgaacatgctttgagtaaatcgcaatttgctcatcaaaattcgaacaaaaattcgtaaataaatttcacttgaacggttttcttaaatttagtacatacatttcgccagaaccccgtgaatggaccactaatacctgatggctgatggcgagcaacaggtccaagtgtgtcgcatctcggcgaccaacgcgacgtatgcgcaactcgcgtatactaggcgtatgattaacgaatgaccttacttacccaagttaacccgaattttatttctggccaggcttcgcacgatcttattctttttgcatttggccagacggccggacaaacagaatcgcatgtccaaacacaaagggagttgctaatca

SEQ ID NO: 4574 - DNA, 492 bp, DROSOPHILA
atggtcgtcgaggagaactgcagcatgcaccacctggagcgcgaactggacctggagctagagatcgatatggccatggagtgtgcccccatcggacgcaccatcaagtcggcccttctaagggcccagagcgaggcgcgtgtgatcgtgggcctgtccgccgccatcaacgtgctctccaagtcgccggagggatccctcttctgcctgatggcccagcccaaggacggcgactctgccacccacatgcacgaggtactgctggaggccttttgctacgagaacgacatctacgtgatcaaggtggacgacgccaccaagctgagccgcatcctcggccaggactccgtcgagtcgtgctgcctggtccagaaggtctgggccgacgcccccgaggagcagctgaccaaggccgagaaccagctagtcgactactgcgaggcccactgggacgccccccagcagcccattgtccagctgccggctgtgtag

SEQ ID NO: 4575 - protein, 163 aa, DROSOPHILA
MVVEENCSMHHLERELDLELEIDMAMECAPIGRTIKSALLRAQSEARVIVGLSAAINVLSKSPEGSLFCLMAQPKDGDSATHMHEVLLEAFCYENDIYVIKVDDATKLSRILGQDSVESCCLVQKVWADAPEEQLTKAENQLVDYCEAHWDAPQQPIVQLPAV

SEQ ID NO: 4576 - DNA, 4631 bp, DROSOPHILA
cgccccaatcgttgtgctccacaggatgatcgtgaacgaagcggatccaaatagagcggggatgtccagaggagtctgtaaggcagattgaattatttgtaatcaaaaagatagcaagagagctggagcaacacacaccattgacccggatgtgattgacacgtcgcactttctcaaacgcccgctgaaggacgcgagcgcgcgatggacccacgccgcggagcagcaccagcaggcagctgtggtgcagggcgctctgctcgtagtctgggcgtgacaacgctggctccatgccaccagcaccgtgcgacagcatcaggccaacggccgcacgcatttacaccgcgccgcggctctcaaatccaatccctgtcccagtccggaggatgcgagcgccagtttcctttgcatctgccaagttcttcacaggcgttccataccgctgtcaagtggataagctctcgattggattcgatttcttcagaggagccacctcctcccccttttcgaggtcagtcagcgcctgctttcaccacgctttttgcctggtttctcggctgtttccgaatccgctgcactccttcacatgggtaccgatgccgggtactcggaggaagtcgaaaaccccaggaaataaatgactaaatggctttttaagcgcagataatcgtttagccgtttgctttggcaaagaaattgtccaatcagtgcctgtcgactagtcgctgtgaatggcacatcgcacagattgacggcagaaaggtcacactaatctaatcgatggtgttgacaatcagataaaatatttgtacaaatataaaatggaaaaccaagtttcttatagtgctacttaaaaaaactttaattgtattacttttagtattacatttagcgaaataagctattgaatattttgcaaatgatccgcctctaacttatcgatactttttggctccggccacactgctgagggaccatccactagaatggcaatgccccgtacaatcacattttgccgctttattgtttatattttgcatcctttttgtagttgttgaaaccatgaatttactgcccaaaacccgcgaggagttcgcacagaccgattactggaacgaattcttcaagaagcgcggtgagaaggccttcgaatggtacgtaaatggtacccactaagctcgagcagacttcttggggaagggaagaactccgagcaacatgtgttttcttggccaactaaaagttgctttaactgcgaaggtacggcgaatacctggagttgtgcgaccagatccacaaatacatcaagccggcggataggattttgatgctgggatgcggtaactccaaattgagcatggatatgtacgacacaggatttcggtaaggaatcttctgtaataagctttatgtataagtagcatgcgcctcctccttacatataacattcctttccaatatgtattagatcttgatcttggccctataaataactttcccttggtattttacattttccccttagggatatcacaaacatagatatatctcccatcgctgtgaagaaaatgctggaactgaatgccaaatcgcggccggaaatgaagtttctgcaaatggacgcgacagcaatgacgttcccggatgaaagcttttcggtgtcgttggacaagggaacgctggatgctctgtttgccgacgacgaacctgaaacgagagcggtggtggaaaactatttcaaggaaatactaagaaccatgaggtgggtaatgtgcacagtcccagatcgaaggtattcaatgtctctatttatgcatcaggaacggtggtcgctatgtgggtatctccctgctgcaagagcacatcctcaatttcctactggacttcctgcccaagcacaattgcatgctgaggattgttcactgcttgggggtggaacaggccaacaaagagaagaatgccgatgatgccttgacgctgcctgttttcgtagtcgtcgctactaaatttaagagccttccaatgccagtgagtagacccctaggcaattaactttttgcattcagattacaatttgatttacttgtaggtactcgaatttggtttcggcaacgacaagatgcaaagattcaccacggtctccgaactgaatagcgcagtttcatcagtccaaaaggccgctttggtttgcaacggtctagccagatccaacatagctggtcacaatgaggtgatcatggatctgcaccgaccatctgagcaaacccctcgctatactatccacatactggataagccgccagctcgcggcctgggcaaatacgcggcgtttatcgttcctcagggaagagaggtggagtggattttttccacgcctgcgggccggaaaaagctccaggactccgccaacttccaacgactggctgtggttacccttcatagagatcaggtttacagtaccttagacgaagtgaagcaagagttggccgacagcataaagaacctatcgccagctggactcactgatcagataccgtatctaagtcttggatccgatgtgggcaaaagggagactcttatttgtgggttctctaagatatctggagatttccgcatcgaggaagtggaggccaatggcaagaccctgcgacgccttatttttctcagcaatcagtttgttgtgcaatcggaagccttagttaaaacaggtaaatatatcttactatcattttgccgttttgttcaagcacaaattatgttgtagtcaaaatcaaaggcaaaaaggatcgaaagaagattgacttcggctacctagcctgccagcatcatttgtacatgtccgtgggtgtccaactggccacaacggtgcagcatcccaaaagagatgtggaaaaggatgttctcgtcgtcggcttgggaggcggcggtctgtgcagctttcttcacgccgctttgccgtaggtcttactcagtttaactactatactcttttttaattgcaattttcctttcaggcaagctagaataacggccgtcgaaattgatcctataatgttggaggtggctgagcagtattttgagctcaagcaggacaaacgctttcatgtggttatcgatgatggcttggatttcgttgagcgatgtcgcaatgaaggtgaaaatccacgatacaatctcgtattaggcaaaattttgtattattgtaatgcatttacgtttagatatccacttcgatgccgtgttgttcgatgtagacagcaaggatctcagtttgggaatgagttgtccgccccaaagcttcctagctacgaagatcctgcagcacataaaggagattatcggtccgaaaggtctctttatgctaaatctcgtgtgtcgcgatgagagccttcgcacagaggctctcaacaatctgcacaaagtctttcctgctgtgtgcagctacaaactagaggaagacatcaacgagataatatattgtgccaacgatgaaaagtacaaaactgtcgagcagtggaagaaaaacatgggaaccgctggtcgaggattaaacagtgccgtcaaggagacaaagctggctagtgaagacgcccttgaggtggcagagttcctcagcgagttgaaaatataatctttaacgtagaacaattagcaaagacaatttacgttttgtaaataaatgttaattgtatttagttataaataaagactaaactattaactaattgtatgtagaaattgctaagaataacaaactaaatgtgtggcaacaacttgcaaatgtttcgttcatcacttaatgtagataactgtgggattgggtgaatgtagcaagaatgacgaggcttggaatatacgtacataattaacctaatctggtatatcgtttaccttacgcatgcaagcattctacaaaatatataagtactttacttaaatttgttgtttttcgcttaacagtcatttgcatttcactgcaacacaaaaggaactctcacttttcttcacttcacttcacagacctttctataatccgcaaaaaattactattcatttgtacaaatcatttatcaaaatataaacccaacaggttcaatccgaatccaaaataatgtacaaatgcgcaaatctaaaaacgttaacaagtcgaaacactgggttctagttaaaaatcgaaggccttgcgaaagaggttgttaagggcgcgctgtttcttcttggtggtggatgaggtagtgctgccaccactgccactaccactactgctgcttgccagaccgccagacattgcgttgccattcccattcggggtgatgcgtccctccccggaggacagaatggcctcgcccagtatgcgaaacgaattctgtgtggtggcggtgctggagctaagtgggaagtttacctccgacagcgacgagctgtccagactggcgctgggcagactcttgctgaccagcttcgcctgctgttgctgctggtgcttttcgcttcgtttgagtcggtaccactcccaggatgtgggctcgtgcaccgcatggctgtttttgacgccattaaagctgtagcccttgtttttgctcttgctaaagggcgacttaaagaatgccggcgaggacaggcgtctagat

SEQ ID NO: 4577 - DNA, 2084 bp, DROSOPHILA
tacaatcacattttgccgctttattgtttatattttgcatcctttttgtagttgttgaaaccatgaatttactgcccaaaacccgcgaggagttcgcacagaccgattactggaacgaattcttcaagaagcgcggtgagaaggccttcgaatggtacggcgaatacctggagttgtgcgaccagatccacaaatacatcaagccggcggataggattttgatgctgggatgcggtaactccaaattgagcatggatatgtacgacacaggatttcgggatatcacaaacatagatatatctcccatcgctgtgaagaaaatgctggaactgaatgccaaatcgcggccggaaatgaagtttctgcaaatggacgcgacagcaatgacgttcccggatgaaagcttttcggtgtcgttggacaagggaacgctggatgctctgtttgccgacgacgaacctgaaacgagagcggtggtggaaaactatttcaaggaaatactaagaaccatgaggaacggtggtcgctatgtgggtatctccctgctgcaagagcacatcctcaatttcctactggacttcctgcccaagcacaattgcatgctgaggattgttcactgcttgggggtggaacaggccaacaaagagaagaatgccgatgatgccttgacgctgcctgttttcgtagtcgtcgctactaaatttaagagccttccaatgccagtactcgaatttggtttcggcaacgacaagatgcaaagattcaccacggtctccgaactgaatagcgcagtttcatcagtccaaaaggccgctttggtttgcaacggtctagccagatccaacatagctggtcacaatgaggtgatcatggatctgcaccgaccatctgagcaaacccctcgctatactatccacatactggataagccgccagctcgcggcctgggcaaatacgcggcgtttatcgttcctcagggaagagaggtggagtggattttttccacgcctgcgggccggaaaaagctccaggactccgccaacttccaacgactggctgtggttacccttcatagagatcaggtttacagtaccttagacgaagtgaagcaagagttggccgacagcataaagaacctatcgccagctggactcactgatcagataccgtatctaagtcttggatccgatgtgggcaaaagggagactcttatttgtgggttctctaagatatctggagatttccgcatcgaggaagtggaggccaatggcaagaccctgcgacgccttatttttctcagcaatcagtttgttgtgcaatcggaagccttagttaaaacagtcaaaatcaaaggcaaaaaggatcgaaagaagattgacttcggctacctagcctgccagcatcatttgtacatgtccgtgggtgtccaactggccacaacggtgcagcatcccaaaagagatgtggaaaaggatgttctcgtcgtcggcttgggaggcggcggtctgtgcagctttcttcacgccgctttgccgcaagctagaataacggccgtcgaaattgatcctataatgttggaggtggctgagcagtattttgagctcaagcaggacaaacgctttcatgtggttatcgatgatggcttggatttcgttgagcgatgtcgcaatgaagatatccacttcgatgccgtgttgttcgatgtagacagcaaggatctcagtttgggaatgagttgtccgccccaaagcttcctagctacgaagatcctgcagcacataaaggagattatcggtccgaaaggtctctttatgctaaatctcgtgtgtcgcgatgagagccttcgcacagaggctctcaacaatctgcacaaagtctttcctgctgtgtgcagctacaaactagaggaagacatcaacgagataatatattgtgccaacgatgaaaagtacaaaactgtcgagcagtggaagaaaaacatgggaaccgctggtcgaggattaaacagtgccgtcaaggagacaaagctggctagtgaagacgcccttgaggtggcagagttcctcagcgagttgaaaatataa

SEQ ID NO: 4578 - protein, 673 aa, DROSOPHILA
MNLLPKTREEFAQTDYWNEFFKKRGEKAFEWYGEYLELCDQIHKYIKPADRILMLGCGNSKLSMDMYDTGFRDITNIDISPIAVKKMLELNAKSRPEMKFLQMDATAMTFPDESFSVSLDKGTLDALFADDEPETRAVVENYFKEILRTMRNGGRYVGISLLQEHILNFLLDFLPKHNCMLRIVHCLGVEQANKEKNADDALTLPVFVVVATKFKSLPMPVLEFGFGNDKMQRFTTVSELNSAVSSVQKAALVCNGLARSNIAGHNEVIMDLHRPSEQTPRYTIHILDKPPARGLGKYAAFIVPQGREVEWIFSTPAGRKKLQDSANFQRLAVVTLHRDQVYSTLDEVKQELADSIKNLSPAGLTDQIPYLSLGSDVGKRETLICGFSKISGDFRIEEVEANGKTLRRLIFLSNQFVVQSEALVKTVKIKGKKDRKKIDFGYLACQHHLYMSVGVQLATTVQHPKRDVEKDVLVVGLGGGGLCSFLHAALPQARITAVEIDPIMLEVAEQYFELKQDKRFHVVIDDGLDFVERCRNEDIHFDAVLFDVDSKDLSLGMSCPPQSFLATKILQHIKEIIGPKGLFMLNLVCRDESLRTEALNNLHKVFPAVCSYKLEEDINEIIYCANDEKYKTVEQWKKNMGTAGRGLNSAVKETKLASEDALEVAEFLSELKI

SEQ ID NO: 4579 - DNA, 3928 bp, DROSOPHILA
ttttcacatatattaatctctgtgatagaattgattgtggaaaaactttaatttcaaatttaactggcacatatgtaaatgtacatatttttatttaatcaacccgttttaggtttaaatatttaaaatattccttctgcctgaaatgtttcaagtggagtttcaaaatcgacccagcagaaaaccgaaacccacgaacccgtttcgagtacgtcaaacctttgacacatttttacatgtgaagcgggatgacttgaggtgcggtctatgtgggatgcaaaactcccgatgcagagtggatcccctttggcataatgaacactccgccccatttcggggtggcgtgaggtgccaggggccgggaaaatcgagggcggaagtacggatacagtcggtgcgaatgccatcagcattgagagtactgcatgttaattgccaaaaataaagtaaagcaggagcgacaacaattccggaatgaataagttttttcattcactttggtacaaaagtattttaattgctttggcaggagcgaggcgggaagagctaacgatggaatggcaaatcatataaataaagaggaattttctgaatggagtgtataatcgctaaaaacgaagcaaagtgaatgagcaactttttttcgccgtgaataattgaatgaaaacattaacaattgccaacgttttgattgtccatcaagtgtaaacgaagtcaatttttttagaccaagtaaagtctgttcggggtttacttaaaaaaaaaaaaataaagtggggaactctttattgactttatttattttcatcaatttattgttttattttttttttcaactaaaatttaatcataagaattaagttatcctttctctttggcaagtgtataccaactctatttcttcccctgtagagttgccatcgtaaacgtcatgtttatcggaaaattcttttggcaccaagcaatgtgaaatttataaatgtaaagttacaaatgctactggaaaccagatcgactctccctcaactgttctagcgcaacggagacggtcgccatgtcgaaggaagactcaggcgcatccagtgcagaggcgaatccagctgaatcggaaatttcgatgggtcgaggaccccgcccaaggtcctttactggcggcggaggcggtggcggaacaggtggatcaggtggaagtggtggtacctccggcggcaacaatctcaagcccgaaagaagcgcccgggaagatgacgccatcaaccgtctgacggactcgaagtcgagtcaccgaaagctgctcagcgatccgcgattccagattcggccgctgcagcaggtaatctcggcctgcaccggggccatgatcacggcctgcttcatgacgcccctggacgtgatcaagactcgcatgcagtcgcagcagtcgccggcccacaagtgcttcttctattcgaacgggctgatggaccacctcttcgcaagtggacccaatggctccgagttggcgagcctgcggcaaagaccacagttttccagctcctgggatgctctgatgaaaatcagccggcacgaaggattggccgctctttggtccggcctgggtcccaccctcgtctccgccctgccctccaccataatctatttcgtggcctatgaacagttcaaggccagatacctccagatttacgagagccactataataagagtcaggagccccggcaccttgaaatcaggtacttacgtaaccctttaaatacatagtgtaatacatacatgtagtttacctgttgaagcgctcattaagcaattcttcatagcgaatatttacatatccagcgcatgaataaccatttagtttcaataaattgtaaaatcgttttagctttagataacaaataagctgcagagtttagcaaatggaagagaataatccgcagctagctgttattgtgttcacagagaactacctggggaatactagtttaaaaatatttatttttcgtttcatttcgctatttcaaatgaaaaacatctaaattaaggtttatcaatacacatgcacatacaatacacatatttccactgtattagactggatagaaaatgttttgatgtattgtacgatttattcgcaacttcacaacctatatataaacctatataagaatatgatttaaggatttacaggtttaaacgttttccatacttctagggataccaagaaaagtctaccgtcggtggttcccatgatgtccggggtgactgctcggatttgtgctgttaccgtggtgagtcccatcgagctggtgagaaccaagatgcaggcccagcgccagacctacgcccagatgctgcagttcgtccggagtgtggtggcccttcagggcgtgtggggcttgtggcggggcctgcgtcccacgatcctcagggacgtgcccttttcagggatttactggcccatctatgagagcctaaaacagaatctcggccatggctcacagccctcgttcagtctgagtttcttggcaggcgtgatggcagggacagtggccgccattgtgaccactcctttcgacgtggtcaagacacatgagcagattgagtttggagaaagggtcatcttcacggactcgccggcgagggattttggaaagaagtcgaccttcagcagactaacgggtatttacaggacacacggcgtgcggggactcttcgcaggatgcggacccaggcttctgaaggtggcacctgcctgcgccattatgatctccaccttcgagtacagcaagtccttcttcttccattacaacgtgaggcatcataacgaggccctactcctggacaacccgaaagacacgacggtcgaagatgatgacattgagtagagagatgggtggctcctttgtaaataaagagcgcatattttatgtaatccccgggtggcgaggcgaattcaatatccccaacgctttacgagttacgtgttacgtcaataaggcgaagccgggaaatcaatttccattttcgcagcttaaagtctccggctgcctgttgctggtgctccggcgataccgggaatgccactccccaagttaacatttaatggaatattcattcatttacattaactgcaattaaagcgagtgcaaaggcaaattaaacggaaatgccaaagaaagagccatgaggcaggtaagccgacttcagagctgcaacggactgaagaaaaattgtgctgggatttcccacacatgctgttttcactgcactttcaggcagcagtaatcgaatttcctttgccggccagtcacgttttgccacaatttcgaccactgcaaatgccatttgagcccatagctccgtggcccgaaagtatttcagtcatagaatggtgcagaaaatctataaatcacagtctgaaatatcaaaaactttggcgagtaattaagacagcttcgttttccccgaggcccttggtctaaacttaatttcatttggctacaagactgtgcttctcttgattccttttacccacagcaattttgctcgaatgattcgcctattacaaaaaaattgtccaagcggaaacttctttttttatgtgccctttgtttttattaaagaccaaacaaagcacacaaagcattctcacacacaaactacggaagcagactgtcaaaaaaacagggaaatatatatttttccgttctccctggatgaaataaaatggatgaatttctttttagagatgtgtttggggtcacagcaagtgaaacgtgatattttttgtttgttcttttatgttaccttacttgaaagcatatcgctgcaagtgtcaaactgcggcgggtacaattactggtatttttcacagccatcgcggtatttgcggcagttcaattaattgtgcagtctttctgctctcaaaac

SEQ ID NO: 4580 - DNA, 1449 bp, DROSOPHILA
tggaaaccagatcgactctccctcaactgttctagcgcaacggagacggtcgccatgtcgaaggaagactcaggcgcatccagtgcagaggcgaatccagctgaatcggaaatttcgatgggtcgaggaccccgcccaaggtcctttactggcggcggaggcggtggcggaacaggtggatcaggtggaagtggtggtacctccggcggcaacaatctcaagcccgaaagaagcgcccgggaagatgacgccatcaaccgtctgacggactcgaagtcgagtcaccgaaagctgctcagcgatccgcgattccagattcggccgctgcagcaggtaatctcggcctgcaccggggccatgatcacggcctgcttcatgacgcccctggacgtgatcaagactcgcatgcagtcgcagcagtcgccggcccacaagtgcttcttctattcgaacgggctgatggaccacctcttcgcaagtggacccaatggctccgagttggcgagcctgcggcaaagaccacagttttccagctcctgggatgctctgatgaaaatcagccggcacgaaggattggccgctctttggtccggcctgggtcccaccctcgtctccgccctgccctccaccataatctatttcgtggcctatgaacagttcaaggccagatacctccagatttacgagagccactataataagagtcaggagccccggcaccttgaaatcagggataccaagaaaagtctaccgtcggtggttcccatgatgtccggggtgactgctcggatttgtgctgttaccgtggtgagtcccatcgagctggtgagaaccaagatgcaggcccagcgccagacctacgcccagatgctgcagttcgtccggagtgtggtggcccttcagggcgtgtggggcttgtggcggggcctgcgtcccacgatcctcagggacgtgcccttttcagggatttactggcccatctatgagagcctaaaacagaatctcggccatggctcacagccctcgttcagtctgagtttcttggcaggcgtgatggcagggacagtggccgccattgtgaccactcctttcgacgtggtcaagacacatgagcagattgagtttggagaaagggtcatcttcacggactcgccggcgagggattttggaaagaagtcgaccttcagcagactaacgggtatttacaggacacacggcgtgcggggactcttcgcaggatgcggacccaggcttctgaaggtggcacctgcctgcgccattatgatctccaccttcgagtacagcaagtccttcttcttccattacaacgtgaggcatcataacgaggccctactcctggacaacccgaaagacacgacggtcgaagatgatgacattgagtagagagatgggtggctcctttgtaaataaagagcgcatattttatgt

SEQ ID NO: 4581 - protein, 449 aa, DROSOPHILA
MSKEDSGASSAEANPAESEISMGRGPRPRSFTGGGGGGGTGGSGGSGGTSGGNNLKPERSAREDDAINRLTDSKSSHRKLLSDPRFQIRPLQQVISACTGAMITACFMTPLDVIKTRMQSQQSPAHKCFFYSNGLMDHLFASGPNGSELASLRQRPQFSSSWDALMKISRHEGLAALWSGLGPTLVSALPSTIIYFVAYEQFKARYLQIYESHYNKSQEPRHLEIRDTKKSLPSVVPMMSGVTARICAVTVVSPIELVRTKMQAQRQTYAQMLQFVRSVVALQGVWGLWRGLRPTILRDVPFSGIYWPIYESLKQNLGHGSQPSFSLSFLAGVMAGTVAAIVTTPFDVVKTHEQIEFGERVIFTDSPARDFGKKSTFSRLTGIYRTHGVRGLFAGCGPRLLKVAPACAIMISTFEYSKSFFFHYNVRHHNEALLLDNPKDTTVEDDDIE

SEQ ID NO: 4582 - DNA, 3333 bp, DROSOPHILA
caatgaaatcgaaagacttttgggagaagtacaaaacggagactttgatagtttttatgcattatactattcgctatggttacacaggtaaatttaaaacatttttaaaatacatttaatttgcatattacatttactaacatgtttttatgtacagcgggcaatctgttaagatttgcctacaaaaagatcaggaaaaagaggccgaaattgtgggaatcgatgactttggatttttggaggtgaaattaccaactggtactatagaaattgtgcagcccgatggaaacagctttgatatgttgaagggattgattatacccaagtatcaatagtgaaatgaagcagatgtgaaaactcatattattccccgaaccctctagtttaattggcccttaagcaacttgtactttttaggcaaatttaggtcaatttataactacgtaaaaacgtttatccttataaatatttacaaggtgattcttcttaagtggctttacgaaataataatggataatttaatccactaaattaaatactgccaaagagaattatatgttaaaggaagtctcaaaatatttataatgacaggtacatttgtttgttccctataaaccagtgtttggaaattacttcgtaagataatcgcgtttgttaccattgttatcgccatcgattcctctgcatacgggtgtttttgaaatttgaatttaataaatacatattcgatcattgctgaccttagaccactgagattaactgccgcacaggtcttatcttaaatttaagatggatttttttattacataatttttttattctaaaattgtttattttattattcttctaaaatttttttttgaactgaactttcattagaaagttatattttttaaaatttttttgaactgaactaaagagagcttgacagtgtagtttcctataaaattgtcaacactggtgatgcgaagacttggtataattccaagtatgtgagttggttacactgttgctttgctggaaaagaaaattgtggaataaaacggagtctgcggcattgggaattatgtcacagcgaaatcacagagtggaccgcttcgcccagatgacaaagcaggaggagatcatagccaagaaacggcaagagatcctcgagaagcagaagacggcacagctggcgaaggcggtggccgcggcgcagaacttggcagcgcagctgaaaaccgagacgactgtgggaaaacccattggcaacgaggtggagtatgaggaggatgcccgatacctggacaccgccgtccaggacacctctctagcggccggcgaggatggcctggaggctgttcacattgaggccacggccagcaagggaaagacggaggacgcggtggcccccaagacgctgaatagcttcactggcaaaacgggcaagatcacatttggcatgaagcgtcagcagctgcctcagcccagtgttgagcagccaccaccgaaggttaaaaacactttctgcaacgatggttcctttttagagaacttcaagaaaatactcgaaaagcacgaaaagcctccgcagcccttgattgttccgccggttccagtgcccaggtgagtccactatcgtaaaaatattaatgtatattaatttgtgggtaattatagcgccgaggagaacaaagccgtggacacggaaacagcagagcagaacaacagtccccagctagaggcggccatcgccataagctcggcagcagccatggctacctccattacggtgaccagctcggcgccaactcatttggcttttggactacccgtgcaagcagtgcagccaccaccgccgcctccatttgcattcaatcctacgcttttgcaacagggaccaccgcagatgcagctgccagctgcattcttccacggccatttgcctctgcacttgcatccggcggcagttgctcctccgccacctccaccgcctccacagctgcccatcgctctgaccaacatgggacagatttacatgcagcttggtccgtctccagtggaggctatgcagctgaatgccataccggcgcccaaagagtttgacttaaatgccatacctaagccacaaataaatctggaggctatccagatgcccagcatcggtggtcattcgacggagcagcttggcctcctgccggaccgcatgtccatgccagtgaatccacacccaccgcctccgccgccacctgtagtggaggaaatggagcaacagcgccagcaggtggcacctccacatccacctcagcccacagctgcgccgccacaaggtgtgtaacacttgcaaaacagtcctcgttgcctgttttgatttgccatctccattccctatccacatccaatatatactctcattctaaccacatccaacttcctactcattcaatttgtatagaactttaatcgttgagcacgattttaaagcaatttatgtagttttttcagaaacgtgcatacaattgccaacgtgcttagaaaacctaatcgcactggtcgcggaaaatggtgaagattatgaagataaaatacgtttgcatagaagcgagttgcatccggccttgtggtaaatgacctaaacatgttttaactgggactagtggtagtagatgcacataagggatggaccgggggagggggggggggggggtcgtacagtccgtcttaattggggatttttcacgtttacttaattgctttcgcaagttgaatcattgtataagtgccagttctttaggatagtaacaattgaattttaaaaattagtccgatttatgttatagtttggttgtttttaattgccattactccgatatttcacacgacacacacagacgcacagatttccgttccgcttactcaatcgtgaatttaaaatcacaaacagtggacatgtacatgtttttctttgatgcgttttaagttagatgtctgattaatactaccaatgccatgtaacatctgacaaaacggaccaacttgatgggggtgtaggaggattagccagaccagtcgcgtggactcatcgagcgcacagtgttccgtcgttcctcgatcgtcatctaaagtctggaggagccagccggcggatgacaactaataatctctgaataagccgctattggggcgcctcaaacagttattcatataatgtctttgtacacgtgactaacgtcgagcacttttcattgtacttttcacttcttttgaattttgataataggtttctttatgataagagctgcgagcagtatcgaagctatagcgaccaactcctcgactacaaacagcagc

SEQ ID NO: 4583 - DNA, 1279 bp, DROSOPHILA
gttacactgttgctttgctggaaaagaaaattgtggaataaaacggagtctgcggcattgggaattatgtcacagcgaaatcacagagtggaccgcttcgcccagatgacaaagcaggaggagatcatagccaagaaacggcaagagatcctcgagaagcagaagacggcacagctggcgaaggcggtggccgcggcgcagaacttggcagcgcagctgaaaaccgagacgactgtgggaaaacccattggcaacgaggtggagtatgaggaggatgcccgatacctggacaccgccgtccaggacacctctctagcggccggcgaggatggcctggaggctgttcacattgaggccacggccagcaagggaaagacggaggacgcggtggcccccaagacgctgaatagcttcactggcaaaacgggcaagatcacatttggcatgaagcgtcagcagctgcctcagcccagtgttgagcagccaccaccgaaggttaaaaacactttctgcaacgatggttcctttttagagaacttcaagaaaatactcgaaaagcacgaaaagcctccgcagcccttgattgttccgccggttccagtgcccagcgccgaggagaacaaagccgtggacacggaaacagcagagcagaacaacagtccccagctagaggcggccatcgccataagctcggcagcagccatggctacctccattacggtgaccagctcggcgccaactcatttggcttttggactacccgtgcaagcagtgcagccaccaccgccgcctccatttgcattcaatcctacgcttttgcaacagggaccaccgcagatgcagctgccagctgcattcttccacggccatttgcctctgcacttgcatccggcggcagttgctcctccgccacctccaccgcctccacagctgcccatcgctctgaccaacatgggacagatttacatgcagcttggtccgtctccagtggaggctatgcagctgaatgccataccggcgcccaaagagtttgacttaaatgccatacctaagccacaaataaatctggaggctatccagatgcccagcatcggtggtcattcgacggagcagcttggcctcctgccggaccgcatgtccatgccagtgaatccacacccaccgcctccgccgccacctgtagtggaggaaatggagcaacagcgccagcaggtggcacctccacatccacctcagcccacagctgcgccgccacaaggtgtgtaacacttgcaaaaca

SEQ ID NO: 4584 - protein, 399 aa, DROSOPHILA
MSQRNHRVDRFAQMTKQEEIIAKKRQEILEKQKTAQLAKAVAAAQNLAAQLKTETTVGKPIGNEVEYEEDARYLDTAVQDTSLAAGEDGLEAVHIEATASKGKTEDAVAPKTLNSFTGKTGKITFGMKRQQLPQPSVEQPPPKVKNTFCNDGSFLENFKKILEKHEKPPQPLIVPPVPVPSAEENKAVDTETAEQNNSPQLEAAIAISSAAAMATSITVTSSAPTHLAFGLPVQAVQPPPPPPFAFNPTLLQQGPPQMQLPAAFFHGHLPLHLHPAAVAPPPPPPPPQLPIALTNMGQIYMQLGPSPVEAMQLNAIPAPKEFDLNAIPKPQINLEAIQMPSIGGHSTEQLGLLPDRMSMPVNPHPPPPPPPVVEEMEQQRQQVAPPHPPQPTAAPPQGV

SEQ ID NO: 4585 - DNA, 4518 bp, DROSOPHILA
gctggtcagatagcgcgggcagctcctttacaggcactgacgtgtccccagatattggccgattgccagtttggggcacttcggcgaaggaggaggaggaggatgtggcaacgatgggcacgccctcctgtgcagagggcaacaaaactccagctccgttgtggagtggcgggggtggaggttccggccttggaggcgccgccggttcctcgggctctatgtgggttttccgagctgcatccttggctgagtcgccagccctgcttgggatttgtgagtctgcagctgccacattgtcgtacaaccagaaacagcagctgcaatcggaaaatccacttagaaatcgctccatataggcatggatggtatctgtgtcagctcacctcagcagcagatttatgaacataaagcgcaccaagtgcagccgcatgtgcatcgttttagtcgctttgacttaacttaaccgtggctagtgcccaattcgctaatttactatactatttttgcgaacaggcgaggcccgcgttcgccaaaaagtacgtgtaccgtcgggccagagcttttgacatggattcggtgatattttttcactcgatatcgatctcgggtttagcatgcggccagctccattgtgatttagttaaaataataataataaatcaaaaagcgctgcaaaaatgtcaacgcgcacgtaaaataacaaaaaactggaggtgcccgtgcacgcgataggcagctatcgaagtagcagctattgtgggaagcagtcacagtactttctatcgactgcactggttaacaaagaacatgaaacgggttataatatttccctagcagatatgtttaatacaattgtgtgtgtacgtaataaaacagacaatctaaatagaataattatatattttattgatagttccaaaataaacatgttgttttgcagtgttatcgtattatcgatagaccttccttaccagtgtttttgtttgtcacaatcgagaaggcgcttggagttatatcaaaaaataaaaaataggaggaaaacagccgcgaaatgtccttcctgcgcggttccgtgagctatgtgtggtgcaccaccagcgtcctgggaaagggagccaccggttccgtgttccaggttagtgtgcttaacggtgttccgaatttcccacctgactcactttcctttcgtattttccttgtcttttagggggtcaacaagatcaccggcgaatcggtggcggtgaagacctttaatccctacagtcacatgcgaccggctgatgtgcagatgcgggagttcgaggccctgaaaaaggtcaaccacgagaatatagtaaagctgttggcgatcgaggaggatcaagaggggcgtggtaaggtgatcgtgatggagctctgcacaggcggaagtctctttaacatcctggacgatcctgagaactcgtacggtctgccggaacacgagttcctgctggtcttggaacacttgtgcgccggaatgaagcacttgcgggataacaagctggtgcatcgcgatctgaagcccggaaacataatgaagttcatctcggaggacgggcaaaccatatacaagcttactgatttcggtgctgctagagaactggaggataatcagccgtttgcctctctatacggcacagaagagtatcttcatcccgatctctacgagcgcgctgtgctgaggaagtcaatccagcgatcgttcaccgccaatgtggatttgtggtcgattggggtcacgctctaccatgtggccaccggaaatctgccttttagaccttttggtggaaggaaaaaccgagagaccatgcaccaaatcactaccaaaaaggcttctggggtgatttccggcactcagctgtccgagaatggaccaattgaatggtccaccacgttgccaccgcacgcccatctctcgcagggactgaaaaccctggtgacgcctcttctagctggacttctcgaggagaatagggaaaagacctggtctttcgatcgtttcttccacgaggtgacgctcatcctccgcaagcgtgtcattcatgtgttcttcaccaatcggactagttcggtggaagtgttcctagagccagacgagcaaattgacaacttccgagagcgtattttcctgcaaacagaggtgccgctggagaagcagatccttttgttcaacaacgagcatctggagaagaaggttactccacgaacgataggtgagtcagtgccttttaaatataatggtaattgaaaaacaatttatacattccagctaaagcattccctgccaccacaacagatcagccaatattcctctacagcaacgacgacaacaatgttcagttgccccagcaattagatctccccaagttcccagtgttccctcccaatgtttcagtggagaacgacgccagtctggcaaagtccgcttgcagcgttggccatgaatgcaaaagacgcgtggacatctttacttccatggatatccttattaagaagggagtggagcacttcatagagatgctagtgaccacaataactctactattgaagtaagtaaaaggaggagaaactttattatcaaataataagttaattaaatttcagaaaaactgagagttttgacaacttgctttccactgtgattgattatgcagatgtggtgcacagcatggccagagtggtaagtggctaggtctccctgtggataactccttggtataatcgcattggtattcttttagactaaaggagatcaggagataaagaccctgctgactgccttggaaaatgtcaaaagcgactttgatggagccgcggatgtgatctcgcagatgcacaaacattttgtgatagatgacgaacttaagtaggttttgttggaaatatgcttggattaagttataattccaatcgatttcttatccagcgatcaatggacctcctccatgcacggaaagaagtgtccttgcaagaccagagccagtgcccaggccaagtatctggtagaaaggctgcgggactcctggcagcacttgctccgggatcgtgcaacgcgcacactgacctacaacgacgaacagtttcatgccctggagaagattaaagtggatcacaatggcaaacggataaaggccttgcttttggataacgtaaatccgacagtggcacaaatcgcagagtgcctggcggactggtataagttggctcagaccgtctaccttaaaactcaaattttggagaaggacgtgcgcgattgcgaaagaaagttgaacggaatacgcgatgagttgtatcacgttaagtcggagctgaagctggatgtggacacaaagaccataaacaacaataatcagctggccaagatagaggagcggaatcggctaagggtcatgcagcagcagcaacaggaagttatggctgtcatgagaacgaacagcgatataataagtttgcttagcaaactgggcattaccaacggaagtctggaaagtagttagacgggcatatcatgaaagtgcaagaatattttatttgcctttactttgtaagttaacaataaatgtttacttttttatatctgaatttgtaaagcaactacatatattcctattgaaacttggctgaatatcgtgaaagagtaagatttctgtaggtcattaaattatttattttatcatgctgaaataaaattaaatttccgattatagttatttagttattgttatttaactgtctatacatgaaaaagcggactagactgcatggcacacacaatttaaaaatggtagaatgccctatggctagaatgcactgtttaattgcttatttacattctctaaacaagtttacttttgacgaaactgatgatgatgactcttgcgaatgttggctccgttgtgttgctgtcgctgggaatgtgatcttgtgggtccatgttcgccggcatcggcccggcgcaaaacttcggcgtaggataagtctaactttttaagtttatgtaagtcttgcgataccgtgttatgataaaactcgacgccattgagctctattactcggccccgagaagtttggggagtattcatattcttgttatagatcaccatgggagagccattccagttgcttgaggatggagttgtccgtctgcggttactgcgtccgaattcagcattcaatgtatccgtacacatctttgagctcccttgtccaccaccacggttgttcatggccagaggactgttcctgggagtaaattcccgggagttaaacaattcgatgcgatctccagatgagctttggtttcggtgctttcgtcggttcttcttcttgattccgacacctacggttagatattcgagtggttcgcgcttgagtggagtaagtatctggccattctcccttatgggtttataattcggttcgccgacagttgtttccttcgaggagctgtttaacaaagtggattgcgttagggacgattggttttgttggtttcgg

SEQ ID NO: 4586 - DNA, 2187 bp, DROSOPHILA
gcgcttggagttatatcaaaaaataaaaaataggaggaaaacagccgcgaaatgtccttcctgcgcggttccgtgagctatgtgtggtgcaccaccagcgtcctgggaaagggagccaccggttccgtgttccagggggtcaacaagatcaccggcgaatcggtggcggtgaagacctttaatccctacagtcacatgcgaccggctgatgtgcagatgcgggagttcgaggccctgaaaaaggtcaaccacgagaatatagtaaagctgttggcgatcgaggaggatcaagaggggcgtggtaaggtgatcgtgatggagctctgcacaggcggaagtctctttaacatcctggacgatcctgagaactcgtacggtctgccggaacacgagttcctgctggtcttggaacacttgtgcgccggaatgaagcacttgcgggataacaagctggtgcatcgcgatctgaagcccggaaacataatgaagttcatctcggaggacgggcaaaccatatacaagcttactgatttcggtgctgctagagaactggaggataatcagccgtttgcctctctatacggcacagaagagtatcttcatcccgatctctacgagcgcgctgtgctgaggaagtcaatccagcgatcgttcaccgccaatgtggatttgtggtcgattggggtcacgctctaccatgtggccaccggaaatctgccttttagaccttttggtggaaggaaaaaccgagagaccatgcaccaaatcactaccaaaaaggcttctggggtgatttccggcactcagctgtccgagaatggaccaattgaatggtccaccacgttgccaccgcacgcccatctctcgcagggactgaaaaccctggtgacgcctcttctagctggacttctcgaggagaatagggaaaagacctggtctttcgatcgtttcttccacgaggtgacgctcatcctccgcaagcgtgtcattcatgtgttcttcaccaatcggactagttcggtggaagtgttcctagagccagacgagcaaattgacaacttccgagagcgtattttcctgcaaacagaggtgccgctggagaagcagatccttttgttcaacaacgagcatctggagaagaaggttactccacgaacgatagatcagccaatattcctctacagcaacgacgacaacaatgttcagttgccccagcaattagatctccccaagttcccagtgttccctcccaatgtttcagtggagaacgacgccagtctggcaaagtccgcttgcagcgttggccatgaatgcaaaagacgcgtggacatctttacttccatggatatccttattaagaagggagtggagcacttcatagagatgctagtgaccacaataactctactattgaaaaaaactgagagttttgacaacttgctttccactgtgattgattatgcagatgtggtgcacagcatggccagagtgactaaaggagatcaggagataaagaccctgctgactgccttggaaaatgtcaaaagcgactttgatggagccgcggatgtgatctcgcagatgcacaaacattttgtgatagatgacgaacttaacgatcaatggacctcctccatgcacggaaagaagtgtccttgcaagaccagagccagtgcccaggccaagtatctggtagaaaggctgcgggactcctggcagcacttgctccgggatcgtgcaacgcgcacactgacctacaacgacgaacagtttcatgccctggagaagattaaagtggatcacaatggcaaacggataaaggccttgcttttggataacgtaaatccgacagtggcacaaatcgcagagtgcctggcggactggtataagttggctcagaccgtctaccttaaaactcaaattttggagaaggacgtgcgcgattgcgaaagaaagttgaacggaatacgcgatgagttgtatcacgttaagtcggagctgaagctggatgtggacacaaagaccataaacaacaataatcagctggccaagatagaggagcggaatcggctaagggtcatgcagcagcagcaacaggaagttatggctgtcatgagaacgaacagcgatataataagtttgcttagcaaactgggcattaccaacggaagtctggaaagtagttag

SEQ ID NO: 4587 - protein, 711 aa, DROSOPHILA
MSFLRGSVSYVWCTTSVLGKGATGSVFQGVNKITGESVAVKTFNPYSHMRPADVQMREFEALKKVNHENIVKLLAIEEDQEGRGKVIVMELCTGGSLFNILDDPENSYGLPEHEFLLVLEHLCAGMKHLRDNKLVHRDLKPGNIMKFISEDGQTIYKLTDFGAARELEDNQPFASLYGTEEYLHPDLYERAVLRKSIQRSFTANVDLWSIGVTLYHVATGNLPFRPFGGRKNRETMHQITTKKASGVISGTQLSENGPIEWSTTLPPHAHLSQGLKTLVTPLLAGLLEENREKTWSFDRFFHEVTLILRKRVIHVFFTNRTSSVEVFLEPDEQIDNFRERIFLQTEVPLEKQILLFNNEHLEKKVTPRTIDQPIFLYSNDDNNVQLPQQLDLPKFPVFPPNVSVENDASLAKSACSVGHECKRRVDIFTSMDILIKKGVEHFIEMLVTTITLLLKKTESFDNLLSTVIDYADVVHSMARVTKGDQEIKTLLTALENVKSDFDGAADVISQMHKHFVIDDELNDQWTSSMHGKKCPCKTRASAQAKYLVERLRDSWQHLLRDRATRTLTYNDEQFHALEKIKVDHNGKRIKALLLDNVNPTVAQIAECLADWYKLAQTVYLKTQILEKDVRDCERKLNGIRDELYHVKSELKLDVDTKTINNNNQLAKIEERNRLRVMQQQQQEVMAVMRTNSDIISLLSKLGITNGSLESS

SEQ ID NO: 4588 - DNA, 2885 bp, DROSOPHILA
cgttccaggagcgtttttcccagctctgctgccaattgtaggtcatcgagcatgaactgcgatacgttttcacagccagccgaaccgtgattggattcctccatcttggacttggacctttctaagcttgggcttgatgcgaactctggcgaaaatttaaagatttaatcgattttagttcatttagcagcagagctttgtgagcaaagcaaaactcaaacagtaattacttggcaaatgtcctctcaatggtggaaaactgctacaacagtaacttttttactgtttcatccccaaaaacaaaaagtatggtattgcagcgagtgcagaaaaagccctacgtactagggcgcaactgcatgtacgaatagttaattaatgctttttattatacacaatcgacctgcagacaaagaaccgaaatgaacttcctagcagaaccggaaataaatttataataggattattcgcattagggggattcctgctcagatagggctatgatttaagctcgcctttcttatataacccctcgcgagttgtttggggaaaccttgttggattctgaaataccagcaaaatgcacggatgtataattatatttttgagctttcattgtctttgaaagaagcatgcaatatcataatagatcagtacatgaatacccatattaattattacgcatatttatagttgtcaaaattaataaatccaaattgttatgtctccttagtaattcctttgctcacagaagcaaaatatttgtttgaacattattaatttaagttaccctagaatttggcgtatttaaagttcagataccatctaagtttaaatatatctaggaagtgcaaccgataatgtgtggggtgttaaaaataaatatatatattaattatacaaatatttaagataagtaattatttgacgctaccttatcgcaacgatagcttggctttaattaccaaccaccgcctggtcacactaagcggccggcgttcttgttttgattttgtgtttcttccttttcttaattcgaggacagtatgagccccccgccatgctggacgctctaattcgggcagcggagcttgtggatctggtcctgctgcgtccgctggccagcgtgattgatgcagtgattactggcgtgtactacttcctgtggggcagctacctcgtcggcttctgtttggtggagggcagcaggaaaggatggaatctgttgagatgcgcggtcaggaatatcaacgagggcatccgcgacttgggcctcatcacgctagatgtggcggactacttctacggcggcaccaaaggcgggctcaagaatgtactcgattttggtcactgcatatcccgattcatctgcaacttactcatcgatctgggtgatggcatcttgtggctgctgatgctgctgccgagggccatactattcctctgggactgcctcctagactttgtggtgcactcaatcgtggcccatggcttgagcttgctgaacagtgcgttccgggcctcgataggattggccctgctcctcgttctctatatgttccgccgctatgtgtacctgatgctcatctacctgctgcaacgtggacgcattgaaatctcgacgaagacgcaaagcgtttacctatggacccatcataaattgcaacacttcatacacaatgtttggtatgtgtcagagaacgcaggatccgcgagtccagaacgctgtgtcgtgtgcatggctcaaagcaggaacgtagtagtcatgccatgccggcacctctgcctctgcaaagagtgctccctgcagctcgtgctccttttagaagaccgctgtcctgtctgcaggcacaacattacgtcgttcctgtcagtttacgtttgatatataagactgccaattggaatttaacttataagtaattatgattctcagaagttaaccaaatgtctttggttaagacacttgtaatagaaaaaacaaataatctttacaaagcagaacagacaaaacattttaatgcagctttcaattcccagacacctaaaatatcaagtaaaacaagttaaattgttttatgtatttatttcaaaccaatgaaaatatacgatttgttttgtatacatttatgtaaatacggtttggttttgcgtataactaatttgctcaaaagacagatatagaaaaaacgtttgttttgggcttacatcgtttaagtatatataattaaagattaaatcgaaatgaaatgattcgctttgcttgttatcgtattgcagagttaattgaattgcaagttatagttcttccatcataacacttatatgatttgggttcttaactggtaaatgaaacgatcaaataagagtaaattacacaactggcaatatagcattggtagtaccgatgtctatcagatagacatttgtgatagcgtctataggtttcacctctctttctgctttctgcatttctagtagtaggcgcataagtgggctggatatacatagctaatgtacatacatagcttaggttatctattgtgtggttgggggtgtagtgggaaatagcgcccgatgtaccgattgacgctcttattacgaataacattatcttgcgaaggacgtctaattatgctatataaatttaatttgtgccaatttcttctgttgcttttcaatttgttgtataaagctttatgcgctgcatctagcttaattctatccgttacatagtaaaatatatatgtatgttagtgtgtatatgtatatcctttaatagcaatattaaaaagttctcatttaaaattgtttcatcgaaaaatttcacgtttactcttctgttttgttttattttcttttgtttcgttttgtagctgtatctc

SEQ ID NO: 4589 - DNA, 885 bp, DROSOPHILA
cttgttttgattttgtgtttcttccttttcttaattcgaggacagtatgagccccccgccatgctggacgctctaattcgggcagcggagcttgtggatctggtcctgctgcgtccgctggccagcgtgattgatgcagtgattactggcgtgtactacttcctgtggggcagctacctcgtcggcttctgtttggtggagggcagcaggaaaggatggaatctgttgagatgcgcggtcaggaatatcaacgagggcatccgcgacttgggcctcatcacgctagatgtggcggactacttctacggcggcaccaaaggcgggctcaagaatgtactcgattttggtcactgcatatcccgattcatctgcaacttactcatcgatctgggtgatggcatcttgtggctgctgatgctgctgccgagggccatactattcctctgggactgcctcctagactttgtggtgcactcaatcgtggcccatggcttgagcttgctgaacagtgcgttccgggcctcgataggattggccctgctcctcgttctctatatgttccgccgctatgtgtacctgatgctcatctacctgctgcaacgtggacgcattgaaatctcgacgaagacgcaaagcgtttacctatggacccatcataaattgcaacacttcatacacaatgtttggtatgtgtcagagaacgcaggatccgcgagtccagaacgctgtgtcgtgtgcatggctcaaagcaggaacgtagtagtcatgccatgccggcacctctgcctctgcaaagagtgctccctgcagctcgtgctccttttagaagaccgctgtcctgtctgcaggcacaacattacgtcgttcctgtcagtttacgtttga

SEQ ID NO: 4590 - protein, 274 aa, DROSOPHILA
MLDALIRAAELVDLVLLRPLASVIDAVITGVYYFLWGSYLVGFCLVEGSRKGWNLLRCAVRNINEGIRDLGLITLDVADYFYGGTKGGLKNVLDFGHCISRFICNLLIDLGDGILWLLMLLPRAILFLWDCLLDFVVHSIVAHGLSLLNSAFRASIGLALLLVLYMFRRYVYLMLIYLLQRGRIEISTKTQSVYLWTHHKLQHFIHNVWYVSENAGSASPERCVVCMAQSRNVVVMPCRHLCLCKECSLQLVLLLEDRCPVCRHNITSFLSVYV

SEQ ID NO: 4591 - DNA, 4675 bp, DROSOPHILA
caaagatgcagatacagatgccgcggcggattcagattcagatgcagatgcagatgcagatgcattttccaaagaatttctaagcacataaaaagcaaagcaaacggtcagttgggaaaatatttaaaaaagcataaaaacaaaatatttattgaaaagagacgctaacgagccaacgccgcggcgatcagaggcaaacagaccgacagaccgacagacagacggcttcaaaaattgagcacatgagcaggctaatgcacatgcacatgtgtgcatagctggctatttgattaatgcactcgaaagcgacaataaacacggaacacggaacatggaacatggccaagaaccggccagaaaaggagtcgcactgggatctcttctgcgcccagacaaacaaatatcgcattccgattgatcccggaccgggcaactcctcatcgaatgcatgtgactctgaatggtgaatggagctccatcgccagagatctgggctcttgagtgaacgtcgtcgacgtctattggataaataaatacaaatttttattaaagtgcgaattctgcggtgagctcggtgctaatgcagtcgcagtccaaatcgaaccggtcgctaagctaagctgacaaaaactaccagcttactttaatagtcgtaaatattcagatacaatgtttggagtgaacttattgaaatataattatgaagcaaagccgcattaggactatagatatcttcatatgtatattgcaagcgcatcttaagatcaatatttaatattttttttttaattttcaatatcagcatttcaaaatttaaaatatatttttatgcaatcataatgattcaatctcagaaagagaaaaatacataaaaaatccaaataatgaatctatcgattttagccccagatattttctgtgcagacccattccgtcgttgccctaattgaagcacacttagggaaccacaacaagtcacaaaatgctccatagatcgaaatcaaccgcaggccacaggaatttcaatcacctcttggtcaccgaagcgttccggtgcctgctccccgagaacccaagaatcggtggatctgacctgagaaggggtactaaatactatgtggagcaaatctctgcgggaagaaagagcggccgaggagagcaaacaatggaacgtggaacgtggagcacgtgaatgctgtcaatcattccgggcaatggccactctggcggtggggtggggagttccacagagcgctgcgaccgtagctccgcattccgcgctgtgacgtcacgacacgaggcgaaatgccgccggcagaattcgcagccgaagattgaagatcgccgaaaggcgcgcgaatcgtgaatcaaaacaaaccgaggcaaaagatcggataatgaatgggagagagatatagacggaagcagcgctgcgacagcgcagtgacagcgctgcagcagcagaagagagctccaccgcgcgcttctctctctctctctctctgcctctctttttgtagaattggaattgcagaattgaagagtcttctcttaactggcatatgtactaacttagaaaacgattcacaacatatgaataattgaaaacaaaagtacgaaagttatctttaaggaagatgaaatacaaagataaacgtgaaatttaagttgcttagattcactcaccctttcttcctctcggatcatctcggcgatccctggcttgatctccaagtcatcggcgagcgaggatcccccgcctgaacccactccgcctgcacctcctcctccaactcccccgccgcccactccaccaccgccatggtggtgcggcggtggaggcggaaggcgtggctcggcggacggacctggtcccaggccactcagttccctggcagcggccatggcggctgctgggccgaggggaaaacgggaatctccagcaggcgatgccgggtggtgggctgatccggcggtctgggagggatgtggggcgggtgatgcgtgatggtgcggatgcaggggcaggggcaaaggaagctgaccctgctgctgtgcctgctgctgctgggggctctgcgagtgaggtctcgacgatcgggacagaggtcctggcgtggcagccggcgatggcatgtccagggcgtggatggcggtctccaggcgcctcgtggctcccactgtggagccactgctcattggtggtttgggtgggggtgtcatcagcgaacagtccctctgtctctctctttccttttgctccagctccatcctttcggccgcaatcaggctgctcagtggactgggtggtgcgggtggattgaatattgtgtccgccgatggccaccggcgctttcttacattcctgccctgctgccgctccagtggggagagcctcagctcagcgggatcccagtccgaagtgcgtagcttcttctcgggctgcatgaaggccagcagctcctcggcctcccgttccctgtcgtgttcagttctggaagttgaagtgctctccttgggcgaggagggcattctctccgacgaagcggcagccgctgctgccgtggccgcctccatatgggtcacatccgccagaccacgcactttcaacatctcagctatcctgagcagaggacctatctggtcctggctcacgttgatctcgccgcgatacatgaactccacaatggccttgagatccgaccaatttacgtcccgcatgatcacaatgggatgctggcagggcgtttcggccagaagtgtttggaagtagggcgagcaggcggacaggaccatcttgtgggccttcatggaccgaccatcgcatgccaaggtcacgtccacgaagcactcgttctggagcagctggtcaaagatggtggtcaggttcgtctgatagttgttccagcgcaggcagaattgctgggagctggaactgggcgaggctaccgaagaactcctgccctgtggcgaactgacgggcgaagatcctccccctccggctacagcatgaccttgactctccttgtcctcgtccttggccccgccagttggtgaagtgcgatcctcgcttttgatacgcttctcctcctgctgagtgggcgagcttctgttactcttgggcgaatcggcgcccgatcccgtccctttgcgctgcctctgagccactggtccctgttcggacgccaagccgacattcgtctccgcctgcgccgacgccattttgtctgcagctgatcgttgatcgttgatcgttggatcaccggcgatcgtaaacgttacgcgatcgttattcgttacgcgattcgctcttcacatagcgtttaaggaataagcattcaaaagaatccgcgacaattacgacgctcaactgagagtgggcatgtacatgtgcgtatctgtgtgcgtgcctctgtctctctgtgtgtgtgtgtgtgtgtgtgtgtgtctgggcgtgtgtgtatgggtgtttaacgtattcgttacgttacgcgcactacgtggccatttggcaattagcccgccgcctcgttctttcagttcgattcggttctcgtcgtcgtgtccagtgttattcagtgtgtgctttcagttccgtttctgtttctgtttcggtttcagtgttctatggctgtattggccaacaaacagggccaaaagtcttctcagcacgagcgtctgaattagactgaaatcgttttgcacattttgatacggaaaaactcaaaacaaacttaacacacgacgacgacgatggcccacgacgacgtggatgtggatgtggatgtgcggctgtggctgtggctgtggcagtgcctgtgcctgtgcctgtggaaagctgaggggcaacgttgatgttgcagcaacggcaacggcaacagcagaagcggcagcaacagcaacatcagcagcaactgctactgctactgctttgtagttgttgctctcaggctgcgactgagttcgcgacgaagttgcgaatagttcgcgaactgctctgccggcgctgcgaaaggaaaatgcgacgtaggcagcgccgcttggctgagaaccgacggcagagacaacgaccgaagcagcggcgagcccgttgaaaatggctgaaaacggcgagctgtaggcgccaaaaaacgccggctaacggcaccgcattcctttgctcctgcgctgcgttttggctctcctcgagctcaacatcggaatcggcttcgctcgtccttcgtccttcgtccttcgtcggcctgctcgacgcactcgaactcgtcctcgtcctcgttctcggcctctcgccgttgcaacccccaaaattttggcgctttgccgccgcacaactaccgttgcgtaaaaaggatgcgtcgctgcaagtggcaagtggcaagtgtgcgtgcgtgaggaaacggaagttgccccgaaaatgcagcggagagcgacggcgattgcgattgcgattgcgattgtgagtgcgagtgcgagtgcggattcgagcttaggcctaatatttttcggaggtgcttggcaggagagggtgtggacgagccccatcgaccagtacccctggcacaaaatagaggaacacatctaggtggtcttcaggaattgggaatgcggcgaaaatagtgctgagtttgccgattatttaggtgatggatattatatatcttattagggttctttt

SEQ ID NO: 4592 - DNA, 2082 bp, DROSOPHILA
ctcgtgctgagaagacttttggccctgtttgttggccaatacagccatagaacactgaaaccgaaacagaaacagaaacggaactgaaagcacacactgaataacactggacacgacgacgagaaccgaatcgaactgaaagaacgaggcggcgggctaattgccaaatggccacgtagtgcgcgtaacgtaacgaatacgttaaacacccatacacacacgcccagacacacacacacacacacacacacacagagagacagaggcacgcacacagatacgcacatgtacatgcccactctcagttgagcgtcgtaattgtcgcggattcttttgaatgcttattccttaaacgctatgtgaagagcgaatcgcgtaacgaataacgatcgcgtaacgtttacgatcgccggtgatccaacgatcaacgatcaacgatcagctgcagacaaaatggcgtcggcgcaggcggagacgaatgtcggcttggcgtccgaacagggaccagtggctcagaggcagcgcaaagggacgggatcgggcgccgattcgcccaagagtaacagaagctcgcccactcagcaggaggagaagcgtatcaaaagcgaggatcgcacttcaccaactggcggggccaaggacgaggacaaggagagtcaaggtcatgctgtagccggagggggaggatcttcgcccgtcagttcgccacagggcaggagttcttcggtagcctcgcccagttccagctcccagcaattctgcctgcgctggaacaactatcagacgaacctgaccaccatctttgaccagctgctccagaacgagtgcttcgtggacgtgaccttggcatgcgatggtcggtccatgaaggcccacaagatggtcctgtccgcctgctcgccctacttccaaacacttctggccgaaacgccctgccagcatcccattgtgatcatgcgggacgtaaattggtcggatctcaaggccattgtggagttcatgtatcgcggcgagatcaacgtgagccaggaccagataggtcctctgctcaggatagctgagatgttgaaagtgcgtggtctggcggatgtgacccatatggaggcggccacggcagcagcggctgccgcttcgtcggagagaatgccctcctcgcccaaggagagcacttcaacttccagaactgaacacgacagggaacgggaggccgaggagctgctggccttcatgcagcccgagaagaagctacgcacttcggactgggatcccgctgagctgaggctctccccactggagcggcagcagggcaggaatgtaagaaagcgccggtggccatcggcggacacaatattcaatccacccgcaccacccagtccactgagcagcctgattgcggccgaaaggatggagctggagcaaaaggaaagagagagacagagggactgttcgctgatgacacccccacccaaaccaccaatgagcagtggctccacagtgggagccacgaggcgcctggagaccgccatccacgccctggacatgccatcgccggctgccacgccaggacctctgtcccgatcgtcgagacctcactcgcagagcccccagcagcagcaggcacagcagcagggtcagcttcctttgcccctgcccctgcatccgcaccatcacgcatcacccgccccacatccctcccagaccgccggatcagcccaccacccggcatcgcctgctggagattcccgttttcccctcggcccagcagccgccatggccgctgccagggaactgagtggcctgggaccaggtccgtccgccgagccacgccttccgcctccaccgccgcaccaccatggcggtggtggagtgggcggcgggggagttggaggaggaggtgcaggcggagtgggttcaggcgggggatcctcgctcgccgatgacttggagatcaagccagggatcgccgagatgatccgagaggaagaaagggtcagatccaccgattcttgggttctcggggagcaggcaccggaacgcttcggtgaccaagaggtgattgaaattcctgtggcctgcggttga

SEQ ID NO: 4593 - protein, 542 aa, DROSOPHILA
MASAQAETNVGLASEQGPVAQRQRKGTGSGADSPKSNRSSPTQQEEKRIKSEDRTSPTGGAKDEDKESQGHAVAGGGGSSPVSSPQGRSSSVASPSSSSQQFCLRWNNYQTNLTTIFDQLLQNECFVDVTLACDGRSMKAHKMVLSACSPYFQTLLAETPCQHPIVIMRDVNWSDLKAIVEFMYRGEINVSQDQIGPLLRIAEMLKVRGLADVTHMEAATAAAAAASSERMPSSPKESTSTSRTEHDREREAEELLAFMQPEKKLRTSDWDPAELRLSPLERQQGRNVRKRRWPSADTIFNPPAPPSPLSSLIAAERMELEQKERERQRDCSLMTPPPKPPMSSGSTVGATRRLETAIHALDMPSPAATPGPLSRSSRPHSQSPQQQQAQQQGQLPLPLPLHPHHHASPAPHPSQTAGSAHHPASPAGDSRFPLGPAAAMAAARELSGLGPGPSAEPRLPPPPPHHHGGGGVGGGGVGGGGAGGVGSGGGSSLADDLEIKPGIAEMIREEERVRSTDSWVLGEQAPERFGDQEVIEIPVACG

SEQ ID NO: 4594 - DNA, 4219 bp, DROSOPHILA
gcagaacaacagtccccagctagaggcggccatcgccataagctcggcagcagccatggctacctccattacggtgaccagctcggcgccaactcatttggcttttggactacccgtgcaagcagtgcagccaccaccgccgcctccatttgcattcaatcctacgcttttgcaacagggaccaccgcagatgcagctgccagctgcattcttccacggccatttgcctctgcacttgcatccggcggcagttgctcctccgccacctccaccgcctccacagctgcccatcgctctgaccaacatgggacagatttacatgcagcttggtccgtctccagtggaggctatgcagctgaatgccataccggcgcccaaagagtttgacttaaatgccatacctaagccacaaataaatctggaggctatccagatgcccagcatcggtggtcattcgacggagcagcttggcctcctgccggaccgcatgtccatgccagtgaatccacacccaccgcctccgccgccacctgtagtggaggaaatggagcaacagcgccagcaggtggcacctccacatccacctcagcccacagctgcgccgccacaaggtgtgtaacacttgcaaaacagtcctcgttgcctgttttgatttgccatctccattccctatccacatccaatatatactctcattctaaccacatccaacttcctactcattcaatttgtatagaactttaatcgttgagcacgattttaaagcaatttatgtagttttttcagaaacgtgcatacaattgccaacgtgcttagaaaacctaatcgcactggtcgcggaaaatggtgaagattatgaagataaaatacgtttgcatagaagcgagttgcatccggccttgtggtaaatgacctaaacatgttttaactgggactagtggtagtagatgcacataagggatggaccgggggagggggggggggggggtcgtacagtccgtcttaattggggatttttcacgtttacttaattgctttcgcaagttgaatcattgtataagtgccagttctttaggatagtaacaattgaattttaaaaattagtccgatttatgttatagtttggttgtttttaattgccattactccgatatttcacacgacacacacagacgcacagatttccgttccgcttactcaatcgtgaatttaaaatcacaaacagtggacatgtacatgtttttctttgatgcgttttaagttagatgtctgattaatactaccaatgccatgtaacatctgacaaaacggaccaacttgatgggggtgtaggaggattagccagaccagtcgcgtggactcatcgagcgcacagtgttccgtcgttcctcgatcgtcatctaaagtctggaggagccagccggcggatgacaactaataatctctgaataagccgctattggggcgcctcaaacagttattcatataatgtctttgtacacgtgactaacgtcgagcacttttcattgtacttttcacttcttttgaattttgataataggtttctttatgataagagctgcgagcagtatcgaagctatagcgaccaactcctcgactacaaacagcagcgggctgagcgacaacgggagcgggagcatcagaagctaagccgggaccatcagccgcaggcgacggagcagacggacgcacagcaacaccgcgaggagcagcacagcaactcggcggctgacaagtacgacccagagtcggccatcagcgcggacttcgactcggatgacgagtacatgcggggcatgatggatcgcaaccgggacaacatcaagcgccgcattgagtgtcgcaacgagctgagcgacgaggagaggcgcgaacgggaggaggctgcatccggagaaccgccggatggcgatgaccaggacgaccaagacgacaaggagtcgcagaggcagcgtaggaagcgcgagcgcaagagccgatggggcgagaaagagcaacagttgccatcctcaagtatgtttatatactcttaaccctaaatagtatatatattcgtgatcacagcccgagtcgatctgtcaattcccgtctgtccgtttatctgcttgtctgtccgtccgtatgaacgctgtgatctcgcagattttaaaaaccagaaagatgtagacgactgccactaccactgaaataatatgtataattatgacgctactgacaacaatccttattatctacaggcacttcgggaaactttggtaaccaaaataaacccatactaagtggcatcacgcgaacagatcccgcgttgttgcagtatgctcggctcaactatggatcgactcagctgagcgaggagcagtggaagcagtgcgaggagcactacaaagtaaacctgctgtatcaggacatgatgcgcaagcgtcaggaaatcgatcgactggcccgtggcggtaaattcaagtacgaatacgactcggacgaggacattgagggcgggacgtgggagcacaagttgcgaacagccgaaatggaggccacatccctatgggcaaacgccctgaccaagcaaagcgaaggcaagcatcacatcggcgactttctgccccccgaggagctcaagaagttcatggagcagtacgaggcgaagaagaacaacaggcagccggatctaagcgactacaaggagtacaaactaaaggaggacaacattggcttccaaatgctgcaaaaactcggctggaaagaggggcagggcttaggacaggacggagctggaattgtggaccccgttaacaagtaggttacctatcctatgtttgaaagtatctcactgtataatatggcaacagggcaccgcaacgcgatggaaaccaaggacttggtgtcagcagcgctgcccagccagaggactgcgacaatgaatatgacgcctacaggaagcgaatgatgttggcctatcgttttcgtccaaatcctttggtaagtaatccctggaaactggcaagggaagagaacataactaatatgatagctataaatgcttaatatatatgacttcttatttgtttgcagaacaatccacgtcgcgcctactactagcactacctaaaatgacccctacccacataactaccaatatcctaggtccacttattcaactgcaactttgctgaataaaatgtcctcgtttaaattaaacagcggacacgtcagtttattttagggggtcgtttattcagtaagtagttcgtaattaacttaaatctattgcaagcgtttaggagttcgatcgtacaaaggagtacgtaagtaagaagtgtggaggtctcttagaacgagagtctgggctctggaattccattttgattcggcggcacattgcacaactcccaatcaagggactgattcgattctaccgggaactgggaactggaccacctaaacgctaataatactaagttgtactcgaactggaagcgagggctagtctaggagtagagcgtcagcacgggcgtctggttgccgcgcgccaatgccaccggacacttcatgtccgacgtgagcatctccagccatgacatgtacagcggtgccgagatggcctcctggaaatacaaaaatacgcatgtgttagtggtcaatcacgatgttagtgctcatttccgaatgtctcaccttgcgcggcatgggcagggacatgaccaccagggaagcgtttgatgagtgcttgaccaccagctcatggatgcgcagctggcgattcgtcttctccgacatgctctgcagctcatcgtccgtgatgccgaactcgttgcgggctccgcggcggaagggctcgatcagccgcttgtgcttcagcaccgtgtccgcccgcggctgctcggagacgcccttcagcataatgagctcagagtacttgatgcggaacttggtcaacaagctagccatgctgtagggtagaatttaccatttgtactatcatatttgtgacaatattttcaaaataatagtatagtatagtgagagtaataatcatcttttgatttccgtcctggcttcttcttcggtctcacggaactatatgggatggtggaaggcatatcctctcctttttattgatcggaactcttttcgctcaaatggaacccaaaccctttgaccttcgacctttgtatactttggattcggaaacgcattc

SEQ ID NO: 4595 - DNA, 1849 bp, DROSOPHILA
tcttaattggggatttttcacgtttacttaattgctttcgcaagttgaatcattgtataagtgccagttctttaggatagtaacaattgaattttaaaaattagtccgatttatgttatagtttggttgtttttaattgccattactccgatatttcacacgacacacacagacgcacagatttccgttccgcttactcaatcgtgaatttaaaatcacaaacagtggacatgtacatgtttttctttgatgcgttttaagttagatgtctgattaatactaccaatgccatgtaacatctgacaaaacggaccaacttgatgggggtgtaggaggattagccagaccagtcgcgtggactcatcgagcgcacagtgttccgtcgttcctcgatcgtcatctaaagtctggaggagccagccggcggatgacaactaataatctctgaataagccgctattggggcgcctcaaacagttattcatataatgtctttgtacacgtgactaacgtcgagcacttttcattgtacttttcacttcttttgaattttgataataggtttctttatgataagagctgcgagcagtatcgaagctatagcgaccaactcctcgactacaaacagcagcgggctgagcgacaacgggagcgggagcatcagaagctaagccgggaccatcagccgcaggcgacggagcagacggacgcacagcaacaccgcgaggagcagcacagcaactcggcggctgacaagtacgacccagagtcggccatcagcgcggacttcgactcggatgacgagtacatgcggggcatgatggatcgcaaccgggacaacatcaagcgccgcattgagtgtcgcaacgagctgagcgacgaggagaggcgcgaacgggaggaggctgcatccggagaaccgccggatggcgatgaccaggacgaccaagacgacaaggagtcgcagaggcagcgtaggaagcgcgagcgcaagagccgatggggcgagaaagagcaacagttgccatcctcaagcacttcgggaaactttggtaaccaaaataaacccatactaagtggcatcacgcgaacagatcccgcgttgttgcagtatgctcggctcaactatggatcgactcagctgagcgaggagcagtggaagcagtgcgaggagcactacaaagtaaacctgctgtatcaggacatgatgcgcaagcgtcaggaaatcgatcgactggcccgtggcggtaaattcaagtacgaatacgactcggacgaggacattgagggcgggacgtgggagcacaagttgcgaacagccgaaatggaggccacatccctatgggcaaacgccctgaccaagcaaagcgaaggcaagcatcacatcggcgactttctgccccccgaggagctcaagaagttcatggagcagtacgaggcgaagaagaacaacaggcagccggatctaagcgactacaaggagtacaaactaaaggaggacaacattggcttccaaatgctgcaaaaactcggctggaaagaggggcagggcttaggacaggacggagctggaattgtggaccccgttaacaaggcaccgcaacgcgatggaaaccaaggacttggtgtcagcagcgctgcccagccagaggactgcgacaatgaatatgacgcctacaggaagcgaatgatgttggcctatcgttttcgtccaaatcctttgaacaatccacgtcgcgcctactactagcactacctaaaatgacccctacccacataactaccaatatcctaggtccacttattcaactgcaactttgctgaataaaatgtcctcgtttaaattaaa

SEQ ID NO: 4596 - protein, 309 aa, DROSOPHILA
MDRNRDNIKRRIECRNELSDEERREREEAASGEPPDGDDQDDQDDKESQRQRRKRERKSRWGEKEQQLPSSSTSGNFGNQNKPILSGITRTDPALLQYARLNYGSTQLSEEQWKQCEEHYKVNLLYQDMMRKRQEIDRLARGGKFKYEYDSDEDIEGGTWEHKLRTAEMEATSLWANALTKQSEGKHHIGDFLPPEELKKFMEQYEAKKNNRQPDLSDYKEYKLKEDNIGFQMLQKLGWKEGQGLGQDGAGIVDPVNKAPQRDGNQGLGVSSAAQPEDCDNEYDAYRKRMMLAYRFRPNPLNNPRRAYY

SEQ ID NO: 4597 - DNA, 3255 bp, DROSOPHILA
tcaacagataatacctataacaatcgagttccgatttcagaagagttaggcggcaattaagcaagaaatacaagaggtacagattactataatggtaataataaggattaactcaagttacgtcaacttagtggcagtgtaaacgcgtctagataattaatagatatgaataagaacttttgacttttatggctgtttagagattttataatacgactatatcgatatagaattatatacatacacgatataaattaagcccaaaaatttgcgtaacttatttacatactcagacacaaacatacgtcacacgacaaattaactttagttcccccaaatgattttcggctagttctggcttggaataccgctcccaatcccatcttcggaaattttggggagtgggagtgtcctctgcatcccatggagggaatgaaatcgaacattgtgaaatttagtgtctttacactttaaagagaatatatacaaaacggattaattaagaaacttgaaaatcacacaaggcgaagtgcagatacagataccgaaacaaatgcagatacacctacacaaagatgcagatgcatataaattatggtaattacatactctcgtacatatgcctaaaaggatacacgtgtagtaatctacagccacaaaaaaacaattaaaaataaatgtctatatatgaaacgaacaagatttaatgtgcgcaatatgcgtgtatcattatatacttaaatgtatttgtgtatatgaaaacaaacgctaacaaagtaaaccaaattataaaacaaatacaaggaaaaaataaaaagaaacaaaaaacgacaacaaataacaaatacaaaaccaaaattatcaacaacataaagaaaatcctttctcttattattacgtgggaaacgtttggcggatattagtaatccgagttgcatggcaatcctaatcgtttcgattaatcaagtcgaagtaggctaccgagtcagtcgtctaaattcaaaaaccccatttgggctatcagagactgaatatactatttttctatagtagctaagaggcgtgcgtacctgtaaaaggaccataacccaacagaattccgaatataagttgaccgccagaaggacaaacaggtgaatacctggtgcattatcatcgtcaataatggcttactccttcctcaagttcacaatgggacagacactgtcggaaccagtgaccaccaaggacaccgcttgctgtgccaatgcaagctatcgcgtgggctcatcatgcatgcaaggatggcgcgtggatatggaggacgcccacacccacattctttccctgccggatgacccgcaggcggccttcttcgccgtttacgacggacacggtggagcttcagtggccaagtacgctggtaagcatttgcacaagttcattacgaagcggccggagtatcgggacaatagcattgaggtggccttgaaaaaggccttcctcgacttcgatcgggagatgctgcaaaatggctcccttgatgagcaaacggccggctgcactgccattgtggtgctcattagggagcgtcgcctgtactgtgccaatgcgggcgattcgcgggccatcgcctgcatttctggaatggttcacgccctgtccgtcgaccacaagccgaatgacgcgaaggagtccaaacggatcatggccagcggtggttgggtggagtttaatcgggtcaatggcaatctggccctttcccgcgccctcggcgactttatctacaagaagaacttactaaagactccagaagagcaaatcgtgacggcctatcccgacgtggaggttcttgacatcaccgaagacttggagtttgtcctgctggcctgcgacgggatctgggatgtgatgagcaacttcgaagtctgccagttcgtgcacaagcgcatacgcgatggcatggagccggaactcatttgcgaggaactgatgaacagctgcttgtctccggatggccacacgggcaatgtgggcggcgacaacatgaccgtcatcctggtgtgcctgctgcacaacaagagctacgaggatctggcggtgcgctgcggaggcaaacgaaagacccccgttgaaaccgtaggcgacatccaggatcagtcggtgaaggtcgtaactccctgttctcagggatcttcggggtcgtcgacttctcgattgggcctgggcttcggacttcgcgaaagcgaaactcccgaggctaatctttaacttttgttttaccttttacatttttcattactgcatttgtttgctcttactcttaatgtacttttgtactttgattgtcgatccagacgctgttggcactacaaaattatcagtcaacacatcacatttcccggcagtacaaatataacacaatacactacactttcccccaactagcagggaaataagaacacttcgttttgtattttctcggggatcaatggatcggatctcttgtttaattcgagttaatgtgcaaatctatagtacattttatagctacgtatacgtgtatatatcttttggtgtatatggtaagtacgagtaaataaaggtagtatgcgtgcgcatctaaatcgaagtatctttggtgcgattagctgtagagctgtagatcgaatcggagtgaatcgagtcgaatcgaaatgcagtgagtatctgtctatcgatcgatactagatggtaaggccacaatgagaaggccgattgctccgaatcgtgctagtagaagtatacagattgcaatatggttaagtgccaggcgctaattagccatacatatatgtcaattattgcaccacatgcggccataaagtgcttaaagtaacgccacgcacaaaaggggatgggatcgggaatgctcccgatctcgccaaatgtgcgctttatttaaatataaagactagaaattctctcgttttggaacgacttccgtgccggaagcaggaagccgatcaatgccttaatgcgaagtgattaatggggttagtaagtggggtggatatctttggatattcctatgcttcttgtaaaatcataaagctagatgactatgtgtaaagtttgtagcttggctgcggagttcgatcgtctggggctgggatgctatatctttcgctctccgatcgatcggtaatcgtatgtgctataaaaaaatactggttacattggttttttgtcgctgttcttggcaagtctctaagaagtctcttattacaactaagt

SEQ ID NO: 4598 - DNA, 1203 bp, DROSOPHILA
caaaaaccccatttgggctatcagagactgaatatactatttttctatagtagctaagaggcgtgcgtacctgtaaaaggaccataacccaacagaattccgaatataagttgaccgccagaaggacaaacagttcacaatgggacagacactgtcggaaccagtgaccaccaaggacaccgcttgctgtgccaatgcaagctatcgcgtgggctcatcatgcatgcaaggatggcgcgtggatatggaggacgcccacacccacattctttccctgccggatgacccgcaggcggccttcttcgccgtttacgacggacacggtggagcttcagtggccaagtacgctggtaagcatttgcacaagttcattacgaagcggccggagtatcgggacaatagcattgaggtggccttgaaaaaggccttcctcgacttcgatcgggagatgctgcaaaatggctcccttgatgagcaaacggccggctgcactgccattgtggtgctcattagggagcgtcgcctgtactgtgccaatgcgggcgattcgcgggccatcgcctgcatttctggaatggttcacgccctgtccgtcgaccacaagccgaatgacgcgaaggagtccaaacggatcatggccagcggtggttgggtggagtttaatcgggtcaatggcaatctggccctttcccgcgccctcggcgactttatctacaagaagaacttactaaagactccagaagagcaaatcgtgacggcctatcccgacgtggaggttcttgacatcaccgaagacttggagtttgtcctgctggcctgcgacgggatctgggatgtgatgagcaacttcgaagtctgccagttcgtgcacaagcgcatacgcgatggcatggagccggaactcatttgcgaggaactgatgaacagctgcttgtctccggatggccacacgggcaatgtgggcggcgacaacatgaccgtcatcctggtgtgcctgctgcacaacaagagctacgaggatctggcggtgcgctgcggaggcaaacgaaagacccccgttgaaaccgtaggcgacatccaggatcagtcggtgaaggtcgtaactccctgttctcagggatcttcggggtcgtcgacttctcgattgggcctgggcttcggacttcgcgaaagcgaaactcccgaggctaatctttaactttt

SEQ ID NO: 4599 - protein, 352 aa, DROSOPHILA
MGQTLSEPVTTKDTACCANASYRVGSSCMQGWRVDMEDAHTHILSLPDDPQAAFFAVYDGHGGASVAKYAGKHLHKFITKRPEYRDNSIEVALKKAFLDFDREMLQNGSLDEQTAGCTAIVVLIRERRLYCANAGDSRAIACISGMVHALSVDHKPNDAKESKRIMASGGWVEFNRVNGNLALSRALGDFIYKKNLLKTPEEQIVTAYPDVEVLDITEDLEFVLLACDGIWDVMSNFEVCQFVHKRIRDGMEPELICEELMNSCLSPDGHTGNVGGDNMTVILVCLLHNKSYEDLAVRCGGKRKTPVETVGDIQDQSVKVVTPCSQGSSGSSTSRLGLGFGLRESETPEANL

SEQ ID NO: 4600 - DNA, 33481 bp, DROSOPHILA
ttgttgaagcattaacaataggtacgacgaactagagtcaaattctccatcatgtggtcagcatcgcacaaatatatagaatgcatcgagttctgcataattgaaggccacattcgcaaccatgaatcaggcagcccgcttcgctgactgtatcccttccctgtaatttgctagcagaagtaccagccaagtggaagtcccgcccccacgcacattcaaccgaaaaagtctgtgggctaatttgactatcgaaatttatgcgtcgtatctgcgagttcgagtatcgctgcctcttcgtatctgtatctgtatctgtacgctgtgctgcggtggtctattcactctcctgactcgagtgtaaacaaaataaagtggcgcatttatggcgaaggtggctggcccggagaacgtacagaacctggcgcacggaggaggattcccagtccccggagaatgtgtgcgcgcctccccgttctctaattgagcaaaaaccgtgctcggattgccgatgacgtcgatggagcagaggcgaacgggccaaagtcacaataaaccgctttgatttgtgtgggaaacacatattagaggagctgcgtgctaagcaaacaaacttggagccaacgaatgggtggctgattggacgggcgcactggggatatcattcacgttagggtgggtcaatgtctgagaagtacttttgcaaaaatgctctccgttcattacagtgcaacatgtcgtaagttgtttcttcgaatgagaacagtacaggtaacttatacgagtaatagactttctagattggttgtacttgttgtgcataaacaaatctggtttagaatgggttacacatagatcaacttcaatttacaaccacacttcttgctaaaacgtatccttgccatacgtggtatgtacagtaagctatgacttcctaactactgcagcccacccatatcctgtgggaaatcttgggaaatccgtgtcggacgcaggcactcaccatgttgcccgagctctccttggcgtccttggcaaaggcgggcggtccgttggcaatcaggtgcggctcttggatgggtttcatgggcggcggcagctcgaggccgacctcctcgtccggctcatagtcgccggctcctgctcctcctggatgctgagttgagctggggaattgcgacgatggcagcacggtggcgggactggcacctggctgctggttttgctgctcggccagctcctcggcgtgcttctggggtgtctagatatagaaaggaaaggcgtggagaaacgtcaaatgatataaataaacgctcgttaaacggtagcactcactctcaggtttttctccgagggcttcttcaccagcggtttgctacttggcggcttgtccgttcccttgcgattcatcagcggcagccagttgcgtctgcaatgatacgaaatacagaacgattcgacaggtaagtggcagtttgtagacttgaagaactttagttcttccagggagacagcctacaggaacttgcgaatcgttgtggtggtttgcacaagttcgtccatctctcatggcgtgccgaataaaatcgaaataaataaaacaatgagatgcttgatggctgtccagctgcgtggctaacatcagactgtcgccagcatcgaaacggccgctaacttggccaaaaaccgcccgctgttcgaatgtcgccgctcgcacagtgggcacaattcgttttcccattaccatttgcctttttatgatttcacggttttaaagccaattttccgtttgaatattcgcttttatgcttcaactttttaccgcactcgccgtaaaagcatatttctttcaacgctcctttgattaatttgcagccggagcaaagtttatgggtcaagtttcgactttatttgcgaaccaagtcattaatcagccacagtgaacactgcccacggagtacatttgtagcagctggcttgggtttcagcagggaatattctgcggtcagacgaaatgcagtagaaaaaaccgcgcaaccgcaaaactaagctcgctttaaatatgccgtttatacaattttaattaggcttaattaacgagcgcagcagtctccttaaacgcttcgaaaatcgatttcaattaaacaaagcacgaaagagtggagctaaatggctgggaaggtggaccgaggagccaggagccagcacccatgacccaatggcatgtaacataattcgaagtaaaaataaacattgacacagacgacaaggagctggaacgcggctttcgactggtcaaattggacgagataccagttcggttccaggaattgtatttaatttatcaccagctggctggacacattcaaaattcatttggctgatgtaatgttttagccaaatggccaaatggccaaagtgtcgccaaagtattctatgtacaagccaaagaatgcgtgtttgctttggagtatatgtattgtattaatgggtcgccgcaaagtatgcaacaaagctggttggcaaatttgcagtttccgcctcctgctgcttttgcacaaattgcacacggcgaaaaaattatccttacttttatgaacagcctataaaatccgtaggaatatgcattatttgtgagtaatgcccatctatgagtttgcataattctttgcgcaaaagatgttaatctctttggattttttgtttgtttttgagttcattgaagcattggaattttgaaagtgataacgagctataataataataacaaagcatctttcagtattgccacttgtttatattacattagtaagtgtttacggtattactttactgtcgtaagccacataatattgttgaataatattaaaatacgtaataacttaaatatggctctcattgagacgtattaatgcctgaatcattgataaaattgaatatttataaattttttcaaagtcatggatatattttcccgatgcttgtgcaatactcttccagtgcctgtgtgtatgggtgaaatacaaataccacttagttcattggacttggcagcacgcgccgctgagcaggatcctcctctggcccccgctggctttatggtcctcgattctttgcatatatcctggacaaacacacgcgcatattgacacagtgcttgagacaaagagtccggggcatagtgacagccgtggctcttcggagcgaatactgtgggtgactcggacgataatctatattcatgctcggcaggaatagggcgtcgaggaagcagctggaggacgaggaggaactaccattaatgctcactcgagtgagccagcagcaaacaaagtgcccaattagagtgcaaatattgaaagtgttgctgtgccatttccacggagaatacatactcgtaaaaggaatagttcccgggagaacttttccatcgtattcccccgttaaggctaagtgcgataagaccgctccaaaagtggaagtgaactagctattcgaagtgagtttcgaatgaatgcgtaattataagaaataccgcataaggctgttactgttagatatcaaaacaaatcaaaaatcaatcggcgctctttctgtattcttgcgggcgcacgaggcgtatgattaatacgcactggcctgttatcgtttaggttccttactctcatacacttatctccggcgcactcacagctaatgacgaagtccagtgctgactaacaaaggacaaagacagctctggcctctatttcaaagcccaacaggttttgatcgtagatgaattacacggactgttggtgggaaaaacgaaaccggtttccggcgccgagaacatttaatgggtattccctatttgtttcggtgataatcacgtgaaatggtagaaaggctgtgcaaaacagagcaaagcgtctgttcttcacaataataaccagcatgataaagcatgattcccccagcgtttggggcacaagataacgatgtgggtaatccaagagcaacgacgtccgaaaactaaactcagctcaattgccaccggacaaacaacaaacaacgtgtttatcttacggctaggctaacgaacgtgacggatccgtaactgcagctgcataatgagcaatagccatcgggattgagcagccggactcctattgcacgttggcgtcgataaatcaaattaagttctaaatcttcatctgcggaagcttactcatggcgcagccaacagagcatgaggaaatgaataccgctctccatgtggcaaactaaatctttaaatactctgccagaaataaccaaacagttctttcccactactatgtgatatattcattcgtaaaggaaatcattcagaagcaagtgaaataatgtttacctctcaaataataatagttatttagtttaactgtctggaaaccagtttgcataaacatttagatcaatcggtagttggttttatggcacttaaacggctgtaaactaaaagttcagcttgaaaatgtctattaaagtcgtcataccctctgtgtctggtatcaaacgaaaacaaaaacaaaacttaaggctgagttagcttgggcaattgagaagatgatgagccacatgatatccagggagcttgttattgcaattgagacgagggcgtctaattgaacgtgaggctaacgcaaagcagacgtttataatctattcactgccattgtttctatgctttaattatagttttgtaacaagattccacctccgcctaagagaacctcactaaatcgaccgacttctatggaaattgccatagacataagttatttcatgttccaaaaagtaccgtttcttgagttccttcaaaaaggagttgcgcctcttggggttttccgtcctgatctcggtcacctcctcgcagcacacacatgtgaatcccgatggttggccacccagggattgctggtggtgcaaaacggcggcgttcccgttcccgttcccgttccctttcccgtttccatttgcatttccattatccccgaccctcagcgatatagatttgaacaacttgtgcatcgatttgggtcgggaatgtgcgggagccgagctgcgtttcaatttcagcgagttatagtttggctctggatgaggattcgaagcctcgttgttgttatcgcagcaaacggtggttcctggcaccgcgctagcacttttgtagtggaaaccgttttcggccatcttatctaggcggctcctatggccacagtcactgttattgttgttgttgttgttgcacatggccagataagcgataccactgaggtgagcacttcaaacacagtggcgttaattgtttaggccgctaaaaaaccggcaccgcaagtcgaaagacctttcccgcactgcgtctaatcacaaactgagccaagagtccccgagcgagcacgaagaaaaggttctcgcttctccctacggagcttcgatttctggagaacccaggccaggcaaactcacacacccacgaaaacaaacagggttgggggtgcaaagcgtgaaacgtaaggggggggagtacacttgacaagttccaaaaaaaatatggtttgtacttagccctagaactaggtacaagttatattccacggtataaactttaataaataaatgtttttcaatgcaagcgattaacaaacatgattttttaaataataatatgaacttcgcccattttctcccagtgtagtaacctcgccttcaaagagcgaaaaacaaaaggcaaaaaaccacaacaatgagcaagcaacaactgggagcagctgagtgtttcttgttttcgagctttttcgcgctcacagaaaaattctcacaagtgccgctcacactattgttgtagttttgtgttgttcagtgtaaatggtttatatctttatgacttgtgccttagctctactacacgcgattattagccccagtggaaaaaaagttgggtgctcgcggtagaaacgctggtttttagtattactgattcctagttaatgtatcagtttcctttaaagtatataagtatctaaaatttcaatggaaccattgcattttatatcgcaacattgttaagatatcgcttattacaaatgaatcaagtgcatttaacaagttcctttcaaacttttacttgggaatttccctggaatattcgacttttatctgcagcctttttcgcgagatattgcatattccttttccatatcattgaattaagtgagtcagggtgtaagacatatcaatccgaaaaataaaagaacttagtgaaattcaagattaaatttcagggcaaacccaagttgattgtttggttcaaagtcaacgggcggtgacgcacgacagagtggataacttcacactggagtagaaggaagtatctacatttctgcaggcatttcagcatttcatggaggcaggcacccgtcgtctgttatctggtggccaaaatgacgaatgcctactgctggttgattaatactataaatcgatttatgaatttgttttgccacctaaccaattgttcagacgatagagataaaagccagtgcactatgttaaagcgaaacacctgactagaccgattttgaagagagatgaaacactcctgagataaaagcacaaacaaaaacaaaaaaaaacaaaaaaaacaaccactaaaaatagaagaaacctatatgaagtaaaaattaaaaactattcagggctattcctaaatgaattttttaattattatattgcttttatctacgaaacattttatgaaaacttgcaaaaccacaagggtgtaatttctgtggtacaaatctagtttttccctgataagcagtttgcacactgagcatttgggaattgtcgaaaatatgctcgttttgaaataactcacttcttatcataacttaatttactcacccgctgaaaccgcgacgtttagtggacgatgagagtgcatccgccttgctgcgattgcctgtacaatcagaatgatataatttcagacagggccataaatgtatataaaatcgatgcacttactctgatcctgcatgtcggatttctgggagcccgctgatgaggctgcattcgctgcggttccggaaccgtgcttgtgtgagcccggcggcggtttgagcactgagacaggaacgagtccttcctgcacggcggcatcgtcgtgctgcggattcaggcgcaccaggcagaagtctggctctccggcggtgggcggctcgacaatctccacctgctgccccttgctcacgctcagctcattgctgccggaggtggcaatgtagtccgctaccacccaggtggcctcctggttgcccagctggaaaggataagaggataagagggggttcgcgggataagtatcaggtggcgcatttaggattcgggcagttaacccatttcgaaccaagaaatgtattctcgaagggtctaataaaatacacaaaaatgttcacttaagtggcaatattttatctaacaactcagtttttattcataagccgaatttttagtcaggatcagcttaaatttaccaacggtgggtcgcatttcatttgaaatctaggaaaaggggaaacaatgcccatcaccgcgccaatgattaaacgagattttatgagccataatagcggcaacccggtatgcggattacgtgtcaaaggcgccttcagcgggttaacatgctcgggtcaaggtcgagatggaggaggcccagagccttattgattgaccgccagaacaaaggccgaggactctgagggcttcaaggatcatcggcagagcgaacgaactaattagaaagccattcgagcttggcacacgtccattgtgccacgaggagcacaggaagcggaaggaggaggacttccgttagatttgattggtgacaggtccccagaacccaatccacaccgcccagaatccaatcctccttccctgccgcccaaaaaccctttctgtgagcattattaacgtacaagtttagtaatttacatgcggcacatcgcagggtgtcgatatgtggacgtctaacagatctttaaagctggtcgagaaaattgtggctaatcgttaatcgattccattggattgttcaaggcattggtgggggttcacagagtgaaatgagcagacattctcctgaagtcttgcatagatagtttataggttatcataatccctgcctgcatggcacatcaaacttcaagagtgcttaatccagtttgtagtgacaattaaaaggctggatatagctatccatatttgctgtgcacgcgcggtgctgaaatatttgagctttatatgaaattccccaagcgccggggatcatatctatttcacatataatatttatgtgggacacgccataaactggcagcgggagcaggctgcatggaaacacctgtcaggcgactcgggccaaatggggaaatgatgtcgccaaggcaaatggcggttcacgaggtgggcgatgaaaatggaaaatgggaaatagggggtgtgcgctggcgctcataagcgcaattaaatcaacttcatcagcggacaggagcaagagcagcggcagagagcttagtttattatgctcgcctcgctgcctttaagctctgcacgagtgtgagtgtgtttttgtgggcgagagcactgttcattttatacaccgcaagaaaatgctagttaccagttaatcaaagctaattatattaaatatacaaaagaatcattatatttgtatatacacatctatctttgacagacaacttggaaatagctcgtagctgagaactaggatagtataatacaaaggataagttctcagtgcacgcacacacacacacacacacacacacacacacacacacacggggactcagtttcctttcaggatccccagccacggcacagtgttaattaagcagcactgacacggaaacgtgccgcgctcctgtgtgcgagtattagtgggcagtgtatgtatatatgtatgtatttgagcggtgaagaggcatttgtgctggttggtgtgtgtgtttgcacgtttccgcttgtaatgcaattggttgaaaagttttcgaggaaaagttcgggaaagtttttcgacaacagaccttgcaagacgcgggggcgcagcttgtcaggggcgtggttggctgccaaattattttttcatttttatttatctggtgctcttaaattgtcactcagccccaatgaaaattgattggcggccaagagaaaggaaaacaattcagccgaaaatgtttttaagctgactttaagtgcgttgtgtgcctttatgctgcagtgaaaagttctcgcataactccggcacacaccggtggcgtatacgtaacgcgtatacgcaatgtgcgcttcatcatagccgacatcatcatcgctgtcattatcatcatctcggtgtgctgcaaattgcagcagtcacgcacaaccacccagactcacaatggcactaataagctgccatgaggcacaattttctccctcattttccccaagccagttgagaaagtggaaaagtgaaaaccagaggccacagcagctgtcaggaatcagtaaaatcaactggaattgagcatctctttaatgccatcggtttaagtcgactgatagccttgcagctccattacttctcagtttaacccgaaaatgaactcggctttcttgtaccgagtgtatctccattctattgtagctaccgattaagttcaggctcgcttttgtttccccttttgactggatctttcattaaaataatgaaaggatatttcaaagcaaagatgggggaaattcgagcgaacgaaaaggaaaatcgcacgagtttttcaagcagcaaaatgcaatcagcactgccttgttgggttacgtctttgccgcctacgtttttgcataaaaataattacaatggcttacagtttcttctgcgcatttgcatatttaataggcgactggcgcaagactaacagccaaattgaagatttcgcctcaacaggaaacgaacaatcttaaagctatcggtacccctaaaattggccgtctcaaacttcatctattttccatgggtaattgaaaactttccatgcggatttgcatagctgaaaatggggaaaataaacagaagggaaaacgaaggcctagaatgcagtcgaaatgggggaaaactttgcagctagtagtcctgggagaaaggccaaggacgaaattcgttgacagtcgacactcgcatttcaaaggcaaagttttcccagagaatttgactgctctcgctgctgattacacgctgataacaataatacaatagcttagactccgaaaaaaaggctcgcaaaaggaaaaggctcagccggaaaatgtgcgcctttcccttttcatccccgtcgcgcaaattgtaaagcgatttggcaaaatgtttacgttattattgatggatgctcccgctcgctttccgctccctagaaatccctagaagggccggattatggggcgtggggtaggtttccccacattgtatgtaagctcatgtctcttttgcccttcgaggagggatcgtaaaaacgcaattgctgcgacgacgacccaaaaagccatcaattgttaagtcattaaaaaatgtgcttgggtaccgggggctcgtcgaaggagaggcacatgaaagcaaacgtcagggttgtcaagtgaaattacaaacatcatttaactgattgggataatggcccagcaagctgttccctgcactgagaaaatatgattagaatatgaaatttaagattttttgttccccccatgttttccaaaaaccattcagctgaaacgaacttaaatgtttataaataacatcgatatctgcgtaaacatttcataaaagattgcgaacaaaaactcagtacattagagcttctcgcccggaacggttgcaagatgtttcattcaagaaaagctatattgtgcggattggttattctgtgcctgctattcctacctttgaccacccaaacgcagctcgacaggattgaagacaaactgaacgaattgcacagaaaactagaaagcattaaaaacctactggaaaatgccaacaaagagagtccgactagacgagtcaataatcgtatgggttcctcgctctttaacgcaatgaagatcacttaatatcattgtcacttacatatataccaatgtataaccgcaatatttttgataccgaaataaacaatttggtttttttttttttcaagtggaatccatatctcgggcatttatcaaatatatagctttaaactgcaaaatcagaagaactcttcgttcgatctacgtgctttgaaccaagatattgagtggaagggagaaattttagacagatttcgtatgccagttgatgcctggctggaatttgttcgcctaaatgccctcatgggcgccataaatcacacagatatgccaaatacgagcagggagagacctgctgaaatatatacacataaatgcgaaacacatttgtgtgaaaataaatgtgtgtacccatagatagccgcaaactggctgtgtttctggggtacataaaacataaacgtctattattcaattaactcgcacagtgggtccgcagcaggtgcggcggggtcagaggtcgaccccgggtcccgacatcaattacgttgtggcaaacacccagtcggcaaagatggcaaacaacaggagcaggaggaggaggaaatgggagtccgtccgcaggacggggagcagtgcacagataaaaaaaaaagtaagtaaccagcaaaatggttagtgtccaaaagtctgctacatgcatgtgcatacattaaaaagtcagatgatgattaattacttaaacagtgtcaaatcaaattatttgtttttcctattctctaaaaacactactgcctcaaacatttggtttcttgtgtagctatcgcactgcggtctagtaattgtacgacatgttaacaaccaaaagcaaccacatttcctcgactccacatccacccatcgataggcccattgtctggcccgcctgctaacgtggctcatggatgccttttggttggggatgggggtgtggcttccaagtgggtgtaagtgctgaatgaaagtcatttacagcgcaaatcgaataatattctaaatcaattacgtacaactacgacttgatcgataagggaatcgagaagaagttcaattctttctactggaactgggctaggacttttttgatgcttgtgttgatatttattgaataacttagtatcacttattagactcctgtttagtaattttgatgtcttgccaaacattaattttcctacttcacataattattttaacaggagtgtcctcacttgctgtacttgaaaagtcaagaaggcaaaggaaatgatcattaatgagcattggcagagcagctgggatacggcaatagaatttccttccttatgggcaaatcaacccgttgttccagattcccatgccacaaggaccaacaatttggtgcgaacagcagacaaacaaaaccaacaaccgattgccggaagcctcggaatttggggctcagccttgaccagcccaaatgctgtttgggattttaaaagagttggccccatgtcaagttgggtgtcctgtcccccgaacccccccccccccacccagcgacccaactgattcccacttaaaaccgagagagagcagtctatggaacgttgggggcaacaggagccaggaggacatcggcaatttgtggccagcagagaatcgctcatgtccgttggattggattggattgccagcgggaactgtggatgacagatggacatggccacgtactcccccactttttctccatggggagcaattgtgcgagaggcggctccggtttaaacaaaaaatgcgatgtctatcggtgggcgtgtcacattgattttatggcctaaaatgcgaggcgttgaaccacaagaaaaagaggaggaaaagacaagcctaaagcttcgaattctgatggccattctagtgggatgtgaaagttagccttgttgggattacgacctaccacatcgggacctcaaataaaacagggagcattaaaaccgagcaaatctgtatttcatagtacgaggttaaaaatcgttttgacttcatttcattattcctagcacaattgcaatatccgactatttattttattacacaataactgtatgctatttaattactctacgttttttacatcctttaagctctccttaatttgattttaggttgtgattggctctaccaatttattacacttctattcaatattcataggtttatatctgtggcacggattttgtttgtcctgtatcgtacgtatccacattgccgacgaataaaagcattctgatattaaattctctgaatttcggagtttgtttgtttgttgttcttcagaatccgaatgtaggcgagtaattcatatttgtaaacgttgatttatagccacatttaatatccctaatatatgaatacgtttaattcgattcaacttcgtttcgaataatagaaagattaataatttaactcgcaatctcttattactatgcatacacatatctgtatctggacatggccaaaactatttgagcttgaatttctgcgttaagtatgtgctttaaatgctcttgcttctcatatttgctatgtgcaccccctcaatgtcaagagtcctgcaacaaggatctcaagttatgctgtcatagcatacttctgatgacaatttagttacaaattcgtttggccttctgctttccagcagcagcttctaatgctttgtgtgctgtttcttcttaggatttctactttttttcactggatttccatcgcaatttgcatatcagtcttgccattgaggagccaacgacaagggctcaggaacagagctttctggctttgtctgtttgccatgttcttgaagagcgaaagtagttgctatccgcaggtaactttgtcctccagtttgcagaacgatgcgatttattaaaattgttctacattttctgcattttgtttgcctgcatgttttgtacctcctcagctacaagacttttctttacgccttctcatccgaactacaaaatatattttccattgttagactgctggcattttcttgtggctctgggaaaaggaaaatagcagggaagatagaaaaagcccagctgaaggagcgctcaatgacgcagccaactgcagctgacagcaccagcatcatgagacacattttcgtatggcagcaaatttccttttcaacgcgccagcgagaaaattgggggaaaactgtgaggctgggaaactgcttcctcacttcgttgcctgcgatttattttgcgtgtgcactcgaaagtatgccataacgaaatgcataaagcattcgccccgtggaaagcgcttcgcaactgggcaactttcaatggctgcgcgcaaggagatgccccataaaagtttacgcctcctgcaaatttgcttgggaaatattcagcgaacacataaatattttcgcgacactaaattaaaatattgcagcttcctgcacaagcactgaaagaaaaaaatcgacttaaagtttgcctgattaattagttcacatatataaacatccttttttttgacaaactttttgtgagcaagatcacgctggaaataagagctaatagcataagtccaatggtcacactattgattcagcttcgaaaatataaagccaagatatttctacgtgaataaaatatctcactgttcttaaatgaacaaccacgacaacaggaaaacttaaatgaagcagaaatttatgaaaggccgccagcataaagtaaattgagtgagtagaaagggcaatgcgattataaggagaccaggaagctgtctgcttctcacagacatcactcaagccccaaaactgacaaaagaagttagggggccacaaaaatggaggcaggggcaaggtcagcacaagacacaatgcagcacaggaagcgttggcggcgggatggtgggaaggaaaacaggggcgacaacaatgatgatgaagtgataaatacattatgtgatgagggcaagaggaaagcactatttaaagaatgtgccacgggaaagcggaacgctactagagaagcagtgacgaagttgagtagggagcaaataatttagcgcaccacactgcgtatgattaatgggcttattaaacggcgttgctgctgtctgcttgggtcaacaaccagtttgctggcaccgtcggaacttccacaactaatcgaaataaatagcgcaacacgcaataagtcaaagacccttactgaaagatagaaactgcaaatcttcaagaagagattcactagccatatagattcagtgatattgctcctattaaatgctataaattcatcataaatttatatggaataatttagagcagtattggcttccctccctatcttattaagtattcttatatgaaggaattgtaaatatttatctgtcaacgatttttgttcagcagtaaggccttggcaaacattaatcgcaggtcgagtcacgacgcacttatagaaccgcattcactgggcaaaactgtcgcatgacttgtaggaggaggttggggtagtaaagtcaaggatatctcgaccacaagaaaatccgtgccgcaagctggtgacctttgcacttttggccactggaggaggcggggtggtaaacttttgccactgctaaataaaagataagctggccaagttcccgataaggtcaaggcaatcgctgccatgtttagtattaatatttgatggcccttctattcgagcgtgcatcaatcgaacccttatcacaggaggattggttaaagaattgagaaaaattacgtcgcttgtcggaaacaatttcttataatcacaaataacatttgcgacaagcaatagccgaagccaacgattgactgcgattagagcaaaattatttttgccttaattatgaaagggatggtcacacatgattttgcgtttttccgttcattttcccgaccttggtaaggtcacactataagaacttagatgtcagttttgatactcttacgagattataccttgagtccgctgctgctgggctgtcgaaagaatcgaaaggagctgggcgtatcgatggtatgttgtcgggccaagactccgtgacccgtgacactggactgccggaaccagggcagcgagatcttgcggcgacttttccgctgaactggtgcaggattgggggcgggattgcttgatgacgtggcggacacggcgggaaaggtgaacggagactgctcctgctgactgtggccattcttgccaggagttccggctcctgccggcggtggggaagtggagtcgtcctcctgcagggtgcagagtggcgtattttgagcagagtctgcaatggacggcgacggcgaaggatcgccaacggcgattggtgcgctcgtgggtagcggtgtattgggcagggatacgtagcccttggtcggtgtgtcctcgccgcacttgagcctctccagcgagctcttcttgccgccgaccccgccaacaccgtcggcggagtccacactgttcatccgctcgttgagaaacttcttaacactcttcatgattcgttttggctccgttttctcctccttttgcgggtttcttacacaatcactttcatttttcggttaaaatcacagtgcaaagggaaaagcaggcggtgggctcttttatttttaaaacaaattcggggctttgttagcagtcagccgcaaatcgataaagttctccgactcctagaccgaaatgttttatttttattttccagcgaacgtgagtgtgtgtgtgtgtgtgtgtgtgtgtgtgagagagagactgcctgattggattttacatcctgcaggatgttcgcacacaaacgcgcactgggtatctatctatatggatttcacatatggtggtgacagtttggctgcggtctcgtttctcgctgtctttgactttcaattagtgcaacgcggcgtatgatcaattttaagctcacagcctgcagtttgcattttaattaatgctatgtttgcgcagtctgtgccgcatttaattatgactttaaaatgattgagtgctgcagcacaaagggatttagactcacttagataagcaaacaaaagcaagcaggtattaattaataaactgagctggttgtagttaggaacaaaataatagtcttttttttttttgctttcattcgaacattttatgatttatacacttatttttagaaacagatccgagaaatacgattggttttgattattgctcttaactgaaacgaattaactaaatcaaaaaagctggctgcccttgtcttgtcggcatcattcgaccgccacttttcattttggccacttctcccgcttctgttatgatttcgctgtttcgctgttatacactcgtatatatattttatttattttatttgcatagataaaaagctgcccaccgccaaatgggcaaaaaatttatcttgaattttcttagcgcacgtttgtttaccccgaactatgtccgtatataaggcctatatctatgcacatgggtttgttatttttacacatttctgtttgttgctcgacagtcgttgccaggcgtttagcgcgtgtttccgaaaaagtatatcaagattgggaagatgtggcaggtgcgccatagcgactgccacttcagtcggtccgccgatctcggaatcgcagccgagcaattatgactgggttttctcagtttctgtttgctttccttgctatttattttcccatccctttcacctcttcaatagtttaggggaaaacaattttcctagcaagtggtaacagaatttaagtcgagtaaatcgggaagactctgccaaagcctattagcttttccagttcaaatctaaactatgcgtctatagaatttataattcggctcactacctaaaatactttgattcgcccaactgatttagatatttttattagtttaggatggaacattaaaccgcaaagtaagggtatttgcaaatgttcggcatgagctggccgagaaaatttgcatacgttcgaggaaattcgagggctttttgagcagctgttcgctaagtggcattcccatcacttttggccagatgctgttggttcggtttttctctttttaaaacactgaaaactttgctcctttccgtggcgaagagggtgtgtgtatttacacccactgctaggactcgttgacattttgtggcgttgacaaaatgccagacatatttcccattttcctagccttctcggcattctgtcctaatacttctttcatttcattcactcaaaaagccaacctaattcaatttttgcaaatgaatgcacacagtgaggaaaatggggagaatggggtgttgttagagcaacgcttggatttcaaactaaattaatttaatctcgcacccgcaaacttaaagtaagcttggtaacttttgcttacttccctggtggtatcaaggtaaagggattaccccttcttgcactttgaaccatttatttcacatttttaatacatcttcaatgaaattgtattaaatctaatgaacctactcccagagtctcaaagtactcagaaactgttttaatcctgcctgctggctagctttgaaactttgctcacgagatcaaaataaaagtggggaacgagcgccaaatggaaaacgcatccgactgcagctcgaaaaacgtttctagcattgagaactttggaaatgtatttcctttgttcggttctgttgggtcaactaagcggttttgaccgaccgacagcagttgctaatgtttgtattgttcgtatgctgttttaattgcttccggctgcaaattggattagattaggacaaactgtcctttggcaaggggttgggttcattatggaaatggaagtagaagcaccagcgaggataccagccaggatgtgacaactgatggatatgatggtaagggcacaaggctggacattgcactcgtttccactgtttgcagttcacccaactggcactcaaattaaattgcaatgcatcgactcgataattataatgaccaaaacatgtcgtgtctacttcagccgcaactgaaaaaaatgcaatataaaacccagaacacacagggagccagagccaccgtattagctgagctattccacggaaccacaaccctatcgcgttgaaataaatattaaaatgcaatagataagcgtggaattaatggccctaactcgggtgagttagccaatctaagaacaaagcactgggtggcggtgactatcagatacccttcatgggaaacagccgaagatgtggctagggaatcggtatggaaaatgcaatataaaatatttaggtaagtaagtaagtaagtatgtaattagatagaaaggaaagacttaaatacaaagtgcaagaaaaacacttaaacgaatattagctgttgcgaataagatacaaatataagtatttttcccagacgtatttcttttagtgctacgcattcctaagccatccatatattttggccacgatacactgcgatcgctttgcagttgacagcagcactcgaggggtttttttttcgggggcaacgaatcgtctaaatggggggaatgtaactgctactcaagtgactgaaggcgtgaaaaaggtcaaaggcagcggtggcggaaaagtgggcggaagggtcgcattttcgcctgcggctgctgcagacattttcatcctcagctcattttttcccctttttgccctcgaaaaaatgctaaaaagggttcccccgctcgcttgtgtagtttttggcagcagaaacagctttttatcatttttatttgcattactcggattgttgtttcacttttgtttctagttatttatataagccaggtctttgtttacaccatttttcgggacagtttaaggcctaaacaagaggctagcatttatgtaatcttcttttttttttttgagtattctttaaatttttgctgcattagcgggtattcttgtttgttgatatggcgactttctttcaatttttgatttggtagtatgtgttgagtatctttatctttggagtgcttgttcttatcacgttgataatgggcaattttcaatcacttgattttctccatacaatttatggacgttgcgtattgcgctcctctttagcgggttcactcaaagaaatatagaatataggtgcagcttcagagttttagtgaagaagagactgctgctgctgcgtttggcgtttttttttttttggccgggcggcgcgcatctgcaggcagcaggcgatggaaaatccgagaggaaaactaaggaaaacccgagcagcccggcgatgagtgaacgaacctcttggctgaaactctgcggagcaactggagcagcagctgccccacacgaacccacgagtccacaaattcacgaatccaacgaattcgcagcgacgaacgcaccgaaaacattcgcaatgccaactgccttaacccactacccaccagggggtttcaaattggcgaaaagaaagaaaaccagaaagctttccacggaaattcggagagtgcttctgcccagagctttcactctctcaggttgttattgttggggtttgtgcgttttcagatgggcgggaatttcgtttcagctaattatttaaattaattccgcttttctaaagggacgtaaatcattttttgtattcatcaggatgggcataaatagttctctaaatatgctaaatttaacagattgcaaagcatcccagatataatgttttcaatgatgtattttctttgtagaattgactacttgaatcaaattgacacagactatcatatagcaacaataaaatataataaacactgcaagaagtttcggggtgttggacggatcctggagccgtaaaatagtagcacaagtaaagcccttaacctcggtaacctcttccacataagacaaacgtttatgtcggtcgtaaaaccgctcgaaatctgtgcatcttagctttagtggcgaaatctggtgggttttgccgtaacgctgcccgttgacagttgaaagacgctcgcagacagacctaactataaagaagtgtcacataaaatttacattaaccaaatgtaacgaaacggcgctaaaagcagtcatatataatccagcacacactcgacctacaagatgcagacggctgctggctggaaactaggagccgtcgacaagcagcggttacgaagagttccacgcaccagcgagggaaatctcattaagccctgctatgaattttaaacatgttgcaggacccgaaccgaacccatccgatccgagtcgtggcgagcggaaaaactagttcagctggccaatggcagcggaatccacgactctgggatggagagacagatgtgtcggttggggatgagggtgcaagctgcttccatgtgaggtaggactactggcaaagttctttgcggagcttaaagctacctggaaaatagggggaaactcactgagaacagccacacagtcaaaataaggggaacactctgagtgctttcgaatctaacttgtaggtattaacaatggttacttttgtagttattttcctcattcctataacttgccacttaaatcataatcaaactttatatgcgaacttaccttattatcactatctgtggtattacccgatccaaagctagccagtgaacagcgatcgtgatcattttccgtgagctgttcatccaagtcccgcgaggatcgttgcgaggagcccgaatgcttagctggagacttgggcaaggtcaacgaggtgcccgagaagcaggtctcctgcatgacttcacgcagcttcttaacccaaatctgtaaggtataaaaacgtattaaagcaaggtattactactatcgatgaattactaacctgcttggtttccaagctcgttgccttcagcacgatcctgcaatccgagagcatgggagaacgacctgtccacacggcaaacttagtctcatcgccttcgatgtgctctgtgatgcccatgtcggtggtcatgagcttgcttttaaactggtacttaactacgttggactcctttacctccttagcgaacaggagatacaactcaaacaagaagactcgacgctctctgccctttcgaatgatctgcttggtatcccaggcttggaaggcatcctgcagcacaacttcacccagtttgtctacggagacatcacagttttccagcagcgaaagatgcatggcatcgttggcctttttggggacattgagcatcacctcgaggccttctttgatttcgccgtggctctcctcgcagcaggataggagatccttaagtaacagctggtatttggtgatcctctgcacaggtttgatgagataggcgggcaggggatgatcaacctccaggcgccgttgtagttcttcaaagaaactgccgccgtgctggaccagcaaattattcgatgtgggcttgttcttgcagtagtgcacatacatatcgaacttggaggcccaggtcacaaagcaatggcccacatcctcaggcattgtctcgtatttctccagctcgcgcaggaaaatcttctgatggaagtggtgtatttcctttatgttgccgaatatcacatcttcctgaccaatgagggcagaaggtacactttttcccgctcggaattcctcaaggaaacacttgatgcaagtggccagatcattaacatacgccctctctgtttgcatcagttcagccatgatgaactctttcctcctcgctgacttgcgcttctcctcgtttatctccttgttctccttattgctgctgtttagcttggcttccagcgtggggtccgaatgacgatccccagaggaggagcttatcgaactgtttccatcggagcccagaagtaactgctgctgggacatgcccaaagacttctccaactgctcgcagtagctgtccatgcggttgctgaagtccttgtaccgctgatccacggacgccacccattgcttgatatcgctcgcatgggcatgacccttttccaccaaactatcagctagttggatcagaagcttcaccctttcgcgagtctccttagcagtgcttcggaattcattatgctctttcagcaacccttctgtttcctccttgcttatgcccaccagattggatctagaggagagatacgcttctccggtgttgtgaatccattcgatcgcctgtttggcgcttctctcaaagagaacgaactgctggcactgatccagagatttcttgcgcagcgtccagtaatccagaacttgattttcctgagtcaatagcttatccagtttgctctttacgtggccttcgcagttgcctttatactgatagcactgctgcgatcggttggcgtattttagaaaagtctcagctgtgcgacgcgccaaagtacaggcctttaggaaagcctccttctgctcctgatgtttcgagatcaactggacaatggcttgagctttgtcgctgcctcctccaccgtcacaccagtcgtcctcacgtttgtactcccgctctaagctgtccagaaccgagcacacctgctcggctgttttgtagaagtttatcgaggcggtcaccagcttgtgccgctcctccgcataagtcaccagctgctgccacttcttcgtcacatcgtcgctaatttcatcgatggatagcgggtcgtaatggttagcattgatgagggcatctgctcggtacttaacctgcaccgccgatgtgtgcgtcttctcgatggcaatctgaaggaatggaataaattaataatcgtacaactattttgagtgatatttagtgtaacctggaactgctcatgacccttgcgcagctgctcggcctcctgcaaactgttgggcgtcacgaaacttgccaccagcatggcttctccattgcggatccacgagataacctggttggcatcgttctggaattgacataactgcaccgcttgctcaagcttggcccgcttggcctcggacatttcctccagatcgatctcccgttcccgcaagaagtcaagcagatactcgatcctagcctgagccgtgtgcgtggcatccgccatggaaatgaagccagcattctcaaagagctgcagcaggtcctgaccctgctgcacgacctcgtaagtggcgttctgtatttccgtcaccgactcgttgtgcatgcgaataagttgttcggctttttggtagtccctggagaggtcagcatgctggagctcctcggaccacatctccatttgcacggacagcaatctggcatcacgctcaaagtagcgcaaacgcagtatgagatcggcacgaaacttgcgggcggaccagagctcctccaactccactttttgtttgtttaacttttccagggtagcctccagagcggcaatggaaccagtattgtcggcatactccagggatcgcatttcctgcagcagagcttcaccctgggagatggttgtaaggcagacattgacggagctctcctgctgatccctctggtattgctgcaatatgcgttcaatgccctcgaggttctcctgcgaaagacgcgtttcatccgtgctcacatccgttcgaagtttgtctatccaggcggtcacgtccttttcatgggtgtagaatattacagccatatccagccggcgtcttctttgctccactctttccgcaaaactgcccacttgaagctccaattctctggccacagaatatatctcattgggatcggcttcgccacttctagccaattcgtccgcagctgccaggagtttttgggcgttactataggtgttctgtgcaacgttctcaaagttatcgtgcgaggtctgataaacgcgggctttgtggaagtttctgcctatacccgtattctttcttaggaaaacttcgccatgatttttcagccaatccaagacctgcttcacatcttcttggaagagtctaagagctagggtctgatgcaatcgtagcctttcctgatgccacttggcctccagggtgcggtggtggctcaggatctggtgaatcacagccaatacatgactggcgccttcgctgtaatccgctgctggattctgtctctcgtacttgttaaaactaccattgttgctattctttcggtgatccgggacaccaggcggcggaggttgattgcagacctgcaccaaatgatccaactgatagaggagcttcttgctagtggaatgaacctcggtgtaagcttggcacatagcctcatacagggattgatgagtccgaatggccgtttccaagctctggatatccgagggcagaggctgagaggcctgacatgcggctgcccagctggccacgctattgcagtactgttctgccttgtggtggaaaagaacgctcagctgcaggacagctgttctctcgtccaagcccgcggcaaagtccttccaggttcggtccaaacgttgagccagcgttttaatgtgctgggccgcataatgctgactttcgatcagccgagctgccacggccaaaatcctgtcgatattcacggatacattcatggatgcaacggcgaacttctggtgctcgtcctgcagtgacttggccaccgagtaattgtgtccaatctccacgtagctcatctggaacacatcgcggttgtgcaagatccagtcgaacatcttctcgcagtcctgttcgaacaggcgccactggaagcactggtctagtttcaccttcttgtgctgccacagcatcagaagtttctcctgaccggtgtggatgagttcgatctgccgcagcgctttgttcacggcggcagacatgtccgggttgccgcccaccgaacgagattgctgcgagggctgagattgctgtccggcggaggaggggcccgagtccatatccggtccgccagagtttgtgggggcctgttaataaaatggggagttagaagtgtttttggtcttaaaaataatcaaaaaatgcaatgtaataacttccaatactccggtttttttttttaaatagaaagtccacctttaaatatttaacaggaaacacttttttcgattgttgtgcaattaatgtttgaataatttatttggattgattttttacgagctttaatgaaaatggcctttgcacataaaacacataataccacaaatgttataaatgtaaatttcatctactcggatggcagacaaaacaacctatttccataataatagactgaaatattttcgatggagtttcttttgttttggcgtacaattttgcaagtgaatgctaggcagaggctattgactttttctgtgaaatatgtgattgtttattacgcccaaattcctggataaaaaatctcataaaacctttttatttgtttactcaatatatttacgatgggtaagctagtcgagagcaacgaggaatcattctattcgattgattcccattcaagattttccgagagaaatcctttattcgattccttacctgaccgcctggcggagccatcgcattgatcttggccagcagcttcttgccctgcatgtcgagatcctcgatgggcagcttggtgatcttcttgcgcatctcgttgtggtgatcgatggcgtgcctggccaacggcacgtcctcggcgaagtcgttgcggttgaggtcctcctgcagatcgtcgattcgatcggccatgtccccggcttgccagaagaagtcctcgatggccaaccgtgcgtccgtccactgctggtgatcgtacagctgctggccctcaaagtcaccggtcagctgatggctctcgacgattttgttaagggactcaatcgacaccgtcgtcgtctcgaacttgtacttgtgcgaggagatcgaggctcgctgcttctgccagaagttgtccggcttgatgatcaccacgttgtggatattcgcgctgaagtgctcctgcagcaccttcagtatcgtcttcacgttggtcgagcagttgccattgcctcgcatgtcaatgatgactgtgaatccgaggttcttggcggcgtcgctgaaaataagccaggtgaaaggtgtgttcggttagagagagcgatcgaaagagaactaggagatagtgtggatacactggggaaagctattgcctagattggtagatactacatagcacatatgtatcttttcgtagtatccagtaaacaatctatattaacttatgataggtatcttagaaagtgtacttggtactgctttcaatcaaagtaaatgactggcaggtggctagagtcttttttttttttttttttttgagtgtagtgtcttcccagcagtacgtgagtgagagtgtcgcggatcgctcatggttcgttgctctgtttacgtcgcttgcataaattaagacggaacggctgcttctttggtctggggtcggtttctattgctctgacaccaatttcagctaataatttcctgcacacctcggcctcccagagcccagcccgcccaacgctctgatttgcattccttttgaattttaatcgctccattaactataaatatttctctcattgatgtgtgcgcaactccgcctcctccgatattccgcctatagttcctattatgccctctgtttcgccgctacttcttggcccgattgtggccggtttcgaatcgttctaagttcccggttttaaccacgttatcttctcgtgtttatacatacgagtatgtcgtgcggttgcttgatgggcatgggcattactaggggttttgcccccgaagaacaatgcaaaagtgaagaggcgtctagtctagtctcttcgaatgcattttgggttcgagtaagtttaccgccagcacgaagctctttgagaatccagaataatactggtgttcccaacggttgaaccccataaaagttcccgaacccgcccgcaacctcttatcgtgcaacatatctggaaattttggtgtatttctctggaggggcatggggcaacgttttgatgactaataaaaccctcgaaacgggctattaaaaatcgaaatttaagcccagacagagggaaacgaggacaggaggaaaagtgtcgcccgcattctaaaaagtcgaccaaaagaaaccaaacacaaagtccaatcaaaaatcgtttatttaacccataaatccgaggttccctccacgaaatacccccgaaggaagttcagggaatgtacgtgtctaaaatgctgagaactcccccgattcgctcgattcacggaatttgcattgacgacagcagtaagaagacgccttgacttcagttgccaatttggccgagtctcggaacagagagacaaaggcacaaacaggcgcagaaataaacaaaaagtgtttcacgccagagcaaataaacaaaaaccaacgcgaaacataaacgaaggcaagcaaaacaaaagggggaagttatgcaattggaatcgacgcaatgagtacccttcacttcttttcaacccacatatcttgggcatagtttcttagaaaccattggtcaccagtggttttctgccagagatctaccccaagaaagggtataggtataagaggagaaatgcacagacaaagcgcacagtgggcagactgccagaacggaccgcaaatgccgtggatggcggcgatgagataaggaaaccccagtaccatttcgtatatttggagcagagagtatgtatggactacgacgtcgatttgcttatcggccgaacctgaagtgtgattgcttgttttccggacgggggggatccattgaaatgtgggacagcgatagtacaatgctttgcttgttagccggctgataactgataacagccgaatgggatgatgcggcggcgtgggaactcggtttgcagtgattcatcatggctggcgaaaacttgttagcgcttccattgagcagcaatcaatctgcaatcttcctatgattgcgccaatgagcatgaccaaataggcgcgatacgtgtgtttctccctttctcgatgattggagaatgtcagatttcatgctcgcgcccggcggcagatactatttctacatctcatcagatactcttgtcgtgtgtcgcaatctcgggtcgccatcatcatcgactcgagggtctgattatcatttcgagtctgttgccgttggcagccatctcgatggcagtttctagagattctctaagccagcgctgcaaatggttgctttatttgtctggaggcaggaaacttttaactggatatttatcgttgagttagccaaaactattgttcaatctaattaagcaaacaatggatttagactcgcacttttactttaagcacacagagtgctataaatgtctgcatgtcagtgttatcgaggcagcactgttcgcccaaattaccctttctttctttctttcctctcgttttacggctcatttcggtttttgttgtggttttttttagtctttggggcagcagcaaaaaatattcgcattcttcgagttcggctcttaaagactttggaagccggtccccggttttgcccatacatatgtatgtatgtatgcgtttgtatctgtgtgttcttttgctgtttcttcttcttctctgttctcggtgctttcttcgccgcacagatttatgcaacttttgttgctgctagtttttattggagaacgtttacttttatgacttttttagcccgccatggccctctgtgccacccattttgacccgcacttcggcgattcaatgtcaacagcagccagctgagtgagagagagatgggcatatgtggcgagaaagagagggcgagccaagaacaatgtgcgtgctgttcttgcaatcgtcgaacgatgatgattcataaaaatgcgactgcaggcgaacgacgactataacaggaaaatcaagtggaatgtggcaatgcagctgcagcagctgctctccccctcctccccctctcgcgagcacccctgcatcctccccctattcaaaatatatatatatacgatatatatatgttggtgcgggtgaggcgacgacgtcgcgactcctccgaaattgcaaacgaagcgcagccagcgatgtcgcgacgtcagctgacacaatgggttgccattgtactggtacagtaaggccccagtaacgcgaaaccgcagctgcgtggtattcggaatttaacaagagatcgaaatacaaataaactacataactaaagatcgaagatgctatttacaacgatttctaaaagctacaaactcgtgattagtctccaagccgaaaaagttgtttactaacgagagttccctgtgctgtaaatacaaaatgcaggaggccggagaaatttggacttgtgccgccaaaggcaacattgcagtataaatatctaagaacttgacgttttcaattcatctaaattgtaactaaagctggcagtcatgcaatccactttgagtgcacttaactaagctggacgtttttaaagaaaagttgatcaaatatacatatatagaatgtatatgtcaagatgaaaagtgtaaaatttaattaggtgcaagatgatttgggtgagtcattataagttccaagaattttctatgctttatttatagctcgtaaatcaaaaagtctataaaaatgtaaatgtctatgctacgaattaagccaattagtttgtgatgaaatctagaaaagcaacatatttaaatgtacaaaatatgaaaatggtcctctttactttgctgagtgttatcatattattgcaattttaaattattatcatggctagtgcttatcaaacaataacttaacgtaataaagtgcaggcatagattaagaattagctgcactcttttttttctcggcaatatgttcataattatttatcttgctgtattttaatatatttatacttctacgtgtgctttcgtaatacatagataacataaatatagttataacatagacaattttgagatggacgacctttgcccagatccaattggatgtcaatagaacctaactaactaaatggctattcctatgtggtagtagcaactacatcctcacctgggaatgctgatcaggtagctgaggagacgccgcagatcctccggcttgaggcgatcgcgacggggcgtggccgggaagcagaggagcggtccgccgcgccggtcccgtccgcccgtgaggaagacgacccgttcctggaggagggtcaggagatccctggcccgctggccgtccatgccgtcggcaggggaagggggaggggtggttaaagcggccgggggttaatcactggaggggttaaactggggggtctccgcccgttttttaatccgacgatgggcactgcagcataacgaattccagcctcgaatttcacttgttttggctctgttattagttattattatgaaccgctgcttttgctcattgattttcgcaaatttctcgctggcattttcatggtcactcttttgctgttgtgtttgtgttgttgcggttttcgtgtgtttgcccgtgtgtgcgtgtgtgtgtgtgggtggaaaatgagtggggaagcagagatgcagattagcaatgggtatttcacttggttttctaaatgctacacataatttgcacacaatttgtgtagttttcctatttttagatgcaaggagtggagtttttttcttcagtcaccctcgcactttcgtgcgtgtgggagtgagagggagatacaaacagacgggcaaacacacacactcgcatgggggtgcatacatatgcgtatgtgtatgtggcatgtgcacacatgtatacatatgtactcccgttaaatgtcataaatcacacgcagcataaaaacatcaaatagaactcgcgcaggcaggcacacaagttgaaacattatttggaaatatacacactcaacacaacattcgccactgcgaacgggcgaaaatccgctatgttttaattgcctcaatttgaacacaaactccagacgtatatatagcctgtatatacatatgtatatgctatgtatatctgtatcatcacatcatccgcaagcagttctcttgcgtcttggctcttcttcttgccactgcttgtgccaccaaattgatttttttcactcgcgctgcttttgtttttcacacgctttcccaccggtaaaatcacccaagttaccgttgcacgcagttcgcgacttgacgcgggctaagctaaaattttcatttttcaagaaaccgcgattttacgaacgggcgctctctgttttgtttaaacaaattggattttgcgaaacgacaagtgtgaccagatgccgaaacggcttacaaactgaattttcagccttttttaatcgagcacaccgattgcgtgcctcgataggtgttaataatcgatagtcataaggcatcgcaattgagtagagtttttcttaaaaaagtctacatagttacgctcatgattatctcaaaatgatacctatgattaaatattaaatattttgactttttttaaataatatgtaaaaataccaactatctacgataacaggcatcgattgtactactatcgatgctcgcctgctagcataagctcgctgatacaacactgtctgttgttcattagcttccgtttctgccgagttttaccaaataaacccgaatcaaattaatatacctgcaaacattttacgcaaaatcaagaactcgcttcgccagcgcaagaagaagcaccgcccacggcaggccacgcccccagtgcgccccgatcccaaggacgccgccgccaaaatggagagcaacttgaacaggatcattcgtgaatcggccaaactgaaactctgcggtcagctcagcaaatacaccaatgtgatgaagggtgagcaaactttcacctttggagcagcaccttcaagctctccatcccatagaatccccgctagaaccgcttccctaatcgcagcatccactttgcaggatggcagtaccgttggtttacggtggacgccaagacaggatcgctgagctactacctgtgcgactcgtcgacggtgggcgacgacatcgcgccctcgccccacgtcctggccagtgctcccaggggccaggtgcagctggccggcgcagtggtgtacccgagtgacgaggactctaggacgttcgccatcgcctgcgcctccggcgatacggtaaagctgagggccaacgatgccagggcccgtcaggagtgggtggatggcctgcgggcggtggtcgagagtcacatgaaggcgatggacatcagcaactcgt

SEQ ID NO: 4601 - DNA, 5968 bp, DROSOPHILA
caaaatccaatttgtttaaacaaaacagagagcgcccgttcgtaaaatcgcggtttcttgaaaaatgaaaattttagcttagcccgcgtcaagtcgcgaactgcgtgcaacgcaaaagagtgaccatgaaaatgccagcgagaaatttgcgaaaatcaatgagcaaaagcagcggttcataataataactaataacagagccaaaacaagtgaaattcgaggctggaattcgttatgctgcagtgcccatcgtcggattaaaaaacgggcggagaccccccagtttaacccctccagtgattaacccccggccgctttaaccacccctcccccttcccctgccgacggcatggacggccagcgggccagggatctcctgaccctcctccaggaacgggtcgtcttcctcacgggcggacgggaccggcgcggcggaccgctcctctgcttcccggccacgccccgtcgcgatcgcctcaagccggaggatctgcggcgtctcctcagctacctgatcagcattcccagcgacgccgccaagaacctcggattcacagtcatcattgacatgcgaggcaatggcaactgctcgaccaacgtgaagacgatactgaaggtgctgcaggagcacttcagcgcgaatatccacaacgtggtgatcatcaagccggacaacttctggcagaagcagcgagcctcgatctcctcgcacaagtacaagttcgagacgacgacggtgtcgattgagtcccttaacaaaatcgtcgagagccatcagctgaccggtgactttgagggccagcagctgtacgatcaccagcagtggacggacgcacggttggccatcgaggacttcttctggcaagccggggacatggccgatcgaatcgacgatctgcaggaggacctcaaccgcaacgacttcgccgaggacgtgccgttggccaggcacgccatcgatcaccacaacgagatgcgcaagaagatcaccaagctgcccatcgaggatctcgacatgcagggcaagaagctgctggccaagatcaatgcgatggctccgccaggcggtcaggcccccacaaactctggcggaccggatatggactcgggcccctcctccgccggacagcaatctcagccctcgcagcaatctcgttcggtgggcggcaacccggacatgtctgccgccgtgaacaaagcgctgcggcagatcgaactcatccacaccggtcaggagaaacttctgatgctgtggcagcacaagaaggtgaaactagaccagtgcttccagtggcgcctgttcgaacaggactgcgagaagatgttcgactggatcttgcacaaccgcgatgtgttccagatgagctacgtggagattggacacaattactcggtggccaagtcactgcaggacgagcaccagaagttcgccgttgcatccatgaatgtatccgtgaatatcgacaggattttggccgtggcagctcggctgatcgaaagtcagcattatgcggcccagcacattaaaacgctggctcaacgtttggaccgaacctggaaggactttgccgcgggcttggacgagagaacagctgtcctgcagctgagcgttcttttccaccacaaggcagaacagtactgcaatagcgtggccagctgggcagccgcatgtcaggcctctcagcctctgccctcggatatccagagcttggaaacggccattcggactcatcaatccctgtatgaggctatgtgccaagcttacaccgaggttcattccactagcaagaagctcctctatcagttggatcatttggtgcaggtctgcaatcaacctccgccgcctggtgtcccggatcaccgaaagaatagcaacaatggtagttttaacaagtacgagagacagaatccagcagcggattacagcgaaggcgccagtcatgtattggctgtgattcaccagatcctgagccaccaccgcaccctggaggccaagtggcatcaggaaaggctacgattgcatcagaccctagctcttagactcttccaagaagatgtgaagcaggtcttggattggctgaaaaatcatggcgaagttttcctaagaaagaatacgggtataggcagaaacttccacaaagcccgcgtttatcagacctcgcacgataactttgagaacgttgcacagaacacctatagtaacgcccaaaaactcctggcagctgcggacgaattggctagaagtggcgaagccgatcccaatgagatatattctgtggccagagaattggagcttcaagtgggcagttttgcggaaagagtggagcaaagaagacgccggctggatatggctgtaatattctacacccatgaaaaggacgtgaccgcctggatagacaaacttcgaacggatgtgagcacggatgaaacgcgtctttcgcaggagaacctcgagggcattgaacgcatattgcagcaataccagagggatcagcaggagagctccgtcaatgtctgccttacaaccatctcccagggtgaagctctgctgcaggaaatgcgatccctggagtatgccgacaatactggttccattgccgctctggaggctaccctggaaaagttaaacaaacaaaaagtggagttggaggagctctggtccgcccgcaagtttcgtgccgatctcatactgcgtttgcgctactttgagcgtgatgccagattgctgtccgtgcaaatggagatgtggtccgaggagctccagcatgctgacctctccagggactaccaaaaagccgaacaacttattcgcatgcacaacgagtcggtgacggaaatacagaacgccacttacgaggtcgtgcagcagggtcaggacctgctgcagctctttgagaatgctggcttcatttccatggcggatgccacgcacacggctcaggctaggatcgagtatctgcttgacttcttgcgggaacgggagatcgatctggaggaaatgtccgaggccaagcgggccaagcttgagcaagcggtgcagttatgtcaattccagaacgatgccaaccaggttatctcgtggatccgcaatggagaagccatgctggtggcaagtttcgtgacgcccaacagtttgcaggaggccgagcagctgcgcaagggtcatgagcagttccagattgccatcgagaagacgcacacatcggcggtgcaggttaagtaccgagcagatgccctcatcaatgctaaccattacgacccgctatccatcgatgaaattagcgacgatgtgacgaagaagtggcagcagctggtgacttatgcggaggagcggcacaagctggtgaccgcctcgataaacttctacaaaacagccgagcaggtgtgctcggttctggacagcttagagcgggagtacaaacgtgaggacgactggtgtgacggtggaggaggcagcgacaaagctcaagccattgtccagttgatctcgaaacatcaggagcagaaggaggctttcctaaaggcctgtactttggcgcgtcgcacagctgagacttttctaaaatacgccaaccgatcgcagcagtgctatcagtataaaggcaactgcgaaggccacgtaaagagcaaactggataagctattgactcaggaaaatcaagttctggattactggacgctgcgcaagaaatctctggatcagtgccagcagttcgttctctttgagagaagcgccaaacaggcgatcgaatggattcacaacaccggagaagcgtatctctcctctagatccaatctggtgggcataagcaaggaggaaacagaagggttgctgaaagagcataatgaattccgaagcactgctaaggagactcgcgaaagggtgaagcttctgatccaactagctgatagtttggtggaaaagggtcatgcccatgcgagcgatatcaagcaatgggtggcgtccgtggatcagcggtacaaggacttcagcaaccgcatggacagctactgcgagcagttggagaagtctttgggcatgtcccagcagcagttacttctgggctccgatggaaacagttcgataagctcctcctctggggatcgtcattcggaccccacgctggaagccaagctaaacagcagcaataaggagaacaaggagataaacgaggagaagcgcaagtcagcgaggaggaaagagttcatcatggctgaactgatgcaaacagagagggcgtatgttaatgatctggccacttgcatcaagtgtttccttgaggaattccgagcgggaaaaagtgtaccttctgccctcattggtcaggaagatgtgatattcggcaacataaaggaaatacaccacttccatcagaagattttcctgcgcgagctggagaaatacgagacaatgcctgaggatgtgggccattgctttgtgacctgggcctccaagttcgatatgtatgtgcactactgcaagaacaagcccacatcgaataatttgctggtccagcacggcggcagtttctttgaagaactacaacggcgcctggaggttgatcatcccctgcccgcctatctcatcaaacctgtgcagaggatcaccaaataccagctgttacttaaggatctcctatcctgctgcgaggagagccacggcgaaatcaaagaaggcctcgaggtgatgctcaatgtccccaaaaaggccaacgatgccatgcatctttcgctgctggaaaactgtgatgtctccgtagacaaactgggtgaagttgtgctgcaggatgccttccaagcctgggataccaagcagatcattcgaaagggcagagagcgtcgagtcttcttgtttgagttgtatctcctgttcgctaaggaggtaaaggagtccaacgtagttaagtaccagtttaaaagcaagctcatgaccaccgacatgggcatcacagagcacatcgaaggcgatgagactaagtttgccgtgtggacaggtcgttctcccatgctctcggattgcaggatcgtgctgaaggcaacgagcttggaaaccaagcagatttgggttaagaagctgcgtgaagtcatgcaggagacctgcttctcgggcacctcgttgaccttgcccaagtctccagctaagcattcgggctcctcgcaacgatcctcgcgggacttggatgaacagctcacggaaaatgatcacgatcgctgttcactggctagctttggatcgggtaataccacagatagtgataataagctgggcaaccaggaggccacctgggtggtagcggactacattgccacctccggcagcaatgagctgagcgtgagcaaggggcagcaggtggagattgtcgagccgcccaccgccggagagccagacttctgcctggtgcgcctgaatccgcagcacgacgatgccgccgtgcaggaaggactcgttcctgtctcagtgctcaaaccgccgccgggctcacacaagcacggttccggaaccgcagcgaatgcagcctcatcagcgggctcccagaaatccgacatgcaggatcagagcaatcgcagcaaggcggatgcactctcatcgtccactaaacgtcgcggtttcagcggacgcaactggctgccgctgatgaatcgcaagggaacggacaagccgccaagtagcaaaccgctggtgaagaagccctcggagaaaaacctgagaacaccccagaagcacgccgaggagctggccgagcagcaaaaccagcagccaggtgccagtcccgccaccgtgctgccatcgtcgcaattccccagctcaactcagcatccaggaggagcaggagccggcgactatgagccggacgaggaggtcggcctcgagctgccgccgcccatgaaacccatccaagagccgcacctgattgccaacggaccgcccgcctttgccaaggacgccaaggagagctcgggcaacatg

SEQ ID NO: 4602 - protein, 1873 aa, DROSOPHILA
MDGQRARDLLTLLQERVVFLTGGRDRRGGPLLCFPATPRRDRLKPEDLRRLLSYLISIPSDAAKNLGFTVIIDMRGNGNCSTNVKTILKVLQEHFSANIHNVVIIKPDNFWQKQRASISSHKYKFETTTVSIESLNKIVESHQLTGDFEGQQLYDHQQWTDARLAIEDFFWQAGDMADRIDDLQEDLNRNDFAEDVPLARHAIDHHNEMRKKITKLPIEDLDMQGKKLLAKINAMAPPGGQAPTNSGGPDMDSGPSSAGQQSQPSQQSRSVGGNPDMSAAVNKALRQIELIHTGQEKLLMLWQHKKVKLDQCFQWRLFEQDCEKMFDWILHNRDVFQMSYVEIGHNYSVAKSLQDEHQKFAVASMNVSVNIDRILAVAARLIESQHYAAQHIKTLAQRLDRTWKDFAAGLDERTAVLQLSVLFHHKAEQYCNSVASWAAACQASQPLPSDIQSLETAIRTHQSLYEAMCQAYTEVHSTSKKLLYQLDHLVQVCNQPPPPGVPDHRKNSNNGSFNKYERQNPAADYSEGASHVLAVIHQILSHHRTLEAKWHQERLRLHQTLALRLFQEDVKQVLDWLKNHGEVFLRKNTGIGRNFHKARVYQTSHDNFENVAQNTYSNAQKLLAAADELARSGEADPNEIYSVARELELQVGSFAERVEQRRRRLDMAVIFYTHEKDVTAWIDKLRTDVSTDETRLSQENLEGIERILQQYQRDQQESSVNVCLTTISQGEALLQEMRSLEYADNTGSIAALEATLEKLNKQKVELEELWSARKFRADLILRLRYFERDARLLSVQMEMWSEELQHADLSRDYQKAEQLIRMHNESVTEIQNATYEVVQQGQDLLQLFENAGFISMADATHTAQARIEYLLDFLREREIDLEEMSEAKRAKLEQAVQLCQFQNDANQVISWIRNGEAMLVASFVTPNSLQEAEQLRKGHEQFQIAIEKTHTSAVQVKYRADALINANHYDPLSIDEISDDVTKKWQQLVTYAEERHKLVTASINFYKTAEQVCSVLDSLEREYKREDDWCDGGGGSDKAQAIVQLISKHQEQKEAFLKACTLARRTAETFLKYANRSQQCYQYKGNCEGHVKSKLDKLLTQENQVLDYWTLRKKSLDQCQQFVLFERSAKQAIEWIHNTGEAYLSSRSNLVGISKEETEGLLKEHNEFRSTAKETRERVKLLIQLADSLVEKGHAHASDIKQWVASVDQRYKDFSNRMDSYCEQLEKSLGMSQQQLLLGSDGNSSISSSSGDRHSDPTLEAKLNSSNKENKEINEEKRKSARRKEFIMAELMQTERAYVNDLATCIKCFLEEFRAGKSVPSALIGQEDVIFGNIKEIHHFHQKIFLRELEKYETMPEDVGHCFVTWASKFDMYVHYCKNKPTSNNLLVQHGGSFFEELQRRLEVDHPLPAYLIKPVQRITKYQLLLKDLLSCCEESHGEIKEGLEVMLNVPKKANDAMHLSLLENCDVSVDKLGEVVLQDAFQAWDTKQIIRKGRERRVFLFELYLLFAKEVKESNVVKYQFKSKLMTTDMGITEHIEGDETKFAVWTGRSPMLSDCRIVLKATSLETKQIWVKKLREVMQETCFSGTSLTLPKSPAKHSGSSQRSSRDLDEQLTENDHDRCSLASFGSGNTTDSDNKLGNQEATWVVADYIATSGSNELSVSKGQQVEIVEPPTAGEPDFCLVRLNPQHDDAAVQEGLVPVSVLKPPPGSHKHGSGTAANAASSAGSQKSDMQDQSNRSKADALSSSTKRRGFSGRNWLPLMNRKGTDKPPSSKPLVKKPSEKNLRTPQKHAEELAEQQNQQPGASPATVLPSSQFPSSTQHPGGAGAGDYEPDEEVGLELPPPMKPIQEPHLIANGPPAFAKDAKESSGNM

SEQ ID NO: 4603 - DNA, 4481 bp, DROSOPHILA
acttcttattctgtgaaaaactaattggcttactaaaataagaaaaattctaagctcgatataaatatgtagtccattttaataatgtttgttatttgatactaaagaaaaggcatttctgggcgtcatttataggtttttttaaacgaggtgggatcatacgtcagataattatgaaattgacgtttcagatagatcaacaataatttctcgcatatcttcttcatcgagagtcagtgagtgctgtttcaataatgttttcaaatctactttattcttaacattgtatggattgtgtgcgcgccataagtatctagctaagcagggcactccttcgcagctttgtgatcgaatccagcgcttctcctagctgccgctgcagattagtgctctcggcgaccagctctatgcagtccttgaacttgttaacagcattgcgcaagctcatcggtggcagtaccctggaaaaaggagtaagtgagttatcacattgacccacatacacacaggctttatcagtgctcacgagaaccaatgcaggggctccacgaagcccttggacttgtcaaccgcctgtcgctcgatgcagacgccatccgtggagtccacgacccggcagagggcgttaaactcggcactgttctccgtgggaatctgggccgtggacacgcactggctgcctccgtgctgaaatctagtgcgggccaggagaatcgccccactggcgttacatcgctccaaatttatccgacactgggtgtgctcctcaacgaggtggaacatgtccaggtacaagtcatccagtagctggcccgcggcctccttttcgcttctttgaatgctcattgcgggctgaggaataactttatttatatattattattatttcggtctgacggagatttttcaatcatatgatcgcaccaacaaccctgacttatcgctgctatgcgccgagttggcactaccgtcgataacaaatgttatcgccagccctattctgatttgcaaactaacaaccgactgatttgaatcaaaacgaaaagaaacggctgaaaaaagtttggttttgtcgcgtgcatacgagttttacgcaatgaattgtaattactgccgcaacaaacacggtcatgcccaattaacaagtaaacggtcaagctgcacactctcggggaatccgactaacgaaaagggcaaacagctgttgttgttttcttgcgcattagtttttggagaggggtgaggtgaaaggggctggcttcgcagtttgttttacgatgctgttgcgagattagagaaagtttataaaaagccctgccattagcattcagcagcattagcaatcgggaagcagtcaagttgaaaccacgtcgggattaacgccaccagactaacaacgagtggatgccccaagtgcaaacagttccaaagtcaactcaaatatacccaaatcccaggagattgcatcggatcgggtgataatgcccgatagttgtacggcggacctacgaagtcgccgccgcgaaaatccaatcgaccgcaacggcaatattggcggcacaggcaaggagcaggtgctcgtcagctagccaatagtgtttttgacgcctggcttgttaaatccatcgcgtgtgcatatggcatcggcatcctatacgatatagccgctcactataccatatatatatgtgcaccacacacatccatacctatctggccatacgtaaccgcgtttgatgacaaacattgacgaaaagcgtggccaagtgtgcactgaaagaaaagcgaatgctatgattccttctacgaaccctataaaaatatttatcaacattctagttttagtgtgagcaaatgctggcacaatcgctaggatgattggaaacatttttatctcaatttatacgtctcgtatggggccttatttttttcactatttgtatctaatcgcgaaaatcgtaggcttgcccatgccaccgcttcagtaagggggggttgcctgcctattccggtatactctctaaaagcattagctttttcatcaatagacttcccaatctgcgactgataagcacatatgcacatgaagtaaaaaagttagataggccttcttttcaatctatcccacacctgaagtagtttacccgtccgcatacataagtgcaatcattaatgactcgtcgtttggttatctcttcaattatttaggcgacaagcaccaggcctaagctgacaaccgaatatacccaacggactaacgaaatgactgcgagcaaggaaggtcaagaatccaggcgaaccctcagcgacagttccgcagaggacgtcaggaatacaggatcgaggaccaggaccaacgacgacgaaatgtggcgcaatgaacttgctatgaacacggacagcagctccgttcagccagaaaagcgagaggaacgaagccacagaacaggaaactctaatgcgaagctcagcgatgccgtagatgttgttcttcgcgttctcctcgtcattaccttcttgtgagtgttttgtgcttcattccaaatgccgacaaagtccataactcatatatgactcatctctacagcaagttggagacgatgacagcattcaaacgggaaatccacgaggaagagctgtggctatacaagaacccaaggcgaccggacattgtcaggggcggggagctgctcttctgggtgatagtggctccctttctggtcactatcgccttctactggtacacaagagacaggcgggactttagagccgccagctgggcctggacactggccctgtgcatgaacggcatcccaacgagcgtactaaagataacagtggggcggcccaggcccgactatttttaccgctgctttcccgatggcgtgatggtgcttaacacaacgtcaaatggcgtggacacctccatcctggatttcaattgcacagggcttccgggcgacataaacgaaggccgcaagagcttccccagcggacactcgtcgtgtaagttgaatgttggaatttagttctcgatgctaaccgtatttatatgcctactctagtcgcctttgcgagtttcggtttcattgcctattacattggcgccaagctgcacgcctttgatagccggggacgcggccacacctggcggctctgcatcgctgtgatacctctgtttatcgcactgctggttgcagttagtcgcacctgcgactaccaccaccactggcaggatgtgaccatcggcgggctgattggcctgtttgcaggctatataagctacacacaatactatccctccatcttctgccctgatgccggcataccactggtcaggtggcccagcagagagggaagccagtaccagcgactgtctggaaaggacgacaatggcagtcgtggtccccaccatctcgatggtggggatgcggtgcggagacctctgctcgctgacaaggaggagtccaaatggtactaaaagctttacgtaatattattgtgagtgttgctttcccgtttaaggtttttaaacatattagacaatttctgatttaaaaatgtgctgctggtttacctcgtaataggatgggtagggtttgttaataaaaactaagcgcgtcaattgctaaacgtaaatttattgctcatctttagcagcaacatccaaatctaatttgctacatcaaagtgaccgaaactagcctaaaggacacgatatgcacactcagattcaagtcatggaattgaaggcctgcagaagcacctgtttttcgcgctcctttttcttaactacgtcaagactgcgttgtcgccacgtgctcttgcgcagtttgataggccggctgcccacatagcggccgtccatctccttcatggcccgtataaagtcggccggttctctgaagctcacgaagccaaatcccttgctcttgcccgtgcgcttgtcccgcaccacacgggcccgctgaaacgaggggaacttgttgaaggtccgggtcaggacctcgtcgttgacgtcgtttcccaagtcaccacaaaagatgcggaagtcatcgtcgggccagtcagccagcgaagtatcctcccacacggtgccgccagcgatacgcaccgtcttgcggtctttctttttccgctctgttgtctggaaggattgcagcgccgatgatgcgcgcgctgccttaatggcctcctctgcaatgggattgggtccagacttttccgccttgagcttcttcagcttctgcgttacgtcaaaagagacggcgttgatgtcgatggagggcgcggcggccacggtgggcacgtgcacagactgccggcactgataaagtttgggggcgctgctcaggactacgggagtggcagacatagccttggaagaaccacctccactgcccgtaggcacgaaggtggacataaacgtgggtggaggcggcatcgggggcgggggtacggtcagacgcgatcctccattg

SEQ ID NO: 4604 - DNA, 1249 bp, DROSOPHILA
ctgatttgcaaactaacaaccgactgatttgaatcaaaacgaaaagaaacggctgaaaaaagtttggttttgtcgcgtgcatacgagttttacgcaatgaattgcgacaagcaccaggcctaagctgacaaccgaatatacccaacggactaacgaaatgactgcgagcaaggaaggtcaagaatccaggcgaaccctcagcgacagttccgcagaggacgtcaggaatacaggatcgaggaccaggaccaacgacgacgaaatgtggcgcaatgaacttgctatgaacacggacagcagctccgttcagccagaaaagcgagaggaacgaagccacagaacaggaaactctaatgcgaagctcagcgatgccgtagatgttgttcttcgcgttctcctcgtcattaccttcttcaagttggagacgatgacagcattcaaacgggaaatccacgaggaagagctgtggctatacaagaacccaaggcgaccggacattgtcaggggcggggagctgctcttctgggtgatagtggctccctttctggtcactatcgccttctactggtacacaagagacaggcgggactttagagccgccagctgggcctggacactggccctgtgcatgaacggcatcccaacgagcgtactaaagataacagtggggcggcccaggcccgactatttttaccgctgctttcccgatggcgtgatggtgcttaacacaacgtcaaatggcgtggacacctccatcctggatttcaattgcacagggcttccgggcgacataaacgaaggccgcaagagcttccccagcggacactcgtcgttcgcctttgcgagtttcggtttcattgcctattacattggcgccaagctgcacgcctttgatagccggggacgcggccacacctggcggctctgcatcgctgtgatacctctgtttatcgcactgctggttgcagttagtcgcacctgcgactaccaccaccactggcaggatgtgaccatcggcgggctgattggcctgtttgcaggctatataagctacacacaatactatccctccatcttctgccctgatgccggcataccactggtcaggtggcccagcagagagggaagccagtaccagcgactgtctggaaaggacgacaatggcagtcgtggtccccaccatctcgatggtggggatgcggtgcggagacctctgctcgctgacaaggaggagtccaaatggtactaa

SEQ ID NO: 4605 - protein, 363 aa, DROSOPHILA
MTASKEGQESRRTLSDSSAEDVRNTGSRTRTNDDEMWRNELAMNTDSSSVQPEKREERSHRTGNSNAKLSDAVDVVLRVLLVITFFKLETMTAFKREIHEEELWLYKNPRRPDIVRGGELLFWVIVAPFLVTIAFYWYTRDRRDFRAASWAWTLALCMNGIPTSVLKITVGRPRPDYFYRCFPDGVMVLNTTSNGVDTSILDFNCTGLPGDINEGRKSFPSGHSSFAFASFGFIAYYIGAKLHAFDSRGRGHTWRLCIAVIPLFIALLVAVSRTCDYHHHWQDVTIGGLIGLFAGYISYTQYYPSIFCPDAGIPLVRWPSREGSQYQRLSGKDDNGSRGPHHLDGGDAVRRPLLADKEESKWY

SEQ ID NO: 4606 - DNA, 4236 bp, DROSOPHILA
gtttcaataatgttttcaaatctactttattcttaacattgtatggattgtgtgcgcgccataagtatctagctaagcagggcactccttcgcagctttgtgatcgaatccagcgcttctcctagctgccgctgcagattagtgctctcggcgaccagctctatgcagtccttgaacttgttaacagcattgcgcaagctcatcggtggcagtaccctggaaaaaggagtaagtgagttatcacattgacccacatacacacaggctttatcagtgctcacgagaaccaatgcaggggctccacgaagcccttggacttgtcaaccgcctgtcgctcgatgcagacgccatccgtggagtccacgacccggcagagggcgttaaactcggcactgttctccgtgggaatctgggccgtggacacgcactggctgcctccgtgctgaaatctagtgcgggccaggagaatcgccccactggcgttacatcgctccaaatttatccgacactgggtgtgctcctcaacgaggtggaacatgtccaggtacaagtcatccagtagctggcccgcggcctccttttcgcttctttgaatgctcattgcgggctgaggaataactttatttatatattattattatttcggtctgacggagatttttcaatcatatgatcgcaccaacaaccctgacttatcgctgctatgcgccgagttggcactaccgtcgataacaaatgttatcgccagccctattctgatttgcaaactaacaaccgactgatttgaatcaaaacgaaaagaaacggctgaaaaaagtttggttttgtcgcgtgcatacgagttttacgcaatgaattgtaattactgccgcaacaaacacggtcatgcccaattaacaagtaaacggtcaagctgcacactctcggggaatccgactaacgaaaagggcaaacagctgttgttgttttcttgcgcattagtttttggagaggggtgaggtgaaaggggctggcttcgcagtttgttttacgatgctgttgcgagattagagaaagtttataaaaagccctgccattagcattcagcagcattagcaatcgggaagcagtcaagttgaaaccacgtcgggattaacgccaccagactaacaacgagtggatgccccaagtgcaaacagttccaaagtcaactcaaatatacccaaatcccaggagattgcatcggatcgggtgataatgcccgatagttgtacggcggacctacgaagtcgccgccgcgaaaatccaatcgaccgcaacggcaatattggcggcacaggcaaggagcaggtgctcgtcagctagccaatagtgtttttgacgcctggcttgttaaatccatcgcgtgtgcatatggcatcggcatcctatacgatatagccgctcactataccatatatatatgtgcaccacacacatccatacctatctggccatacgtaaccgcgtttgatgacaaacattgacgaaaagcgtggccaagtgtgcactgaaagaaaagcgaatgctatgattccttctacgaaccctataaaaatatttatcaacattctagttttagtgtgagcaaatgctggcacaatcgctaggatgattggaaacatttttatctcaatttatacgtctcgtatggggccttatttttttcactatttgtatctaatcgcgaaaatcgtaggcttgcccatgccaccgcttcagtaagggggggttgcctgcctattccggtatactctctaaaagcattagctttttcatcaatagacttcccaatctgcgactgataagcacatatgcacatgaagtaaaaaagttagataggccttcttttcaatctatcccacacctgaagtagtttacccgtccgcatacataagtgcaatcattaatgactcgtcgtttggttatctcttcaattatttaggcgacaagcaccaggcctaagctgacaaccgaatatacccaacggactaacgaaatgactgcgagcaaggaaggtcaagaatccaggcgaaccctcagcgacagttccgcagaggacgtcaggaatacaggatcgaggaccaggaccaacgacgacgaaatgtggcgcaatgaacttgctatgaacacggacagcagctccgttcagccagaaaagcgagaggaacgaagccacagaacaggaaactctaatgcgaagctcagcgatgccgtagatgttgttcttcgcgttctcctcgtcattaccttcttgtgagtgttttgtgcttcattccaaatgccgacaaagtccataactcatatatgactcatctctacagcaagttggagacgatgacagcattcaaacgggaaatccacgaggaagagctgtggctatacaagaacccaaggcgaccggacattgtcaggggcggggagctgctcttctgggtgatagtggctccctttctggtcactatcgccttctactggtacacaagagacaggcgggactttagagccgccagctgggcctggacactggccctgtgcatgaacggcatcccaacgagcgtactaaagataacagtggggcggcccaggcccgactatttttaccgctgctttcccgatggcgtgatggtgcttaacacaacgtcaaatggcgtggacacctccatcctggatttcaattgcacagggcttccgggcgacataaacgaaggccgcaagagcttccccagcggacactcgtcgtgtaagttgaatgttggaatttagttctcgatgctaaccgtatttatatgcctactctagtcgcctttgcgagtttcggtttcattgcctattacattggcgccaagctgcacgcctttgatagccggggacgcggccacacctggcggctctgcatcgctgtgatacctctgtttatcgcactgctggttgcagttagtcgcacctgcgactaccaccaccactggcaggatgtgaccatcggcgggctgattggcctgtttgcaggctatataagctacacacaatactatccctccatcttctgccctgatgccggcataccactggtcaggtggcccagcagagagggaagccagtaccagcgactgtctggaaaggacgacaatggcagtcgtggtccccaccatctcgatggtggggatgcggtgcggagacctctgctcgctgacaaggaggagtccaaatggtactaaaagctttacgtaatattattgtgagtgttgctttcccgtttaaggtttttaaacatattagacaatttctgatttaaaaatgtgctgctggtttacctcgtaataggatgggtagggtttgttaataaaaactaagcgcgtcaattgctaaacgtaaatttattgctcatctttagcagcaacatccaaatctaatttgctacatcaaagtgaccgaaactagcctaaaggacacgatatgcacactcagattcaagtcatggaattgaaggcctgcagaagcacctgtttttcgcgctcctttttcttaactacgtcaagactgcgttgtcgccacgtgctcttgcgcagtttgataggccggctgcccacatagcggccgtccatctccttcatggcccgtataaagtcggccggttctctgaagctcacgaagccaaatcccttgctcttgcccgtgcgcttgtcccgcaccacacgggcccgctgaaacgaggggaacttgttgaaggtccgggtcaggacctcgtcgttgacgtcgtttcccaagtcaccacaaaagatgcggaagtcatcgtcgggccagtcagccagcgaagtatcctcccacacggtgccgccagcgatacgcaccgtcttgcggtctttctttttccgctctgttgtctggaaggattgcagcgccgatgatgcgcgcgctgccttaatggcctcctctgcaatgggattgggtccagacttttccgccttgagcttcttcagcttctgcgttacgtcaaaagagacggcgttgatgtcgatggagggcgcggcggccacggtgggcacgtgcacagactgccggcactgataaagtttgggggcgctgctcaggactacgggagtggcagacatagccttggaagaaccacctccactgcccgtaggcacgaaggtggacataaacgtgggtggaggcggcatcgggggcgggggtacggtcagacgcgatcctccattg

SEQ ID NO: 4607 - DNA, 1475 bp, DROSOPHILA
tgaaaggggctggcttcgcagtttgttttacgatgctgttgcgagattagagaaagtttataaaaagccctgccattagcattcagcagcattagcaatcgggaagcagtcaagttgaaaccacgtcgggattaacgccaccagactaacaacgagtggatgccccaagtgcaaacagttccaaagtcaactcaaatatacccaaatcccaggagattgcatcggatcgggtgataatgcccgatagttgtacggcggacctacgaagtcgccgccgcgaaaatccaatcgaccgcaacggcaatattggcggcacaggcaaggagcaggcgacaagcaccaggcctaagctgacaaccgaatatacccaacggactaacgaaatgactgcgagcaaggaaggtcaagaatccaggcgaaccctcagcgacagttccgcagaggacgtcaggaatacaggatcgaggaccaggaccaacgacgacgaaatgtggcgcaatgaacttgctatgaacacggacagcagctccgttcagccagaaaagcgagaggaacgaagccacagaacaggaaactctaatgcgaagctcagcgatgccgtagatgttgttcttcgcgttctcctcgtcattaccttcttcaagttggagacgatgacagcattcaaacgggaaatccacgaggaagagctgtggctatacaagaacccaaggcgaccggacattgtcaggggcggggagctgctcttctgggtgatagtggctccctttctggtcactatcgccttctactggtacacaagagacaggcgggactttagagccgccagctgggcctggacactggccctgtgcatgaacggcatcccaacgagcgtactaaagataacagtggggcggcccaggcccgactatttttaccgctgctttcccgatggcgtgatggtgcttaacacaacgtcaaatggcgtggacacctccatcctggatttcaattgcacagggcttccgggcgacataaacgaaggccgcaagagcttccccagcggacactcgtcgttcgcctttgcgagtttcggtttcattgcctattacattggcgccaagctgcacgcctttgatagccggggacgcggccacacctggcggctctgcatcgctgtgatacctctgtttatcgcactgctggttgcagttagtcgcacctgcgactaccaccaccactggcaggatgtgaccatcggcgggctgattggcctgtttgcaggctatataagctacacacaatactatccctccatcttctgccctgatgccggcataccactggtcaggtggcccagcagagagggaagccagtaccagcgactgtctggaaaggacgacaatggcagtcgtggtccccaccatctcgatggtggggatgcggtgcggagacctctgctcgctgacaaggaggagtccaaatggtactaa

SEQ ID NO: 4608 - protein, 412 aa, DROSOPHILA
MPDSCTADLRSRRRENPIDRNGNIGGTGKEQATSTRPKLTTEYTQRTNEMTASKEGQESRRTLSDSSAEDVRNTGSRTRTNDDEMWRNELAMNTDSSSVQPEKREERSHRTGNSNAKLSDAVDVVLRVLLVITFFKLETMTAFKREIHEEELWLYKNPRRPDIVRGGELLFWVIVAPFLVTIAFYWYTRDRRDFRAASWAWTLALCMNGIPTSVLKITVGRPRPDYFYRCFPDGVMVLNTTSNGVDTSILDFNCTGLPGDINEGRKSFPSGHSSFAFASFGFIAYYIGAKLHAFDSRGRGHTWRLCIAVIPLFIALLVAVSRTCDYHHHWQDVTIGGLIGLFAGYISYTQYYPSIFCPDAGIPLVRWPSREGSQYQRLSGKDDNGSRGPHHLDGGDAVRRPLLADKEESKWY

SEQ ID NO: 4609 - DNA, 3322 bp, DROSOPHILA
acgcagttcacgcgcacacccttggcagccagctccaacgccacacagcgggtgaactgatccactcccattttggatatgttgtaggccagaacgccagggaaggagcgaatcccattgacactggacacgttcacgatgttgcccttggtcttgaccagctcgggggtggccagcatagtaaggtggtagattgccctcaggttggtgttcatgacgcggtcgtactgctccaggctagtcgtctcgatggtgcccgtctcgatgattccggcattgttgaccagcacatccaatttgccgtactgctgcagggtttccgaccaaatcctctgggtgtccgcctccttggcaatgtcgcccaccaccagggccggctgtgattggctcaccttgctgcactcagcggctaccttcttcaggttctccacattgcgtccattgagagccagacaggcgccgtacttggcaaacttaatggcggttgcagctccgattccggagcttgctcccgtaataaggaccactttgcccgcgaaattcatgatccgatccagaattatgtaaggggatctcaagctcagtgcgcatcttgctggattcaataggggtattcacctggtagaaatccgaaaatcttacaggagaaagggtgtgcttggttttacgtttaaaaaatctggtaaaatgatcaattaaatttaatttgtgttaagggagcaacaattataaaaatctattgttttatttaattcagcttttcaacggtaagctctattaaaaaatgtattattaatgttgaactccatatgttcctctagaatacttcgaatactaaaaatgtattagtcaacaaattattatataaattatttatatattgtattaaatattttattaagtattttggtatattataaaatgttaagtcttagtatattttcgaagtgtgcttggtattttttaacggctatccggtctcacttacgtgatcatgtaaacgaaatgcgagttttaggaaagtgcactgttttggtcaggcaaacccgcagcttatccacgccatctgggcgccgcagagtggtggtcacgggaagtggcgcagtcactccgctgggcaacaatggaccggattcttggcgacgcatcctggccggcgagtcggcaatttctcggctgagtgcggagtttaagggcttgccctgccaggttgcggctcaaatcccgagggaaaacctacagctggatcaacacctgaccaagtcggacattaagctgatgagccccgccacgcagcttgccgtattggcggctgaggaggccttgtcaaccggaaagctgtgccccaagcaattgagcgaggaggagcttgagcggttcggagtgtgcgtgggcatgggcatgttcgaccttgcagaggtctatggcgcctggaaccagctgcaacgaggttacaacagagtaagcccctttttcgtgcccaggctgctgcccagtatggcgtgtggtcacataagcatgcgacatggcttaagaggacctaaccactcggtgtccacggcctgcgccacaggtgcccatgccctgggcgatgccatgcgcttcattcgcagcggagatgccgacttgatgctggcggggagtggtgaggcctgcatagatccgctctccatcgctggattttgcagactgcgggctctgagcaccgcattcaacgataatccggcggttgcgtccagaccgtttgacaagtcccgggatggcttcgtgatgggcgagggcgcagctgtgctcttgctggaagaactggagcacgcccgcgctcggggagctcccattctagctgagattctgggctacggcttgtccggcgatgcctatcacataacgtcgcccagcgatgacggcgccggagccactcttgccatgaagcgggccatacaagatgctgggattgcaccagaggatgttacgtatgtaaatgcccacgcaacctccacgcccaccggggatcgcattgagtcacacgctataggtcgtgttttcggggcgcacactccgcaggtgagggtctcctccaccaagggagcacatggccacctgctgggctcctctggcaacctggaagcgctctttgtggtgctcgcctgcgcgaataacaagctgccgccctccatcaacattgagcacctcgatgtggacgtcaatgtggtcacgaaagctactgattggtcggcggaccaaaagcggcgtgttgccctcaagaattccttcggctttggaggaaccaatgcctccctctgcattgctagctacatttaatagtagcgataagttgttaactattttttagagatccacgtaaataaaatccttgaatgtttgcatatttttaggaaaaatgtttagttttaaaattttatttggaaaactttttcggttgcttgtctggccgtcacgtcgtcgtcttcgtcagtttcttgctctgtaaaaaggattatgcgtactgttcttgaccaatgcgccatgtatgtactgttatactgtatatctgtatataatatatatatataggtatataattatgtatatagctctgtttgatttgcttctgttgcttgtctctctgttagtttgtttgttattgcggtttttttgctgcttgaagtcgccgccctccggttgaacagaatggagtttgtgttttcttgtggaaaatgaaggttcaaatcaatggctggtgactggtttggtttggtttggctttcgcgcgggttctgctgtgatcgtggccaaaatttgacaatagtttcagcttgcgaaccgttcgttctcgtatttgacttaactaatcgtttaatttgaagtgtttttattttacaaaattgcttaggtcgttaagttaaagtatgttggcttacaatcgaaacgtttcataatcatttaatattattggttttctctttatgctctgcgtgcttctgctgcattcagcttgccctgctgctgctcttctatctctagagtctagacgacattctttgttatctccgtgtaatcatacacaacggatgtacatacttattatatgcggcttagactcgtactaattatatgcgtaaataataatatgctatatgtgggtttgggcttgtgcttgggtgggggttgtggtggtggtgagggatgtgtgcaggcgtgtgtgggatagctctttgaatgaccgaactttcgtcgtttgttacatacattatgaaaatacgctttattcgaaatttaacttttaaattttagttatttactgtacagtttgtttgtagtt

SEQ ID NO: 4610 - DNA, 1322 bp, DROSOPHILA
acgaaatgcgagttttaggaaagtgcactgttttggtcaggcaaacccgcagcttatccacgccatctgggcgccgcagagtggtggtcacgggaagtggcgcagtcactccgctgggcaacaatggaccggattcttggcgacgcatcctggccggcgagtcggcaatttctcggctgagtgcggagtttaagggcttgccctgccaggttgcggctcaaatcccgagggaaaacctacagctggatcaacacctgaccaagtcggacattaagctgatgagccccgccacgcagcttgccgtattggcggctgaggaggccttgtcaaccggaaagctgtgccccaagcaattgagcgaggaggagcttgagcggttcggagtgtgcgtgggcatgggcatgttcgaccttgcagaggtctatggcgcctggaaccagctgcaacgaggttacaacagagtaagcccctttttcgtgcccaggctgctgcccagtatggcgtgtggtcacataagcatgcgacatggcttaagaggacctaaccactcggtgtccacggcctgcgccacaggtgcccatgccctgggcgatgccatgcgcttcattcgcagcggagatgccgacttgatgctggcggggagtggtgaggcctgcatagatccgctctccatcgctggattttgcagactgcgggctctgagcaccgcattcaacgataatccggcggttgcgtccagaccgtttgacaagtcccgggatggcttcgtgatgggcgagggcgcagctgtgctcttgctggaagaactggagcacgcccgcgctcggggagctcccattctagctgagattctgggctacggcttgtccggcgatgcctatcacataacgtcgcccagcgatgacggcgccggagccactcttgccatgaagcgggccatacaagatgctgggattgcaccagaggatgttacgtatgtaaatgcccacgcaacctccacgcccaccggggatcgcattgagtcacacgctataggtcgtgttttcggggcgcacactccgcaggtgagggtctcctccaccaagggagcacatggccacctgctgggctcctctggcaacctggaagcgctctttgtggtgctcgcctgcgcgaataacaagctgccgccctccatcaacattgagcacctcgatgtggacgtcaatgtggtcacgaaagctactgattggtcggcggaccaaaagcggcgtgttgccctcaagaattccttcggctttggaggaaccaatgcctccctctgcattgctagctacatttaa

SEQ ID NO: 4611 - protein, 438 aa, DROSOPHILA
MRVLGKCTVLVRQTRSLSTPSGRRRVVVTGSGAVTPLGNNGPDSWRRILAGESAISRLSAEFKGLPCQVAAQIPRENLQLDQHLTKSDIKLMSPATQLAVLAAEEALSTGKLCPKQLSEEELERFGVCVGMGMFDLAEVYGAWNQLQRGYNRVSPFFVPRLLPSMACGHISMRHGLRGPNHSVSTACATGAHALGDAMRFIRSGDADLMLAGSGEACIDPLSIAGFCRLRALSTAFNDNPAVASRPFDKSRDGFVMGEGAAVLLLEELEHARARGAPILAEILGYGLSGDAYHITSPSDDGAGATLAMKRAIQDAGIAPEDVTYVNAHATSTPTGDRIESHAIGRVFGAHTPQVRVSSTKGAHGHLLGSSGNLEALFVVLACANNKLPPSINIEHLDVDVNVVTKATDWSADQKRRVALKNSFGFGGTNASLCIASYI

SEQ ID NO: 4612 - DNA, 7057 bp, DROSOPHILA
ttctggatcgggaaaccagttccccactctattagaccgctgaatggggattaaagaaagagtggatcaagccgacaaaagcaacgcccccagggaacagaaagtcaatgacttcatagtagggagaaaccgtgttattgcagggatattgagcaaagtataattataatgactacacactcattaatatttacagtttaattcattttatatcccccagctagtttatctaatcatgaaagtatctgtagaggcttgccccgccacccagtcaactttggcaactctcttatcatacaacatatactcgtgtcaattggatcccaaacagttccatgagatctgcactcacctgccctccaacttgtggattccttaaatagacgtagcataatcttaggcgatggttggtttgtcaaaagtgctaaagtgattgcagaatgactgcaaatggctgtgcccattgggtgatgtattcgtatatggttttcgacatgatcgatatccacttccatctgccctacgtgcaattaaacaattatgtgacaaacatcgaatcacggcgagctcggctccaacgactgggacgtgtctgccggtctcttcgagaattcctgggaagtcttcccggcaaacatttcgcaattagtcaggcattcgttccagttccacacagcaaatccccttccaagtggcgcagagtggatggaaacacacaatagtggcggtggaggcaattgcaatctagtgtgtgtacttacaatgttttcattcggcaatgacttattatttagcacactgatagctgataacacagtgctaatgtgagctggagcacttttctgagtcggggttgtgagtttcgagctctgactcactcagaaatgtcccgaaagcgcggcagtcatctagaaatcttgaaagcattaagttataatttacattttggagaagcaagtttatgaaattagctaattgtggagcaagaactaagtaaaggaattccttatgtacattgaaatcaaatccttgatcttcgcaataatggatactaaggactacatagagtaagcagtgctaagataaagaaagtgaatagattataaatcatatagaataattcttgattagttatctaaaaaccaagaaactggttcgcgtagctaggaggaaccacattatgaatcaactgaaaacattgggttgctcggaatgatgggagatgggaacgcatatatctttaggattgacgcatgcgaaaaagacgtatcgtgatctcaggtacttggaactccggaatacagccgatccggaattctttggtgcgctgcgtttctgtcatggtctcctaaatcgggtcccgagtttattcgcgaaaggcactatctaatcggggactgattggcggcattgccctcctcatcgcagtcataggtatattatcgttgataaatgtgccgactaaaaaaaaagaacaacacaaattccgacgaggccaattgatatgtggagaggagaagtattgatggttaaaacgcctcaactgccagcggatcggtttagtttgccaacggagccgtcaaagggcggaatatgcgcggaatctgacacatcctccagagaatcatcaattggagctatcagtggtgtttgtgcagtagtgttgtggaacaagaagaatcgaacaaacatggccaggtagaagaagcgtgatttgaagagaatccatctagagatgtgcaattgtttactcagtgacctagtgaagtgtccttggataatcccacagttatatgaccagcatttcttaggaatcttagaaatcctaccagtcacaaatccattgcataatcgtttcttttatggttttacccgccgcgtatcagcagaactggagcagtcgtccaataaagcaaactcttaccacttgcccacttcccttggccccatgaaatatggcattgataaggtgaattgcacctgcccaccattacttctatggatctataaataccccagattgggtatttgcattgggactcatatagaatattatattggatatgtctgatgagatcatttggaattgatcaacaatatccacattcacgagtcactatcatttgcctgattcatttccgcaggactgttataaaatattgtcgaatagcgaaaatcttatctttggggtttcggctttctatggggcttttctgaattggttttcaagaggtttttcctaatcaaggtggttaaacatggcaaccctttcagctgggcagtccgattaggttcgtcaaagataagacctatgaagaggattttcttaggaagttgaaaaattaacaatgaagcaagcaccaatcgtttctgtgggatctgtatttaaggaatcattttgatgcttatgtgaacccctttctttgctttagttttaattcccaactgaaaatggagacgggcctgcacgagcgtgatcgtgctggagtccaggactttgtgctcctcgagaactaccagagcgaagaagccttcatcgggaatctgaagaagcggttccaggaggacctgatctatgtgagtaaaaatagttaaagaagataggtcaaaataatgataacgatatcccctttcgcagacctacattggccaggtgttgatctccgtgaatccctacaagcagctgcccatctacaccgatgaccatgtcaaggcgtacagaaacaagcacttctacgagatgcccccacacatgtgagtctcaagaccaagttgcattgaaccaccaaataatgagcattcctgtccagctttgcggtgactgacaacgccttccgttcgctgatcgaggagaaccgcggccagtgcgtgctcatctccggagagagtggttccggcaagacagaggcctccaagaaggtgctgcagttcatagccgcctgctccggcaaccagacgaccgtcgagggcgtcaaggacaagctgctaaagagcaatcccgtgctggaggccttcggcaatgccaagacaaaccgcaatgacaactcctcgcggttcggcaagtacatggacatccagttcgatttcaaaggagctccgatcggaggcaacatcctaaactatctgctggaaaagtcgcgagtggtggctcaaatgggaggcgagcgcaacttccacatcttctaccaactcttggccggcgccgacgaggcccttctgcaggaactgcgcctggagcgggctctggacacttatagctacctgacagatggggtaagtgggcagcctggagggtattgacaattggtctctgatcttcgagttctaatccacagctcaatggcaccgtgacgagaattaacgatgcggacagcttcaagcaggtccagcaggctctcactgtgatcgatttcaccaaggaggagcagcgcgagatcttcggaatcgtggccagcattctgcatctaggaaacgttggcttcactgaggtggagggcaatgccaaggtgaacagcagggatctggtagtcaccgctgctcgtttgctgggtgtaaacgcaagcgaactggaagccgccctaacgcaccgcacaattgacgctcggggagatgtggtgacctcaccactgaaccaggagctcgccatctatgccagggacgccttggccaaggctgtctatgatcgtctgttctcctggctggttcagcgcctcaacatctcgctgcaggcgaaggaaacgcgggcatccagaaataatgtgatgggcattctggacatctatggcttcgagatcttccagaagaacagctttgagcagttctgcatcaatttctgcaacgagaagctgcagcagctgttcatcgagcttacccttaagtcggagcaggatgaataccgccgggagggcatcgagtggatacctgtggagtacttcgacaacaaggtgatttgcaatctgatcgaggagaagcacaagggcatcatctccatactggacgaggagtgcttgcgaccaggagagcccacggataagaccttccttgagaagctcacccagaaattggcccagcaccaccactacgtttgccacgaaaaggcgcccgcccacatcaagaaaatcatgctgcgcgatgagttccgcttggtgcactatgccggcgaggtcacctacagtgtcaatggattcctggacaagaacaacgacctgttgttcagggatctaaaggagaccctcagcaaggctggcaacggcattgtgaggaactgcttcccggagaaggagctgcgcagcctgaagcgtccggagacggctatcacccagttccgggcatctcttaacaacctcatggacattctgatgtgcaaggagccgagctacattcgctgcatcaagccaaacgacctgcagactgccaacgtcttcaacgatgagttggtactgcaccaggtcaagtaccttggcctgatggagaatctgcgtgtgaggcgagctggtttcgcctaccgacgaacgtatgagctcttcctggagcgctacaagtccctgagcaagtccacctggcccaattacaagggtcccggtggcccgaaagcgggtgtccagcagctggtgaaagatttgggctgggacgaggaaaagtacagggtgggcgagacgaaactattcatccgctggccgagaaccttgttcgatacggaggatgcctaccaggagaagaaacatgagatagcggccatcatccaggcccactggaagggattgatgcaaaggaggaagtatctgaaactgcgtgctcaggtgatcataatgcagagctattgtcgccgaaagttggcacagcaggcggccaagaagcgcagggaggccgccgataagattcgtgcctttatcaagggcttcatcacccggaacgatgccccgaatggcttcaatgaagagtttattgccaacgccaagcgtatgtggctgcttcgactggcgaaggagctgcccaccaaggtactggataagagctggccccatgcccctgggcactgcgaggaggcctccggcatccttcaccgcctgcaccgtctccacttggccaggatctaccgccttaaactgacgccgcagcagaagaggcaattcgagctgaaggtcctggcggagaaggtctttaagggcaagaagaacaactacgcgagcagtgtgtccacttggttccaggaggaccgcatccccaaggagcacatccagcgagtcaacgacttcgtggccagcaccttcggcagcgagcagcttaagtaccagtccttctgcaccaagttcgatcggcacggctacaagtcccgcgaccgctttatcctgctgagcaacaaggctatatatgtcctcgacggcaagacctacaagcagaagcaccgcctgccgctagacaagatcgacttcacgctgacgaaccacaacgacgacctgatggtcatccgcataccgctcgacctgaaaaaggacaagggcgacttgattctgatcattccgcgcataatcgagttcagcacgtatatcattgacaccgtgggaactgcctccatcgtctccattgtggacagaaattcgtaagttgcacatcggttatcccagtggttttctcttgactaagtgttgcattcgtttccaggttggagcacaacgtagtcaagggcaagggcggcgtcatcgacatccaaaccggcgccgagcccggagtggttcgtgataagggccatctagttatcgtaagtagtgcgagctccagctcctcatgaggaaacgcccattatcgtgctgacctcacacaccaaatatttcttttcagattggaacgcaataaggaatttactatgactttcttcagaaaagtggctttaaatcaaacgaccttgttttgttatattcgtgtaatttatagtgtaactatgtatttttgttactgcagcacctgagagttgtgtattcggattttatatgactaatgttccaactaaatgtatattgtttaaaaatacatataaatatattacaatttgtatatgaattgggttcttatcactaacttgtggtttttcaaagaggaaacgtggcaatttttctagtctcttatatcgtttctttcaaaaagaaccgcccactcgattggcaaaagcagcagtcgataactttgctttgaaacgtcagttcggtgctccagactttaaaaatctcgttaaagtcgtgcccaactcacaaaagaagatttcagctaacgttactactgaaattcatgtgaattaatataccactaacaattatttaactgtaaattatagttgggaaagttacttactcattattcaagtattaagtatttttagtatttatttgcgtaagttgagaaacagcttagtacattgcgcatacggtcacactgctaccttgctgtctttttcttgctccagcacttttacataatcttgaaaactcagcgtaaatatcgcccaaaatacgagacctgcactcgtgcaccgtctgcagagatgcgatactaacccgctgcgtttccgttgcaggagaaccgagatgtcgttcacacagatcgcgcgcagctgcagtcgactggcggccactttggccccaaggagggtcgcctccggcattctcatccaatcacaggcctccaggatgatgcacaggatcgccgtgccatcgatgaccagccagttgagccaagtaagcgaacgtccaaagcggtcccttccgttgcaggagccccaatcgcagttgaggacctaacctcatcgcaaacggcggggtttcgtgatctacgagtttcaaaacattcaattaagtgcttgcaatcatgaacgcaacagaagatcctcgccatgtggccgtcgaaccacccaattcgattgcatcacattattttgcataaaacatgattgtttccctatcgcacacacacacacatacacctgcaacaccggtgctcgcacttgtgtgcggttgattgtactacagtgaaaatcctctagaagtgaccttaaaatgtagcggtt

SEQ ID NO: 4613 - DNA, 3349 bp, DROSOPHILA
aattccttatgtacattgaaatcaaatccttgatcttcgcaataatggatactaaggactacatagattttaattcccaactgaaaatggagacgggcctgcacgagcgtgatcgtgctggagtccaggactttgtgctcctcgagaactaccagagcgaagaagccttcatcgggaatctgaagaagcgacctacattggccaggtgttgatctccgtgaatccctacaagcagctgcccatctacaccgatgaccatgtcaaggcgtacagaaacaagcacttctacgagatgcccccacacatctttgcggtgactgacaacgccttccgttcgctgatcgaggagaaccgcggccagtgcgtgctcatctccggagagagtggttccggcaagacagaggcctccaagaaggtgctgcagttcatagccgcctgctccggcaaccagacgaccgtcgagggcgtcaaggacaagctgctaaagagcaatcccgtgctggaggccttcggcaatgccaagacaaaccgcaatgacaactcctcgcggttcggcaagtacatggacatccagttcgatttcaaaggagctccgatcggaggcaacatcctaaactatctgctggaaaagtcgcgagtggtggctcaaatgggaggcgagcgcaacttccacatcttctaccaactcttggccggcgccgacgaggcccttctgcaggaactgcgcctggagcgggctctggacacttatagctacctgacagatgggctcaatggcaccgtgacgagaattaacgatgcggacagcttcaagcaggtccagcaggctctcactgtgatcgatttcaccaaggaggagcagcgcgagatcttcggaatcgtggccagcattctgcatctaggaaacgttggcttcactgaggtggagggcaatgccaaggtgaacagcagggatctggtagtcaccgctgctcgtttgctgggtgtaaacgcaagcgaactggaagccgccctaacgcaccgcacaattgacgctcggggagatgtggtgacctcaccactgaaccaggagctcgccatctatgccagggacgccttggccaaggctgtctatgatcgtctgttctcctggctggttcagcgcctcaacatctcgctgcaggcgaaggaaacgcgggcatccagaaataatgtgatgggcattctggacatctatggcttcgagatcttccagaagaacagctttgagcagttctgcatcaatttctgcaacgagaagctgcagcagctgttcatcgagcttacccttaagtcggagcaggatgaataccgccgggagggcatcgagtggatacctgtggagtacttcgacaacaaggtgatttgcaatctgatcgaggagaagcacaagggcatcatctccatactggacgaggagtgcttgcgaccaggagagcccacggataagaccttccttgagaagctcacccagaaattggcccagcaccaccactacgtttgccacgaaaaggcgcccgcccacatcaagaaaatcatgctgcgcgatgagttccgcttggtgcactatgccggcgaggtcacctacagtgtcaatggattcctggacaagaacaacgacctgttgttcagggatctaaaggagaccctcagcaaggctggcaacggcattgtgaggaactgcttcccggagaaggagctgcgcagcctgaagcgtccggagacggctatcacccagttccgggcatctcttaacaacctcatggacattctgatgtgcaaggagccgagctacattcgctgcatcaagccaaacgacctgcagactgccaacgtcttcaacgatgagttggtactgcaccaggtcaagtaccttggcctgatggagaatctgcgtgtgaggcgagctggtttcgcctaccgacgaacgtatgagctcttcctggagcgctacaagtccctgagcaagtccacctggcccaattacaagggtcccggtggcccgaaagcgggtgtccagcagctggtgaaagatttgggctgggacgaggaaaagtacagggtgggcgagacgaaactattcatccgctggccgagaaccttgttcgatacggaggatgcctaccaggagaagaaacatgagatagcggccatcatccaggcccactggaagggattgatgcaaaggaggaagtatctgaaactgcgtgctcaggtgatcataatgcagagctattgtcgccgaaagttggcacagcaggcggccaagaagcgcagggaggccgccgataagattcgtgcctttatcaagggcttcatcacccggaacgatgccccgaatggcttcaatgaagagtttattgccaacgccaagcgtatgtggctgcttcgactggcgaaggagctgcccaccaaggtactggataagagctggccccatgcccctgggcactgcgaggaggcctccggcatccttcaccgcctgcaccgtctccacttggccaggatctaccgccttaaactgacgccgcagcagaagaggcaattcgagctgaaggtcctggcggagaaggtctttaagggcaagaagaacaactacgcgagcagtgtgtccacttggttccaggaggaccgcatccccaaggagcacatccagcgagtcaacgacttcgtggccagcaccttcggcagcgagcagcttaagtaccagtccttctgcaccaagttcgatcggcacggctacaagtcccgcgaccgctttatcctgctgagcaacaaggctatatatgtcctcgacggcaagacctacaagcagaagcaccgcctgccgctagacaagatcgacttcacgctgacgaaccacaacgacgacctgatggtcatccgcataccgctcgacctgaaaaaggacaagggcgacttgattctgatcattccgcgcataatcgagttcagcacgtatatcattgacaccgtgggaactgcctccatcgtctccattgtggacagaaattcgttggagcacaacgtagtcaagggcaagggcggcgtcatcgacatccaaaccggcgccgagcccggagtggttcgtgataagggccatctagttatcattggaacgcaataaggaatttactatgactttcttcagaaaagtggctttaaatcaaacgaccttgttttgttatattcgtgtaatttatagtgtaactatgtatttttgttactgcagcacctgagagttgtgtattcggattttatatgactaatgttccaactaaatgtatattgtttaaaaatacatataaatatattacaatttgtatatgaa

SEQ ID NO: 4614 - protein, 41 aa, DROSOPHILA
METGLHERDRAGVQDFVLLENYQSEEAFIGNLKKRPTLARC

SEQ ID NO: 4615 - DNA, 2801 bp, DROSOPHILA
caatgcgggcatcctggagacaggctccatcgaagccaccagcctggagcaattcgatcgtctgatgaacaccaatgtgcgttccctgtaccaactaaccatgctggccactccagagctagtcaagaccaagggcaatatcgtaaacgtatccagtgtctgtggactgcgtgcctttcctggtgtcctggcctacaatgtgtctaaggcagcggtggaccagttcacggcctgcatagccctggaactggcccccaaaggagtccgcgtaaacgccgtgaatcccggcgtgattgtgactgacattcacaagcgtggcggcatggacgaggagacctatgccaagttcctcgaacactgcaagataacccacgccttgggccgtcctggcgatgtcaaggaggtggctgccgccattgccttcctggccagcgatcaggccagcttcaccacgggaatcagtctgcccgtcgatggaggtcgtcacgccatgtgcccgcgataggatgcggatgagcaaatggtggcatttatcgaatttagcgtcattttcagtagttaatttaaagaacacgactaaaatacaacacaatacattaaaagtgcgcagttaagatttcttggatttttcctctcataataaactaatatattgataaaatatctataatctattattatcttcttctgggatcccaaatagctgattatattgtcaaaaactctcacaacctctctgtctaaagaggtgaccacttaaaattaaaaactgatcatacatacattcaactatttattaatatacatacatacatacatatgtatatgcatagtagttggataaaataacaaattaacagttaattaaatttaattgaatttcacaaccactggaaatgtgtagcttggaaggttccagcctatcgatagcgtaatcggattgcagcccgggaattgttgacttctgggtcgggtcttcaatgtcaccaatcactatcagttaaaccgtcgagtggatcacttcaacatgcccagtttcaaggataaagttataatcgtgaccggagccagttcgggaattggagcgggtacttcggtgctcttggctaaactgggaggcctgctcaccatcgtgggcaggaatttggataagctcaacgagaccgcggagcagatagtggcagctggaggagcgccagcactccaggtggcggcggacataaacagcgagtccgacgtccagggcatcgtctccgccacattggccaagcacggtcgcatcgacgtgctggtgaacaacgccggaatcttggagctaggcagcatcgagaacaccagtctggagcagtttgaccgcgttatgaacaccaacgtccggtcgctctaccagctgacccacctggtcacaccggagctaatcaagaccaagggcaacattgtaaacgtgtctagtgtgaacggcatccgttcctttcccggagtcttagcatacaatgtttccaaggctgccgtggatcagttcaccaggtgcgtggctctggagctagctcccaagggtgtgcgtgtgaactccgtgaatcccggcgtaatcatcaccgagctgcagcgtcgtggtggactggaccaggaagcctacgtcaagttcctcgagcacgccaaggtcacccatgccctgggtcgacccggcgaagtcaaggaggtggctgcggccattgcattcctggccagcgacgaggccagcttcagcaccggtatcagcctgcccgtggacggcggtcgccatgccatgtgccccagataagaacggagttttttatccatgcatgcatttatcttatttttttatttttaattaaagtagcgcgcttacctcgtgtatttcaaatacttttcaaggatgtgattctatgtaaatgtaatagtttgctagaaataaataaaatgaaaaccgccctataaaaattggcaacgtacgcaagatttaatttgatacttaaaattttcaagttcgtagtaatggacttaatcggcggaaaacaagggaaaattaaagacattcgtctggacaggatcagatgatcatatagaatatcctagcagagactagcgcggacacatgacctgcttgccaccgtccacaggaagggtcacgccggtcacgaagctggccagctcgctggccaggaagcaaatggcggccgccacctcctttggctccccaatccggcccagggcgtgggtcttcttcgagtgctccagaaattcggcgtagctctgctcgtccatgccccccgccttttgcagattggtgcgaatcacacccggattgaccgcattcacccgaacaccctggggacccagatccagggcaagggagcgggtaaactggtccaccgccgccttggacatgttgtaggccaccagattgggaaaagcgcgaagtccgcagacgctggacacgttgacaatgctgcccttacactgcagcaactggggcagcagcaacttggtcagataaaacccagaacgcacattggcctccatcacgtgggtgaagcaggccagttccgtgctctgcagcgttcccgtgggcatgatgccagccccatttaccagcacatccagcttgccctcgtagcgctccgtggtcttccgcgcaatgcattcgatctccggaggcttgagcagatctccggctatgccgtacggctcgtggcccatcttcatgcagcgtttcatcacacatatgaggccctcctcctcccgatccaccagggccaggcaggcacccagcttcgaga

SEQ ID NO: 4616 - DNA, 801 bp, DROSOPHILA
ttaaaccgtcgagtggatcacttcaacatgcccagtttcaaggataaagttataatcgtgaccggagccagttcgggaattggagcgggtacttcggtgctcttggctaaactgggaggcctgctcaccatcgtgggcaggaatttggataagctcaacgagaccgcggagcagatagtggcagctggaggagcgccagcactccaggtggcggcggacataaacagcgagtccgacgtccagggcatcgtctccgccacattggccaagcacggtcgcatcgacgtgctggtgaacaacgccggaatcttggagctaggcagcatcgagaacaccagtctggagcagtttgaccgcgttatgaacaccaacgtccggtcgctctaccagctgacccacctggtcacaccggagctaatcaagaccaagggcaacattgtaaacgtgtctagtgtgaacggcatccgttcctttcccggagtcttagcatacaatgtttccaaggctgccgtggatcagttcaccaggtgcgtggctctggagctagctcccaagggtgtgcgtgtgaactccgtgaatcccggcgtaatcatcaccgagctgcagcgtcgtggtggactggaccaggaagcctacgtcaagttcctcgagcacgccaaggtcacccatgccctgggtcgacccggcgaagtcaaggaggtggctgcggccattgcattcctggccagcgacgaggccagcttcagcaccggtatcagcctgcccgtggacggcggtcgccatgccatgtgccccagataa

SEQ ID NO: 4617 - protein, 257 aa, DROSOPHILA
MPSFKDKVIIVTGASSGIGAGTSVLLAKLGGLLTIVGRNLDKLNETAEQIVAAGGAPALQVAADINSESDVQGIVSATLAKHGRIDVLVNNAGILELGSIENTSLEQFDRVMNTNVRSLYQLTHLVTPELIKTKGNIVNVSSVNGIRSFPGVLAYNVSKAAVDQFTRCVALELAPKGVRVNSVNPGVIITELQRRGGLDQEAYVKFLEHAKVTHALGRPGEVKEVAAAIAFLASDEASFSTGISLPVDGGRHAMCPR

SEQ ID NO: 4618 - DNA, 3595 bp, DROSOPHILA
ggacagtggaaactagtttcaccgcccaaaactgacagttcatttagctaatcccagatcctggcatccgggagtaatcgtgcgatcatatgtacatgttgtatagatcatgtttccatcctatgaatctaatagctaagaataaattagaatgtatccccaatatttgaaatgcaactttattcataaatatcgtgtatggatatgttttgagtgtaaggcccgtttaacccattgtaagcaaaaagccgagggatataaggtgaggggctgcagtgcatccagttgtagttaattatattcggtattttctccggctcttgctggttaattttggggtcgcacgttctgtttgtcgttttcgagttaaatattgcaattgtcttcgacgatttcggttaaatgtgtaccttactgcagtgtttatttttggcttaagccccgacagaccaccaagctacagtttatattatgagatatctccctgcacttaacaggttttctgtgacttgcatattttattcccgagtactcgtacacctataattggatttttaccccgaataatgaattcgattcgcctgtgaataggagagatgtatccaaagcgtgtactcattcccactcccatagcttttcgaatcggtcgctagtgaaatgaagaagcatttggaagtgttcttggtcgtggcattagctgctctagcggaattgccaggagttacagcctcgtccgtggaaatactgtcccattgtgtcgcctgtccggacgaatttaggggcatgttggtctgcgcctttatcaacggttgctacttggaaatagaatactgctccatggtggtcttcaactgtggacgccaacagcaccacaaacactgtgaggatcatagccgtatgctgataaagataccctctaacttgagattctttcagtgttcctagtggtaaacgagggcaagtgcaagccagttcggggctacaaatgcgagaccatggatttttaagttctggcggaggttctccgcatttatttattgatgtaatgattacaatttaaagtgcttaatctgagggaaatgtgtgacgattaaaacttgacaatgtgtccggtgaaatagacagcgtgcttgtcgcgaatgatgaacgcaaatggatgatcggccacgaaagtcttggggtccaggggcagggacatgggaactccggcagcatctagaagaaccgaaatactggtggtgtctactggaagtgacggaaaaccatataacttacaactagctccagccgcctcacatccgatctcgttcacatcgatgaaggtcttgtgctgcacctttgtgatccgagtgccgatgggcgagtcctggaaaatgttgctgaagtcggctgcatctgagaacatggcactgattcccatctgaaaagagaagtttcgaaagaaattcccctccattagataccactaattcacggtctgagaactactcccatttaaatggtttcaaatccgacagacccacgaattgtttttaaccctatctccctaccgcttagatcttatctccccctggaatatcattatgttgcccctcctcaccttatgcaatgtgggtcttaggtccgtgtcgaactcgaacttgaacttgggcaggtaaacggacacactctgccactgccagcggtcttcgagcagattgaagtcgacgcccttgagcttctgctccagagcctgtagtccggaacgctggttgggcaggatgaaccacatggtcaggttgatgttttcgaagaacagctcaatggccttggcgtcgagttccgggtagtcggcgtagtagtaccagttgtctgcgaacatggttggcacctggatggaccggctctcgctcagccagaactcgcgatcccgggtatcctcgtcgttgaagggtcgtgcccagcgagccttgaagtagatggcgttgaccagcgccacattggtgtccggctccaggctttccaccacccgttcgatcttgttctccgtctgctgcttcacccagcggttgatctgctccacggcctccgtttcgcgactgaagtccagtggttctacctcggagtcgaagtacttctgggccacctctcggaagtggctagataccgtgagattctgccgggtgtacaccttgttggcgatctccaacacggtcttggacttgatgtaagagtgcagcaggttgtggtagctctcggccagaccatctttgctctccttggcggaggcgtgcaaggtcttctgcagttccgcggccgtcctgccctcagctccgtagtaagccaacccgagggccagctggatggaaaccggcgagatgatcacgttctcatcctggcgatctgtggcgagggtttggaagagttcggtggcgaagagattgcgatccttgatcgtgttacccagaccttcaggagcggatatccacaccccaagaagaatgactaggagaattgaaaaggattagttctcagctgggcattaggaatcttcggttagggtgctcactacttagccagtggttcattgcgcctgcgtcgacacctcgagactaaaagtgaaatggcccagccacctgtcatttatagctgcgagtgggccaggaatcgagacaaagccacgccaagaacggcgtcgactgcgacagagcctgatgcgctttgcattacaagcagcgccagaggaaatcagtaaaaacgaaagggccactcggcagatcgaacaattgaatacccttgcaaatctcttggaataaaatcagttcttcttatacatattcattccaattctccaacaatgtaaatagattaaatattattaaaatgaataaataaatatttctttaaatataagtggctattgattcatatccagagaataaatatggcatatataaatagtatgccatatttattagcaacttagtaattacaatataataaaaacacagtgcatgtttatgtttcagtatagcaaacatttcaatatttatctgaatgcaaaggcaagtttaagaacgtagtgtaggtactcgctgtaagtgaatagtgagtaaagaaagaaagaaaggaaccttaaggtggattaggttcttaacccgagcacctgataatactgggaacagtttcaacagctctccccctatgggaacactggatcgttcccctgtcagcttctcaatctcatgtcctctccctgtcagatctctttctccagtgcgctctctctcctctattctacggctctacgattctccgactctccggtgcacttgggcctttgttgctctcgcctcctgcacttgttgttgcctggcccacctctcgcctcgagtggccgccttggggtttacgctgctgtcaaattatttacatgcatgcttggacccaatgctgtatgccaaaaggggacgggggagttggggatggggatggggccctgagatcaggattgcattaactctaatttctcgtttacgaacacgaaccaaaatgttcaggttttatggcctttgcatttaatgagttattttcgtatttgtttagataatgcgtc

SEQ ID NO: 4619 - DNA, 1291 bp, DROSOPHILA
ttagtctcgaggtgtcgacgcaggcgcaatgaaccactggctaagtatcattcttcttggggtgtggatatccgctcctgaaggtctgggtaacacgatcaaggatcgcaatctcttcgccaccgaactcttccaaaccctcgccacagatcgccaggatgagaacgtgatcatctcgccggtttccatccagctggccctcgggttggcttactacggagctgagggcaggacggccgcggaactgcagaagaccttgcacgcctccgccaaggagagcaaagatggtctggccgagagctaccacaacctgctgcactcttacatcaagtccaagaccgtgttggagatcgccaacaaggtgtacacccggcagaatctcacggtatctagccacttccgagaggtggcccagaagtacttcgactccgaggtagaaccactggacttcagtcgcgaaacggaggccgtggagcagatcaaccgctgggtgaagcagcagacggagaacaagatcgaacgggtggtggaaagcctggagccggacaccaatgtggcgctggtcaacgccatctacttcaaggctcgctgggcacgacccttcaacgacgaggatacccgggatcgcgagttctggctgagcgagagccggtccatccaggtgccaaccatgttcgcagacaactggtactactacgccgactacccggaactcgacgccaaggccattgagctgttcttcgaaaacatcaacctgaccatgtggttcatcctgcccaaccagcgttccggactacaggctctggagcagaagctcaagggcgtcgacttcaatctgctcgaagaccgctggcagtggcagagtgtgtccgtttacctgcccaagttcaagttcgagttcgacacggacctaagacccacattgcataagatgggaatcagtgccatgttctcagatgcagccgacttcagcaacattttccaggactcgcccatcggcactcggatcacaaaggtgcagcacaagaccttcatcgatgtgaacgagatcggatgtgaggcggctggagctagttatgctgccggagttcccatgtccctgcccctggaccccaagactttcgtggccgatcatccatttgcgttcatcattcgcgacaagcacgctgtctatttcaccggacacattgtcaagttttaatcgtcacacatttccctcagattaagcactttaaattgtaatcattacatcaataaataaatgcggagaacctccgccagaacttaaaaa

SEQ ID NO: 4620 - protein, 390 aa, DROSOPHILA
MNHWLSIILLGVWISAPEGLGNTIKDRNLFATELFQTLATDRQDENVIISPVSIQLALGLAYYGAEGRTAAELQKTLHASAKESKDGLAESYHNLLHSYIKSKTVLEIANKVYTRQNLTVSSHFREVAQKYFDSEVEPLDFSRETEAVEQINRWVKQQTENKIERVVESLEPDTNVALVNAIYFKARWARPFNDEDTRDREFWLSESRSIQVPTMFADNWYYYADYPELDAKAIELFFENINLTMWFILPNQRSGLQALEQKLKGVDFNLLEDRWQWQSVSVYLPKFKFEFDTDLRPTLHKMGISAMFSDAADFSNIFQDSPIGTRITKVQHKTFIDVNEIGCEAAGASYAAGVPMSLPLDPKTFVADHPFAFIIRDKHAVYFTGHIVKF

SEQ ID NO: 4621 - DNA, 2813 bp, DROSOPHILA
cgccggagccattgcctccaccaccgccgctaccgccgactgagcttccggagctggccggcgcggtcagcagtccgttgcgggagtgactgcgcggcgaactggacagtgagcgattcgctgcgggcggaacaaaggaatcgagcgttatgtatataagaaattgggaactacgggatgttctaggagctctaaagttttaaagactaagcctcaccatccgcctggttgccattcagaacgatgtaatcgcgaagatcctcctcgtcctcctccgtgtcgttgagcgagaagtcggaaagctccgcgtcaccgtctccatcggatatggactccgtcttgggctgcaggtggggcgtggcatgtcggagcagggcgggcggatgcctgccagcggcagtgtcccgcatgctaccattaccgttcaggtgcccggatcgcggtgactcgttggtctggctgtggccggaggatccgctcgaggcggtgctccgttcgtccgcgttatccgctccgttcgagctgctcggtagccaggccatctctccgattcgccggagcagaggatacgtgcgttctgttgcgttcgaagcgcagcagcaaagtgagcaactgactgggtaactggcactgtgtgtctgggaaccaaccccctatggacagagggcggggccaatggcgcagcatccacccccggacgaggcatacacacaaaatgggcgtactcgtacatacatatgtatgtacgtttgggttaccaatgttgggctgacttcttaccgagcctgttactttttgattagattagataccaaaacataaaacgagtatgagcaaactataatatatattagcataagcagctgtcttagaagtaaatgaaattcataatttatttagtaatttaaacgtatccaatgccaatccagtaactgcacatgccaggacaacaaacattctcagttgttcctttcatagagcccaatgtatctatacacgactactgatgaccgatgggatggggtatgcccacacttagacgcttcttgggctgctttgccggcggctgcgagggtcgcgccacatcgcccacctgctcccgatcccggtcctgttcctttcgctcacccggtgtctccggcatggcggactccattgcaaactggggcgatgtcctgtccccgggcgcaccatttgcactgggcacaagcacgggcgttagattctgtctcatcatgggcgagggattgacgaatatcatcttgtcgagcatctcctcgcaaataccggcgtgaccctcgcgcaccacgcgcggccggaagatgtacgaggtggccgacatgcgggcatccatatactgcacctgcacctccacgggaaagtcgctgcccagtacctcgccaatctcaaacggagcgctgtccgccacgtgcagtcgcagcggcaggcgcggcgacatcttgaaggtgacgcgccgcacgaaccgcgacaggtcgccgccatcgcgacctgggcgcaggtagacgccccacgtcggctccagcatgtagggcatgtccggatcgcactgttccatgcggcagccgatcacgatgtcccgactgatcacacagcgcccggtgacagtgatcggcggagtgcggttgcagctcacccgctggcagtcatcgaccacattctgatggcgcaggagatttgtgtagctcatcacgattcaaaaaaaaaaaaaaaaaaaaaactaatttcaatttatgtttaactaaaaatttttctacgaaaatttgaaggcaactttaacttgtttgcttggtgtgatgctttttcaaatcgagagcgacagcaaaaacagaagcccactagatatgcatttaactaaagtaataactaatgtacatataattttttatagattttatcatactacctaataaccgttgcatgtctgctaccttgttttccccctcgaagcagatgttaatcccaacttgggattaaggttcttcaaaagtttcgcgaaaggcgttgaaatttcaacgccttcgtcgtcctacaacgggccatctccgattttttcacgccttaaactgtgattttttctaattaattaacgcagaatttgttggtggactagggaagagttagcggacttgggagtacgcaatgcgcagactccgaagggcggagttaagtgctaagtcagaggaatttggggttggtgcggcccgggcatttacttggccgggaatattccgggcacagcgacgttacttcagttcagcggggcagctgaattctaatgtggacattttgaggatagcgagaccattcagtgcaatctgtaggtgctccaaggccaaggacttcgtttaaaggtctgcttcaagtccacctgatctgagccccgtatctgttatattccttcataagttgccaaccgagcagctctaaacgagacttcccaaggaaacctagtttggagaatatgacactatatttctgatattaatttaaactgttcattacattgatataatttttttacagacatctatctcatcagaaagtagtcaagtgctgaagtaatttcacttgagcttgtatctccgtttgtgcttacagttcaacgctgggacggaattgtggtgccagtaatgccacctgatgtgctacgtccatcctctaatcgcaatccatattcatgggtccacaggtcctcggacctacgccacttggacgttgaaagggtgggccttgggaactcggctctaatcccgctcacagtccgaccgacactcacccgaaatcaccacccg

SEQ ID NO: 4622 - DNA, 813 bp, DROSOPHILA
acaccaagcaaacaagttaaagttgccttcaaattttcgtagaaaaatttttagttaaacataaattgaaattagttttttttttttttttttttttgaatcgtgatgagctacacaaatctcctgcgccatcagaatgtggtcgatgactgccagcgggtgagctgcaaccgcactccgccgatcactgtcaccgggcgctgtgtgatcagtcgggacatcgtgatcggctgccgcatggaacagtgcgatccggacatgccctacatgctggagccgacgtggggcgtctacctgcgcccaggtcgcgatggcggcgacctgtcgcggttcgtgcggcgcgtcaccttcaagatgtcgccgcgcctgccgctgcgactgcacgtggcggacagcgctccgtttgagattggcgaggtactgggcagcgactttcccgtggaggtgcaggtgcagtatatggatgcccgcatgtcggccacctcgtacatcttccggccgcgcgtggtgcgcgagggtcacgccggtatttgcgaggagatgctcgacaagatgatattcgtcaatccctcgcccatgatgagacagaatctaacgcccgtgcttgtgcccagtgcaaatggtgcgcccggggacaggacatcgccccagtttgcaatggagtccgccatgccggagacaccgggtgagcgaaaggaacaggaccgggatcgggagcaggtgggcgatgtggcgcgaccctcgcagccgccggcaaagcagcccaagaagcgtctaagtgtgggcataccccatcccatcggtcatcagtag

SEQ ID NO: 4623 - protein, 235 aa, DROSOPHILA
MSYTNLLRHQNVVDDCQRVSCNRTPPITVTGRCVISRDIVIGCRMEQCDPDMPYMLEPTWGVYLRPGRDGGDLSRFVRRVTFKMSPRLPLRLHVADSAPFEIGEVLGSDFPVEVQVQYMDARMSATSYIFRPRVVREGHAGICEEMLDKMIFVNPSPMMRQNLTPVLVPSANGAPGDRTSPQFAMESAMPETPGERKEQDRDREQVGDVARPSQPPAKQPKKRLSVGIPHPIGHQ

SEQ ID NO: 4624 - DNA, 3449 bp, DROSOPHILA
aatgacagcccaaatcaatatatattcaaacatatatatgcatagaaaaaaccaacttatatatgatgaacaacttcagcgtttcgctttaattatgaggcaacaacctcatgagaaattcaaaccaaacattaacttaattaacaaataaacacaaaactaaactaaacaataacaacaggaaacccccaaattcgaagaggaaatgaaaatgaacacgagacaaatgcgtaaagaaaacattaatttaaaaacaataaaaattacaaacaaaaatatatatagaaatgcgtatttattcatttcggtggcaaaatgtagtatacttttgggctgagaaagtatatttacaaatgtctggttgtagcttgaaaaccgataattttcaacttaccgtgcaaaaataaaaaatatttgtggctttcttgattctcaacaccaggccaccataatcagtagaaggtgtcaacttctggaattccagttcgtcaaaaatcgaatatttacaaactcgattttctccaaaacatgtttaatagtcatagctaactattactatcactatttaaacgatcctgggaaaaaaatttttttttcacttttcagattttcggtaaggggtaccatcattaaaatttgcgaaaaattgcaaaattttcgaaattccaattttcaatacaggtcgatagggaattttgttacgaattcaacgaggtatgacattccactttttgacaactatttttattgctataaaaaaaaaattagtataattacacaatttgtggcaaatttattagatttttggattttagatgttttttttttagattggctcaccatcctaattttatgatttatgttacttgcttactgatttcgttcgattggaaattcaattcacagttgcaagtttttttttttaatgatttgtcgaatttgctttttattttaaaccgtaaattatttagaatgaaatttgaataaacaatacaaactataactattgattctgcatctgcaatttgcactattaactttgtaatttattggtagataaaaaaaatagcaaatcggggatagtatactatctccgaatgctttggcaaagccggtatccactttttccaagattccatccattagattccttattctacgtcctgcgccgtttgcccagactgagatcggtggctccgccttccggcttgaggcgtcgcttgctactccgtccgctggccgattttacaccggatacggtgccactgattcgctgagtctcggccatggccagcggagcagtggtcaacggcaggggtgggccgtttaacggatgcccaagtgggagtgtagactccaggagaagctcgcttttgacaacggctcccggggcaatcatcagcaggtcgttgccagcgtttccgttggcatgtccgtgcccaatgccattcctgtgcatctgcccgtcggtgcgttcacacttgatgtgccgtacaggcggaacatctggattctccagattctccccgtccgccgcatggccattggccatcctattgtcgttgttgttcggctccatttgagccctgatcggatgcgagggcgcctgccgctgctgccactcgaggatgcccgtcagcagcttaatgtacttaatggccgagcgcaggatctcgttcttcgatagcttcttgtccggcggatgtgtgggcaccagcttgcgcagctctgcaaaggcaccggacacgttctgctggcgccatcgctcccttgtgttggtgaacaccttgcgcacaccgccggtggctcctacgccgctgccgccgccactggatgcattgccgccggagccattgcctccaccaccgccgctaccgccgactgagcttccggagctggccggcgcggtcagcagtccgttgcgggagtgactgcgcggcgaactggacagtgagcgattcgctgcgggcggaacaaaggaatcgagcgttatgtatataagaaattgggaactacgggatgttctaggagctctaaagttttaaagactaagcctcaccatccgcctggttgccattcagaacgatgtaatcgcgaagatcctcctcgtcctcctccgtgtcgttgagcgagaagtcggaaagctccgcgtcaccgtctccatcggatatggactccgtcttgggctgcaggtggggcgtggcatgtcggagcagggcgggcggatgcctgccagcggcagtgtcccgcatgctaccattaccgttcaggtgcccggatcgcggtgactcgttggtctggctgtggccggaggatccgctcgaggcggtgctccgttcgtccgcgttatccgctccgttcgagctgctcggtagccaggccatctctccgattcgccggagcagaggatacgtgcgttctgttgcgttcgaagcgcagcagcaaagtgagcaactgactgggtaactggcactgtgtgtctgggaaccaaccccctatggacagagggcggggccaatggcgcagcatccacccccggacgaggcatacacacaaaatgggcgtactcgtacatacatatgtatgtacgtttgggttaccaatgttgggctgacttcttaccgagcctgttactttttgattagattagataccaaaacataaaacgagtatgagcaaactataatatatattagcataagcagctgtcttagaagtaaatgaaattcataatttatttagtaatttaaacgtatccaatgccaatccagtaactgcacatgccaggacaacaaacattctcagttgttcctttcatagagcccaatgtatctatacacgactactgatgaccgatgggatggggtatgcccacacttagacgcttcttgggctgctttgccggcggctgcgagggtcgcgccacatcgcccacctgctcccgatcccggtcctgttcctttcgctcacccggtgtctccggcatggcggactccattgcaaactggggcgatgtcctgtccccgggcgcaccatttgcactgggcacaagcacgggcgttagattctgtctcatcatgggcgagggattgacgaatatcatcttgtcgagcatctcctcgcaaataccggcgtgaccctcgcgcaccacgcgcggccggaagatgtacgaggtggccgacatgcgggcatccatatactgcacctgcacctccacgggaaagtcgctgcccagtacctcgccaatctcaaacggagcgctgtccgccacgtgcagtcgcagcggcaggcgcggcgacatcttgaaggtgacgcgccgcacgaaccgcgacaggtcgccgccatcgcgacctgggcgcaggtagacgccccacgtcggctccagcatgtagggcatgtccggatcgcactgttccatgcggcagccgatcacgatgtcccgactgatc

SEQ ID NO: 4625 - DNA, 1352 bp, DROSOPHILA
cactttgctgctgcgcttcgaacgcaacagaacgcacgtatcctctgctccggcgaatcggagagatggcctggctaccgagcagctcgaacggagcggataacgcggacgaacggagcaccgcctcgagcggatcctccggccacagccagaccaacgagtcaccgcgatccgggcacctgaacggtaatggtagcatgcgggacactgccgctggcaggcatccgcccgccctgctccgacatgccacgccccacctgcagcccaagacggagtccatatccgatggagacggtgacgcggagctttccgacttctcgctcaacgacacggaggaggacgaggaggatcttcgcgattacatcgttctgaatggcaaccaggcggatgcgaatcgctcactgtccagttcgccgcgcagtcactcccgcaacggactgctgaccgcgccggccagctccggaagctcagtcggcggtagcggcggtggtggaggcaatggctccggcggcaatgcatccagtggcggcggcagcggcgtaggagccaccggcggtgtgcgcaaggtgttcaccaacacaagggagcgatggcgccagcagaacgtgtccggtgcctttgcagagctgcgcaagctggtgcccacacatccgccggacaagaagctatcgaagaacgagatcctgcgctcggccattaagtacattaagctgctgacgggcatcctcgagtggcagcagcggcaggcgccctcgcatccgatcagggctcaaatggagccgaacaacaacgacaataggatggccaatggccatgcggcggacggggagaatctggagaatccagatgttccgcctgtacggcacatcaagtgtgaacgcaccgacgggcagatgcacaggaatggcattgggcacggacatgccaacggaaacgctggcaacgacctgctgatgattgccccgggagccgttgtcaaaagcgagcttctcctggagtctacactcccacttgggcatccgttaaacggcccacccctgccgttgaccactgctccgctggccatggccgagactcagcgaatcagtggcaccgtatccggtgtaaaatcggccagcggacggagtagcaagcgacgcctcaagccggaaggcggagccaccgatctcagtctgggcaaacggcgcaggacgtagaataaggaatctaatggatggaatcttggaaaaagtggataccggctttgccaaagcattcggagatagtatactatccccgatttgctattttttttatctaccaataaattacaaagttaatagtgcaaattgcagatgcagaatcaatagtta

SEQ ID NO: 4626 - protein, 376 aa, DROSOPHILA
MAWLPSSSNGADNADERSTASSGSSGHSQTNESPRSGHLNGNGSMRDTAAGRHPPALLRHATPHLQPKTESISDGDGDAELSDFSLNDTEEDEEDLRDYIVLNGNQADANRSLSSSPRSHSRNGLLTAPASSGSSVGGSGGGGGNGSGGNASSGGGSGVGATGGVRKVFTNTRERWRQQNVSGAFAELRKLVPTHPPDKKLSKNEILRSAIKYIKLLTGILEWQQRQAPSHPIRAQMEPNNNDNRMANGHAADGENLENPDVPPVRHIKCERTDGQMHRNGIGHGHANGNAGNDLLMIAPGAVVKSELLLESTLPLGHPLNGPPLPLTTAPLAMAETQRISGTVSGVKSASGRSSKRRLKPEGGATDLSLGKRRRT

SEQ ID NO: 4627 - DNA, 4311 bp, DROSOPHILA
gtttactatatatgtatgtatatcggaatgataaacaacccagaatataaaagtgtctactgggtgatacgcgataaattgcgactatagcctagacaaccaagtccatgaaggcattgaactacaaatttatttattcatttataaattaaattgagtggaggacttctagctcagtccgtgagtttaaatacttatgagagctagaaattttgatttacgcatacatgctcccaatttctaattctattgcttgacaatttccattaaaatgcaaaaaaaaaatgtataacttcctctctatctgagtaacaggtatctgatccggcccattccgaattatatagaatatatagcatagaaacggacatgcatttatcgccttaatactgatcaaacattctctcgactgtcaagataccctttggttgctacgcaccacgatagaaaatcaggaacttcttggacttttgcgcgtttgtaaatgagtacaaatcatcattaacaaacgtaatcaactatcacagacttaagtccatagacgacttaacttgatgtgattctttttcaccgtatttcgtccaaaaaataataacaacgcgataataacaactcaactaaactagagctttcacagaacccacctgatttttgtttacaaatttttagatttgttgttgccttattcttcgtaacaaaacaaacaaaaaagagaaccgtttatcaaaatccgatgcctctcaattttgttttttttttttagtgagcggaagccccaaaagctcgctcaccagaaaagctttggctctcgccaagtgatgatgtcactgacatcccagctgttgcagaccggctattctcattctaaattctcacttcgggtgcgacgcttgtctggtgctaaataaattcacgttgcgcgtcgccagtgaataagatctggaatttcgaaatatatgtgccagcacccacatactaaataatagattgcatttccaaaatgccttccagctgctcttttgagctcgatcgccgcgaacccatttactacagtggtgagacggtcaatggaagggccattctgacaacaacatccgaaaagtctgtgaacggtgagttttagtcgttaaaaagcgaatggactgatatgtttttaatttgagcgtaatcactgttgactctgtgataacaccaagccggttttatagaatgcagcaaacaaacaagtttgttgtagcgccataaagtgttttgcttcttatataagaaggattttagcgaccatttatgtggctttaattgtctcaaatgtttaattcctagtatcctaaattgcatgccctgatgagctcagttcgcccctaactacaaattcattgatcaatttttgcgtttttcaaatagccaattctaaaaacaaacttgaaagctttacaaaagataacaaaagtatgtatacaagcaaacaagtatttgatacagtgctctgtatcaatttccatgttcagttccatttttgattggcgtaatctcattctgcacttacagcaactccttcggagtccgaagaaggctttcacatacgttcaacatataaagattcgttttcggatacaaaccatattcaaatatcactctctctcttttcactttctgattagaggtatacattcttttcgagggcgaggcaaaggtgcgatgggatgagcggcgaacaaggacgagaggtggaaagaccgagcactacacggagtatttccgaggcaagcagcagtacttgtacacccggacatcggtctttggatccgggaatctgccgccaggtacgcacacctacaacttctgcattccactgcccctggaatgcccctcatcagtggtggcccagtacggaaaaatcttctacgaggtctccgtggtcatcgatcgccagtggcgcttcaacaacgtcttcaagcagccactgacggtcatacagacctacaacctcaacatgagcccccaattgctggtgagtccaaggacaggaacagtttactaaaagtttagattgcactaatcggtagtaaatcaatgcagttttaaattgtcctgcgacagatatttaaggacaattagacgagtcattcaagtatagaaacattgcgtgccttatggacgtaaattccgaagttattaaacaaacaaggggtgtgttcattcaaaccaaagctatgggactaaataaaaaatttaaataaattaaaaataaattttttacgatcctaacctgtagaaatgtaaacaaaaaaatgttaattaaactttaaaattatatcaataagagtaattaggtaatattagttattcctaggaactaataaatgcacactctttttcgacagatgcccctagtccgagaggacatcaagcacttttgctgttggccctgcagttcaggcccggttctatcgacattaacaatacccttcggtggttacgcgcctggtcagaagatacgctttactctggagattgacaaccagtcgagtggctatgatctgaatgggatcgaactgaaacttaagcagatttacaaattccaggctcaaacgccgcaccacaaaactcgcgaaaaggagcacagcctcaacaaaagttgccagcaggagcgcgttttgaggctctcaaagaaaaaaattgaaggaaccctggctattccagcagtaccgccctcttcccgcaccgaaggcatcatttcggttagttaccaagttatcctcacgatcagcactggcgactgccacgtggactcggactttgaggtgccgattgtaattggcaccataccattgatccaaagtgccgagaatccagccagtgcagcacagtggataccggaaacgccggacactcctgccggagccgccgcagatctgcctcccagttatgacaagtgcagtaagtatatagcgaaatcatagatactcttcatttgaatttgtaaatgcttaaaggtgcttgatcattgtataattcttatactattcatgtttttagagccaccaaccttcgaggaggccacaaactttggtgaaaggttcatcgacatcgatcaggatgagcacaatcgcacggatgactttattccgcgttaccccatgtacaccaactttgccatgccatcggctccacctcaaccccctgaagagttcgctaccaatcaaccagtacccgttctgtcactacctcatgatcccactgccccattggtcggtcaaaacaatactgaccgtccaacacaatcgtacggttggaacactaactcataaaaaaaagaagacataatctcataaaatgattttactttgatttagctttggatgttaccaataaacatagtttaaccgtttatcgtgaaactaaatcttaggaatatatataagttatccaaccaaattttctagtttagaaagtcatcaatgaacaaaatttccttgaaaatatattttaaattcgaaattcttagcgtaacactcgcacttatgtgacgaattatccaactctatctgtaggttcaactacaatatatttgttgggcaatgggcaataaatcagattctatgcaaatcctttctaattaagtcaacaatatcgaatcacatcgctaatattctcgattccacatagaacacacttatcaatacttatcacttacttatcaatacccacacatcaatatttcttttattaaatataaacaaaatttcaaaattggtacttgaaagtgaatgcgttaaaagatcgttctaggtatatgatattgattcttaaaataaatcattcccttgatttaaaattgccaccagtaaaagtatcagttaccacttgtgataatggaataatatatatttgtgtaattttgctagtgaatgaaataaattagtaaaataaaatagtggcgtgcatttaatgagacttcacttcctccgattgagtctggtccatttcgtagtagacatagcgtggtctaaaatccaactgttcgccggacaagtaatgtttgttggtcttattcagattggtggctaccatgaactcggcttcccggaaattcgaagctagaaagaaattcgaaatataaaatgcaaacggatattctataaatcgggaatagacgtacccaaagatgtggtggaaatgctaaaattcggaatcaatgttgatgctgtttcgactggaggagttggttccggagcagtgccatcaatgggttcttgcattaggagtttgccaggacagggcggcgtcacatttccaatgatgaccggc

SEQ ID NO: 4628 - DNA, 1290 bp, DROSOPHILA
atgccttccagctgctcttttgagctcgatcgccgcgaacccatttactacagtggtgagacggtcaatggaagggccattctgacaacaacatccgaaaagtctgtgaacgaggtatacattcttttcgagggcgaggcaaaggtgcgatgggatgagcggcgaacaaggacgagaggtggaaagaccgagcactacacggagtatttccgaggcaagcagcagtacttgtacacccggacatcggtctttggatccgggaatctgccgccaggtacgcacacctacaacttctgcattccactgcccctggaatgcccctcatcagtggtggcccagtacggaaaaatcttctacgaggtctccgtggtcatcgatcgccagtggcgcttcaacaacgtcttcaagcagccactgacggtcatacagacctacaacctcaacatgagcccccaattgctgatgcccctagtccgagaggacatcaagcacttttgctgttggccctgcagttcaggcccggttctatcgacattaacaatacccttcggtggttacgcgcctggtcagaagatacgctttactctggagattgacaaccagtcgagtggctatgatctgaatgggatcgaactgaaacttaagcagatttacaaattccaggctcaaacgccgcaccacaaaactcgcgaaaaggagcacagcctcaacaaaagttgccagcaggagcgcgttttgaggctctcaaagaaaaaaattgaaggaaccctggctattccagcagtaccgccctcttcccgcaccgaaggcatcatttcggttagttaccaagttatcctcacgatcagcactggcgactgccacgtggactcggactttgaggtgccgattgtaattggcaccataccattgatccaaagtgccgagaatccagccagtgcagcacagtggataccggaaacgccggacactcctgccggagccgccgcagatctgcctcccagttatgacaagtgcaagccaccaaccttcgaggaggccacaaactttggtgaaaggttcatcgacatcgatcaggatgagcacaatcgcacggatgactttattccgcgttaccccatgtacaccaactttgccatgccatcggctccacctcaaccccctgaagagttcgctaccaatcaaccagtacccgttctgtcactacctcatgatcccactgccccattggtcggtcaaaacaatactgaccgtccaacacaatcgtacggttggaacactaactcataa

SEQ ID NO: 4629 - protein, 429 aa, DROSOPHILA
MPSSCSFELDRREPIYYSGETVNGRAILTTTSEKSVNEVYILFEGEAKVRWDERRTRTRGGKTEHYTEYFRGKQQYLYTRTSVFGSGNLPPGTHTYNFCIPLPLECPSSVVAQYGKIFYEVSVVIDRQWRFNNVFKQPLTVIQTYNLNMSPQLLMPLVREDIKHFCCWPCSSGPVLSTLTIPFGGYAPGQKIRFTLEIDNQSSGYDLNGIELKLKQIYKFQAQTPHHKTREKEHSLNKSCQQERVLRLSKKKIEGTLAIPAVPPSSRTEGIISVSYQVILTISTGDCHVDSDFEVPIVIGTIPLIQSAENPASAAQWIPETPDTPAGAAADLPPSYDKCKPPTFEEATNFGERFIDIDQDEHNRTDDFIPRYPMYTNFAMPSAPPQPPEEFATNQPVPVLSLPHDPTAPLVGQNNTDRPTQSYGWNTNS

SEQ ID NO: 4630 - DNA, 3633 bp, DROSOPHILA
aacgacgacctgatggtcatccgcataccgctcgacctgaaaaaggacaagggcgacttgattctgatcattccgcgcataatcgagttcagcacgtatatcattgacaccgtgggaactgcctccatcgtctccattgtggacagaaattcgtaagttgcacatcggttatcccagtggttttctcttgactaagtgttgcattcgtttccaggttggagcacaacgtagtcaagggcaagggcggcgtcatcgacatccaaaccggcgccgagcccggagtggttcgtgataagggccatctagttatcgtaagtagtgcgagctccagctcctcatgaggaaacgcccattatcgtgctgacctcacacaccaaatatttcttttcagattggaacgcaataaggaatttactatgactttcttcagaaaagtggctttaaatcaaacgaccttgttttgttatattcgtgtaatttatagtgtaactatgtatttttgttactgcagcacctgagagttgtgtattcggattttatatgactaatgttccaactaaatgtatattgtttaaaaatacatataaatatattacaatttgtatatgaattgggttcttatcactaacttgtggtttttcaaagaggaaacgtggcaatttttctagtctcttatatcgtttctttcaaaaagaaccgcccactcgattggcaaaagcagcagtcgataactttgctttgaaacgtcagttcggtgctccagactttaaaaatctcgttaaagtcgtgcccaactcacaaaagaagatttcagctaacgttactactgaaattcatgtgaattaatataccactaacaattatttaactgtaaattatagttgggaaagttacttactcattattcaagtattaagtatttttagtatttatttgcgtaagttgagaaacagcttagtacattgcgcatacggtcacactgctaccttgctgtctttttcttgctccagcacttttacataatcttgaaaactcagcgtaaatatcgcccaaaatacgagacctgcactcgtgcaccgtctgcagagatgcgatactaacccgctgcgtttccgttgcaggagaaccgagatgtcgttcacacagatcgcgcgcagctgcagtcgactggcggccactttggccccaaggagggtcgcctccggcattctcatccaatcacaggcctccaggatgatgcacaggatcgccgtgccatcgatgaccagccagttgagccaagtaagcgaacgtccaaagcggtcccttccgttgcaggagccccaatcgcagttgaggacctaacctcatcgcaaacggcggggtttcgtgatctacgagtttcaaaacattcaattaagtgcttgcaatcatgaacgcaacagaagatcctcgccatgtggccgtcgaaccacccaattcgattgcatcacattattttgcataaaacatgattgtttccctatcgcacacacacacacatacacctgcaacaccggtgctcgcacttgtgtgcggttgattgtactacagtgaaaatcctctagaagtgaccttaaaatgtagcggttttaaaacatgtgatttcagtttgttaaatatctaaatatgtttccacgccaatccaagcaatagttttcgcggtatttaatcagttgatcatacaccatcgaaccaccctcgtttaaattgcgtatatatttacactgctcattgaagaattagctaagttgtatgcaccataagtcgtagatgaactaccaatgcaattattcatatagagacgaaaattcactagacattaacattcgcagaagttcggtgtgcgcagctactcggccaagagcaccatcgaggacatcaagttccgcgtgctaaaggttgtctccgcctacgacaaagtgaccgccgaaaaggtaaagtacccattgcatggcgccactaatccggtctttgtttccttcctttttttctcgggccggccaaaaaccaggagtgccgtggtcgctggcaaacgcaattggtgcgcagatactcggcgaaaccgccgctctcgctgaagctgatcaatgagcgcgtcttgcttgtgctcaagctctacgacaagatcgatcccagcaaggtaaacgccacatattgcctttgccagtgcaatggtcgcctcagaaatcagaactgaacaaagctgatgaaacctttgaatacccaatgctaatggctcgcatttacagctcaacgttgagtcgcacttcatcaacgacttgggactggattccttggaccacgtggaggtcatcatggccatggaggacgagttcggtttcgagatccccgactctgatgccgagaagctgcttaaacctgccgacattattaagtacgtcgccgacaaggaggatgtgtacgagtaaattgtaattgtaatgcaagccattgaacggattacacttaaatttaaatagaaaacaagtcaaatacaatttgatcaactgaataaaccaaacgttaaattaacttgtagtcagcaattgtacacgagggctataattaactgcggaatagcagctaataaattaactatccaaataaataaacgagtcatttagtactggcggttaaatttaaatttcgatagaaacgttggtctttcgattgttttagaaagccttgtgtattttagatacgcagcgacggtcacgttaatctgctagcattacaaacagaatattcgaaatgtcagacgctgtggacaaaatgttggcgggaatgggtaaatatatctttaaaccaccgacacgcgttctattccgtgcttccaatttcagcggccaatcggcagaccatgaaccgccagctggctaagatagacgagataatggagcggtcgaacaacacattgctccacatcgagtccaacagcaaggcattcagtcagaatgtggctttgtcggagacccagaagatgtacaacctcaggccggaggctgagatgaccctgtccaagatcctggagaacttcaagctgctcatgtctagcagtgaccagcgggaggagacatacagcgctctggagggctgcctggcctacaggcatcgcgtggagcaccttggcagctccgtgcgtaagctggtggcgctctacgacaccgtgggccagatgaagaactcacaggaagagcagtatgccagcgaggattccccctagctcatccatttttagaatttattattatgttatagttgaaaaataatttaaataaattaaacatttgatttgtatttaaagctctttaagcgaggttttcaaatcatggccatattgtagctgctgacttggagaagcgtataggtaagcacctctacgaacatctccaggcgagcggcaagactcccggtggcgagtatctcattgggattgggcagctggaggctgttggagcgcaggtagttgagctgttccatattggcggctatggtcagaagcttctcctgctgctcggatgtaaaagcatctggcggagactcaccgccggttggcatgagcttttccagctgctgcgcaaatccatggagctgcgtcagcttctgcttgta

SEQ ID NO: 4631 - DNA, 663 bp, DROSOPHILA
cttgctccagcacttttacataatcttgaaaactcagcgagaaccgagatgtcgttcacacagatcgcgcgcagctgcagtcgactggcggccactttggccccaaggagggtcgcctccggcattctcatccaatcacaggcctccaggatgatgcacaggatcgccgtgccatcgatgaccagccagttgagccaaaagttcggtgtgcgcagctactcggccaagagcaccatcgaggacatcaagttccgcgtgctaaaggttgtctccgcctacgacaaagtgaccgccgaaaagctcaacgttgagtcgcacttcatcaacgacttgggactggattccttggaccacgtggaggtcatcatggccatggaggacgagttcggtttcgagatccccgactctgatgccgagaagctgcttaaacctgccgacattattaagtacgtcgccgacaaggaggatgtgtacgagtaaattgtaattgtaatgcaagccattgaacggattacacttaaatttaaatagaaaacaagtcaaatacaatttgatcaactgaataaaccaaacgttaaattaacttgtagtcagcaattgtacacgagggctataattaactgcggaatagcagctaataaattaactatccaaataaataaa

SEQ ID NO: 4632 - protein, 143 aa, DROSOPHILA
MSFTQIARSCSRLAATLAPRRVASGILIQSQASRMMHRIAVPSMTSQLSQKFGVRSYSAKSTIEDIKFRVLKVVSAYDKVTAEKLNVESHFINDLGLDSLDHVEVIMAMEDEFGFEIPDSDAEKLLKPADIIKYVADKEDVYE

SEQ ID NO: 4633 - DNA, 7318 bp, DROSOPHILA
ccacaggtgtagctctgaaataaaaaaaatgtttcaggatattaccaaaaaagctacagctgcaattaaaagcgaatgcatttcgctcagtggaaagtctcactgtgctgctcgttgttctggccttcgtttttataggaaaatatgcagtgaaaaacgacttcatatcagaatgcaaccatatccacagttctaaaatttgaaaaacgggaaagtttagataatggaaaaaaccatggcatctcattattgtacttattgtatatctcaaataaaacacaaagctcttaaaagaaaggagaaagtcttgatatcttaataaactattgcgggtttatgcgggttatgttatttacgaagataagagtatcgttgagtttattaggaaaacagttgtaataagggttcggaaaactttttaaattttattattattattattattaaatttaaaggtaggcacaaaccaatttcatatttcaatcttaatttcaatacgtgaatattaaatacttaagctgttaatacataccgtatcattttaaatgaaaatttgatttttaaacaaaactataaaataaatatgcagtgtcgatcccagtgactaatcaaattcctccaaaatcgttttcaacttcttccaaacgatattctccaggagttttctttcggagttaacccaacataggaccacattgtattcgatgtggcaatgcccccgaagtgaagatccgttcagtcgtgtcgttcggctgaaagccctattttaattcaatcctttttcacttccccagaatgcccggcactgagttggagaaactgccaggatgcaggactcctgtataatccagaatatatgttgggttgaaacatgtttcgagtttttataatcagagcaagccaaagatcaattggaacataaaggtatatataatttatctgacagttcgtcgatttcttcagtaaaaagtagcagagtatttaaaaagattcaattacaatgaccaacgacagaaaagaagatgaaataaagcgcgacaagaggaaacgattggaggacctcttgaagcgcacttaccgccagaaggtgaggatcattcgcggactgactgtccgacaggcgagtgccacggatctcgacctgtgcgccaagtggttgaaggtgttcagacgggccaccaaggaggaacgctgggcgaaggattacctcgtggaactaattctgcgccagctgcagaacacaggccacttgtcgctgcccttcaccaacctggccaatcgcagactggatctgcgcctgctcctggacgaggaggggcgtcaacggctgcgtcacttcagttcgcggcaggtggtggccccgaagccgtcgagcaacagtctggccaggagggtgctcaagtcgtcttcgttcgagtggaggcgcagggtgcgtcacctggaccatctggaagaccagtatcggcgcgaggagcaggaaatgtggagccaacagcagctaccctcgaagggtcttaggccggagccgccgccgccgacacaaacgccaccgtccccgccgcgcaaagtgtccagacatcggaaacgcgtcaagacggtcggcgttcaggcgggtgtcccggtgatcacgccacagactgaacgtgatctctgcgagcgtgagcaaaaacagcgcgagatcttgaaacggcgggaacgggatcgcatgcagcggcagctcagggagcaggaccgggaacggcagaggactctgctggccgagcagcataggctggacaggcaaagtctgaaaagggcgcgtcaactgcgtgaccgacgtttgcgggagcagcagctgaaagtcaaggagcagcgtgaccacgagcgccatatgttgttgaaaaggagagaggagcggcgccatcaggagcagcgttcatggccacaacgacgtcccactataccttcatcccagaatgtggaaattcagcagagagcgagtctggagccgcaaaaaaacacccaaacggccaagaccgtgccagtcgatagcgacactacccgaagtgcaagacgtattcagcagttgcacctcagggcggaaaacatcagacgcaaagttctggcctatgagcagctcaagaaataccatcgggagagagcgcaagcagagcgggagcggcttgatcgcaaggagtacccagacacagagacggatagtcgaaagcagaagcccgaaaaatccaggaatccacggattaatgtaacagaaagaaaacggatcaaacaaaatgcgcagaaagaatgcgaaactgaacaaaaagaagacccaataatagcagaaaccgatcataaggatgaattctgtggaagaaggcaagttgatgaacaggaaaaggataaaattgaaagacggaatcagaagtatagggaaaaacttgaaagagagcggcaacgggaggctaaaatccttaaagagcgccaggaaagagcagagtttgaaaggaatgttttggaaaaatttgaagccgaacaaagaaagcgggaagaattcgaaagaaatagacaagaggagcttttgattctcaaagaacgtcaggaaaaagaagaatttgaacgaagagaattggaaaaaaaattagaagccgatcgaaaacaaaaggaagaattggaaagactgcaagaagaagagcttagactccgagataaagaatttgaaaaaaaaattttcgaaaaactagaagccgatcgaaaaataagggaggaattcgaaagacaaaggcaggaggaactgaaaaatcttagggtacgccaggagaaagaagagtctgaaagaaaagaattagagaagaagctggaagctgagcaaaaacagatggaagtcctgaaaaaattgcgtgaagaggatttaaagtgtctcaaatcactccaaagcaaagaagaactagaagccgaacgaaaggagagggaagcattcgaaagaaaaacctgcgaagaacgtggaagagcggagaaaaaaattgaagaacttgaaagaaaatcaaaggacttacaagaaggagaagcagatgtgagcggggaactcgataaaagagatcaagaggagtacgaaagattcgccagagaagaagaaagcaatgcagaaaaaagacttttggaaaatcttatgcgcagcaaggaggaaattgaagcacgggagagaaagataattgaagatgatctgcaaagagaacagctccttagaaagttgcttcaaaagcaagcgcaagaggaaaacagggaaagagaagaacgcgagaaacgtgaaaagaaaattaaggagggcataactgcagagggtaacaagcgcagggaaaaagaggaggctgagagaaagcattgggagaaacttgatcgattacaaagggagagacaggaaatgaaacacctaaataaaaagcggccgaaaaaggttaaagtcgacgggcaaaatgccattgggaaacaagacgaagaggagctttttaccagacgttgcccagaaagcccgaaccaggagaagatgtatagggatttaagaatgcaagagattaccctgagtgaaaaaacggagctgaagctgcaatgcgaggcaagaaaggtggcgaagcggcttcagcggcacctgttaggtcgacttggaatgcacggagaaggagaggttcatttgggccagaaaaattatccacagaaagtggcaagcgagagaaaagcaaatagccagacggagaattggtctgtgaagaatctctccggagacatgatgaaagtggggctaactggcaaggatgtgtcgaacgttcgacgaagttttcagcaactagatcgatatgagaatgccaaagtccgcttgaaaaagctccatgaaaggaatagcaggatttttgaagaggtgcagaagtttcaggtgctcgataaactgcgcttggaagcaggagaactggaagctcaaaaatctttgaacaagcgtttcgagctaagatcttcaaaggcgcgcccgtcacagaaaaatgcagagagaccaatcagttccagtcaagagtactttcagccaggatccctgcatactcgcagcgagcgatgggatcgctttattgggagtgacgaggaatccggaatggaggatcctcaaaatcggggtcgcaacagcgccatcctctctagcagcgaaagcgacccggttccggaaccccgttacacccttgaaggcaagtactgtccgttcaagaaaacatacgcggtggagccccaaaatgctcaacacatcccacatgaagaatcagagcagggagaagattgtcggaagacaccaccaccaagttcacactctactgaggaggcagaatcggacgaggaacgagcacgaggtggcggtggcaatccaagtggcattggcatgacttactgcacacgaacaggaaagaagcgtttttcgcagatcaaacaatgcgagattgaccacgattctggcgggctaaatgaggatcgggtgtttttcggacaccttctcacgcaggctcggacattcgattgcagtccggatatattgcgcgcggagaaccgtcttctgaagaaaaaactggctagagctaaaaacaaatatctgcagttgtcagttctgcgaatgtccaagtatctcatgagtgtgttcgagaataacgaagctatcgagagttccgaggaagagaatgaatctctggaaaatgtagagctcgagcagatctatctgcaagagaccgatagcactatgctatttcccaggccaatctttaagactctgatgttaactgtggttacatccaacgagtccatttctcctgacctcgcgtacaaaattaccaatttggaagatgagctgaaggctcacctcaagaagatttctagacgcgcttttgcacaacgaggtgcaggagctctgaggcggagagccaagtacttgatggaccagcagcgtcaactacaaagtcgccaactgtccgaggtatgtcgcaattccgaggagcagactttaaggctgtgggatcgactgaccagcagcagtgactccttgcgagggatcagggatctctttcgcgatcattgcgacctgcgagacccattgttgtgcgccgcactccaaagcatcgagcgtctctacagggagtggaaggatcagcggtttagcgtgaattggaaacaaaattgatttaattttcctttttttttaatggcttcatttttcgttccttttgaaattcgatcttaccagctattttaattacattaagggctagcctaattaaattgtgtacatacatagttatttgcgtggggtagagtggaaaaggtttggttgattgaacacagcactccaaaattcaaaaactattttccaccgacacattttgaaaattccaaccgctagagagagagcttttcgataagcttttccgccacagctgatgtggaaaagctatcacttgccagctggaactgcgcttcttcttagatgtctgtctatcgtttccagtgatcgaacttcgcttagcgtaaaagaaacaccccacgatgtcatccttcaaggacaaagtgattattgttaccggcgccagctccggcatcggagcaagtgccgccgtccatttggcgaaactcggagggctcctggtcatcgtgggtcgcaacgaggagaagctgaaggagacggccgacaacattgtggcggccggaggagcaacgccattggaactgcaggcggacatgaccaaggaggcggaggtgcagcagattgtgggcgccactctggccaagcacggtcgcatcgatgtgctcgttaacaatgcgggcatcctggagacaggctccatcgaagccaccagcctggagcaattcgatcgtctgatgaacaccaatgtgcgttccctgtaccaactaaccatgctggccactccagagctagtcaagaccaagggcaatatcgtaaacgtatccagtgtctgtggactgcgtgcctttcctggtgtcctggcctacaatgtgtctaaggcagcggtggaccagttcacggcctgcatagccctggaactggcccccaaaggagtccgcgtaaacgccgtgaatcccggcgtgattgtgactgacattcacaagcgtggcggcatggacgaggagacctatgccaagttcctcgaacactgcaagataacccacgccttgggccgtcctggcgatgtcaaggaggtggctgccgccattgccttcctggccagcgatcaggccagcttcaccacgggaatcagtctgcccgtcgatggaggtcgtcacgccatgtgcccgcgataggatgcggatgagcaaatggtggcatttatcgaatttagcgtcattttcagtagttaatttaaagaacacgactaaaatacaacacaatacattaaaagtgcgcagttaagatttcttggatttttcctctcataataaactaatatattgataaaatatctataatctattattatcttcttctgggatcccaaatagctgattatattgtcaaaaactctcacaacctctctgtctaaagaggtgaccacttaaaattaaaaactgatcatacatacattcaactatttattaatatacatacatacatacatatgtatatgcatagtagttggataaaataacaaattaacagttaattaaatttaattgaatttcacaaccactggaaatgtgtagcttggaaggttccagcctatcgatagcgtaatcggattgcagcccgggaattgttgacttctgggtcgggtcttcaatgtcaccaatcactatcagttaaaccgtcgagtggatcacttcaacatgcccagtttcaaggataaagttataatcgtgaccggagccagttcgggaattggagcgggtacttcggtgctcttggctaaactgggaggcctgctcaccatcgtgggcaggaatttggataagctcaacgagaccgcggagcagatagtggcagctggaggagcgccagcactccaggtggcggcggacataaacagcgagtccgacgtccagggcatcgtctccgccacattggccaagcacggtcgcatcgacgtgctggtgaacaacgccggaatcttggagctaggcagcatcgagaacaccagtctggagcagtttgaccgcgttatgaacaccaacgtccggtcgctctaccagctgacccacctggtcacaccggagctaatcaagaccaagggcaacattgtaaacgtgtctagtgtgaacggcatccgttcctttcccggagtcttagcatacaatgtttccaagg

SEQ ID NO: 4634 - DNA, 4920 bp, DROSOPHILA
atgaccaacgacagaaaagaagatgaaataaagcgcgacaagaggaaacgattggaggacctcttgaagcgcacttaccgccagaaggtgaggatcattcgcggactgactgtccgacaggcgagtgccacggatctcgacctgtgcgccaagtggttgaaggtgttcagacgggccaccaaggaggaacgctgggcgaaggattacctcgtggaactaattctgcgccagctgcagaacacaggccacttgtcgctgcccttcaccaacctggccaatcgcagactggatctgcgcctgctcctggacgaggaggggcgtcaacggctgcgtcacttcagttcgcggcaggtggtggccccgaagccgtcgagcaacagtctggccaggagggtgctcaagtcgtcttcgttcgagtggaggcgcagggtgcgtcacctggaccatctggaagaccagtatcggcgcgaggagcaggaaatgtggagccaacagcagctaccctcgaagggtcttaggccggagccgccgccgccgacacaaacgccaccgtccccgccgcgcaaagtgtccagacatcggaaacgcgtcaagacggtcggcgttcaggcgggtgtcccggtgatcacgccacagactgaacgtgatctctgcgagcgtgagcaaaaacagcgcgagatcttgaaacggcgggaacgggatcgcatgcagcggcagctcagggagcaggaccgggaacggcagaggactctgctggccgagcagcataggctggacaggcaaagtctgaaaagggcgcgtcaactgcgtgaccgacgtttgcgggagcagcagctgaaagtcaaggagcagcgtgaccacgagcgccatatgttgttgaaaaggagagaggagcggcgccatcaggagcagcgttcatggccacaacgacgtcccactataccttcatcccagaatgtggaaattcagcagagagcgagtctggagccgcaaaaaaacacccaaacggccaagaccgtgccagtcgatagcgacactacccgaagtgcaagacgtattcagcagttgcacctcagggcggaaaacatcagacgcaaagttctggcctatgagcagctcaagaaataccatcgggagagagcgcaagcagagcgggagcggcttgatcgcaaggagtacccagacacagagacggatagtcgaaagcagaagcccgaaaaatccaggaatccacggattaatgtaacagaaagaaaacggatcaaacaaaatgcgcagaaagaatgcgaaactgaacaaaaagaagacccaataatagcagaaaccgatcataaggatgaattctgtggaagaaggcaagttgatgaacaggaaaaggataaaattgaaagacggaatcagaagtatagggaaaaacttgaaagagagcggcaacgggaggctaaaatccttaaagagcgccaggaaagagcagagtttgaaaggaatgttttggaaaaatttgaagccgaacaaagaaagcgggaagaattcgaaagaaatagacaagaggagcttttgattctcaaagaacgtcaggaaaaagaagaatttgaacgaagagaattggaaaaaaaattagaagccgatcgaaaacaaaaggaagaattggaaagactgcaagaagaagagcttagactccgagataaagaatttgaaaaaaaaattttcgaaaaactagaagccgatcgaaaaataagggaggaattcgaaagacaaaggcaggaggaactgaaaaatcttagggtacgccaggagaaagaagagtctgaaagaaaagaattagagaagaagctggaagctgagcaaaaacagatggaagtcctgaaaaaattgcgtgaagaggatttaaagtgtctcaaatcactccaaagcaaagaagaactagaagccgaacgaaaggagagggaagcattcgaaagaaaaacctgcgaagaacgtggaagagcggagaaaaaaattgaagaacttgaaagaaaatcaaaggacttacaagaaggagaagcagatgtgagcggggaactcgataaaagagatcaagaggagtacgaaagattcgccagagaagaagaaagcaatgcagaaaaaagacttttggaaaatcttatgcgcagcaaggaggaaattgaagcacgggagagaaagataattgaagatgatctgcaaagagaacagctccttagaaagttgcttcaaaagcaagcgcaagaggaaaacagggaaagagaagaacgcgagaaacgtgaaaagaaaattaaggagggcataactgcagagggtaacaagcgcagggaaaaagaggaggctgagagaaagcattgggagaaacttgatcgattacaaagggagagacaggaaatgaaacacctaaataaaaagcggccgaaaaaggttaaagtcgacgggcaaaatgccattgggaaacaagacgaagaggagctttttaccagacgttgcccagaaagcccgaaccaggagaagatgtatagggatttaagaatgcaagagattaccctgagtgaaaaaacggagctgaagctgcaatgcgaggcaagaaaggtggcgaagcggcttcagcggcacctgttaggtcgacttggaatgcacggagaaggagaggttcatttgggccagaaaaattatccacagaaagtggcaagcgagagaaaagcaaatagccagacggagaattggtctgtgaagaatctctccggagacatgatgaaagtggggctaactggcaaggatgtgtcgaacgttcgacgaagttttcagcaactagatcgatatgagaatgccaaagtccgcttgaaaaagctccatgaaaggaatagcaggatttttgaagaggtgcagaagtttcaggtgctcgataaactgcgcttggaagcaggagaactggaagctcaaaaatctttgaacaagcgtttcgagctaagatcttcaaaggcgcgcccgtcacagaaaaatgcagagagaccaatcagttccagtcaagagtactttcagccaggatccctgcatactcgcagcgagcgatgggatcgctttattgggagtgacgaggaatccggaatggaggatcctcaaaatcggggtcgcaacagcgccatcctctctagcagcgaaagcgacccggttccggaaccccgttacacccttgaaggcaagtactgtccgttcaagaaaacatacgcggtggagccccaaaatgctcaacacatcccacatgaagaatcagagcagggagaagattgtcggaagacaccaccaccaagttcacactctactgaggaggcagaatcggacgaggaacgagcacgaggtggcggtggcaatccaagtggcattggcatgacttactgcacacgaacaggaaagaagcgtttttcgcagatcaaacaatgcgagattgaccacgattctggcgggctaaatgaggatcgggtgtttttcggacaccttctcacgcaggctcggacattcgattgcagtccggatatattgcgcgcggagaaccgtcttctgaagaaaaaactggctagagctaaaaacaaatatctgcagttgtcagttctgcgaatgtccaagtatctcatgagtgtgttcgagaataacgaagctatcgagagttccgaggaagagaatgaatctctggaaaatgtagagctcgagcagatctatctgcaagagaccgatagcactatgctatttcccaggccaatctttaagactctgatgttaactgtggttacatccaacgagtccatttctcctgacctcgcgtacaaaattaccaatttggaagatgagctgaaggctcacctcaagaagatttctagacgcgcttttgcacaacgaggtgcaggagctctgaggcggagagccaagtacttgatggaccagcagcgtcaactacaaagtcgccaactgtccgaggtatgtcgcaattccgaggagcagactttaaggctgtgggatcgactgaccagcagcagtgactccttgcgagggatcagggatctctttcgcgatcattgcgacctgcgagacccattgttgtgcgccgcactccaaagcatcgagcgtctctacagggagtggaaggatcagcggtttagcgacaaagtgattattgttaccggcgccagctccggcatcggagcaagtgccgccgtccatttggcgaaactcggagggctcctggtcatcgtgggtcgcaacgaggagaagctgaaggagacggccgacaacattgtggcggccggaggagcaacgccattggaactgcaggcggacatgaccaaggaggcggaggtgcagcagattgtgggcgccactctggccaagcacggtcgcatcgatgtgctcgttaacaatgcgggcatcctggagacaggctccatcgaagccaccagcctggagcaattcgatcgtctgatgaacaccaatgtgcgttccctgtaccaactaaccatgctggccactccagagctagtcaagaccaagggcaatatcgtaaacgtatccagtgtctgtggactgcgtgcctttcctggtgtcctggcctacaatgtgtctaaggcagcggtggaccagttcacggcctgcatagccctggaactggcccccaaaggagtccgcgtaaacgccgtgaatcccggcgtgattgtgactgacattcacaagcgtggcggcatggacgaggagacctatgccaagttcctcgaacactgcaagataacccacgccttgggccgtcctggcgatgtcaaggaggtggctgccgccattgccttcctggccagcgatcaggccagcttcaccacgggaatcagtctgcccgtcgatggaggtcgtcacgccatgtgcccgcgatag

SEQ ID NO: 4635 - protein, 1639 aa, DROSOPHILA
MTNDRKEDEIKRDKRKRLEDLLKRTYRQKVRIIRGLTVRQASATDLDLCAKWLKVFRRATKEERWAKDYLVELILRQLQNTGHLSLPFTNLANRRLDLRLLLDEEGRQRLRHFSSRQVVAPKPSSNSLARRVLKSSSFEWRRRVRHLDHLEDQYRREEQEMWSQQQLPSKGLRPEPPPPTQTPPSPPRKVSRHRKRVKTVGVQAGVPVITPQTERDLCEREQKQREILKRRERDRMQRQLREQDRERQRTLLAEQHRLDRQSLKRARQLRDRRLREQQLKVKEQRDHERHMLLKRREERRHQEQRSWPQRRPTIPSSQNVEIQQRASLEPQKNTQTAKTVPVDSDTTRSARRIQQLHLRAENIRRKVLAYEQLKKYHRERAQAERERLDRKEYPDTETDSRKQKPEKSRNPRINVTERKRIKQNAQKECETEQKEDPIIAETDHKDEFCGRRQVDEQEKDKIERRNQKYREKLERERQREAKILKERQERAEFERNVLEKFEAEQRKREEFERNRQEELLILKERQEKEEFERRELEKKLEADRKQKEELERLQEEELRLRDKEFEKKIFEKLEADRKIREEFERQRQEELKNLRVRQEKEESERKELEKKLEAEQKQMEVLKKLREEDLKCLKSLQSKEELEAERKEREAFERKTCEERGRAEKKIEELERKSKDLQEGEADVSGELDKRDQEEYERFAREEESNAEKRLLENLMRSKEEIEARERKIIEDDLQREQLLRKLLQKQAQEENREREEREKREKKIKEGITAEGNKRREKEEAERKHWEKLDRLQRERQEMKHLNKKRPKKVKVDGQNAIGKQDEEELFTRRCPESPNQEKMYRDLRMQEITLSEKTELKLQCEARKVAKRLQRHLLGRLGMHGEGEVHLGQKNYPQKVASERKANSQTENWSVKNLSGDMMKVGLTGKDVSNVRRSFQQLDRYENAKVRLKKLHERNSRIFEEVQKFQVLDKLRLEAGELEAQKSLNKRFELRSSKARPSQKNAERPISSSQEYFQPGSLHTRSERWDRFIGSDEESGMEDPQNRGRNSAILSSSESDPVPEPRYTLEGKYCPFKKTYAVEPQNAQHIPHEESEQGEDCRKTPPPSSHSTEEAESDEERARGGGGNPSGIGMTYCTRTGKKRFSQIKQCEIDHDSGGLNEDRVFFGHLLTQARTFDCSPDILRAENRLLKKKLARAKNKYLQLSVLRMSKYLMSVFENNEAIESSEEENESLENVELEQIYLQETDSTMLFPRPIFKTLMLTVVTSNESISPDLAYKITNLEDELKAHLKKISRRAFAQRGAGALRRRAKYLMDQQRQLQSRQLSEVCRNSEEQTLRLWDRLTSSSDSLRGIRDLFRDHCDLRDPLLCAALQSIERLYREWKDQRFSDKVIIVTGASSGIGASAAVHLAKLGGLLVIVGRNEEKLKETADNIVAAGGATPLELQADMTKEAEVQQIVGATLAKHGRIDVLVNNAGILETGSIEATSLEQFDRLMNTNVRSLYQLTMLATPELVKTKGNIVNVSSVCGLRAFPGVLAYNVSKAAVDQFTACIALELAPKGVRVNAVNPGVIVTDIHKRGGMDEETYAKFLEHCKITHALGRPGDVKEVAAAIAFLASDQASFTTGISLPVDGGRHAMCPR

SEQ ID NO: 4636 - DNA, 3319 bp, DROSOPHILA
ctccattgtggacagaaattcgtaagttgcacatcggttatcccagtggttttctcttgactaagtgttgcattcgtttccaggttggagcacaacgtagtcaagggcaagggcggcgtcatcgacatccaaaccggcgccgagcccggagtggttcgtgataagggccatctagttatcgtaagtagtgcgagctccagctcctcatgaggaaacgcccattatcgtgctgacctcacacaccaaatatttcttttcagattggaacgcaataaggaatttactatgactttcttcagaaaagtggctttaaatcaaacgaccttgttttgttatattcgtgtaatttatagtgtaactatgtatttttgttactgcagcacctgagagttgtgtattcggattttatatgactaatgttccaactaaatgtatattgtttaaaaatacatataaatatattacaatttgtatatgaattgggttcttatcactaacttgtggtttttcaaagaggaaacgtggcaatttttctagtctcttatatcgtttctttcaaaaagaaccgcccactcgattggcaaaagcagcagtcgataactttgctttgaaacgtcagttcggtgctccagactttaaaaatctcgttaaagtcgtgcccaactcacaaaagaagatttcagctaacgttactactgaaattcatgtgaattaatataccactaacaattatttaactgtaaattatagttgggaaagttacttactcattattcaagtattaagtatttttagtatttatttgcgtaagttgagaaacagcttagtacattgcgcatacggtcacactgctaccttgctgtctttttcttgctccagcacttttacataatcttgaaaactcagcgtaaatatcgcccaaaatacgagacctgcactcgtgcaccgtctgcagagatgcgatactaacccgctgcgtttccgttgcaggagaaccgagatgtcgttcacacagatcgcgcgcagctgcagtcgactggcggccactttggccccaaggagggtcgcctccggcattctcatccaatcacaggcctccaggatgatgcacaggatcgccgtgccatcgatgaccagccagttgagccaagtaagcgaacgtccaaagcggtcccttccgttgcaggagccccaatcgcagttgaggacctaacctcatcgcaaacggcggggtttcgtgatctacgagtttcaaaacattcaattaagtgcttgcaatcatgaacgcaacagaagatcctcgccatgtggccgtcgaaccacccaattcgattgcatcacattattttgcataaaacatgattgtttccctatcgcacacacacacacatacacctgcaacaccggtgctcgcacttgtgtgcggttgattgtactacagtgaaaatcctctagaagtgaccttaaaatgtagcggttttaaaacatgtgatttcagtttgttaaatatctaaatatgtttccacgccaatccaagcaatagttttcgcggtatttaatcagttgatcatacaccatcgaaccaccctcgtttaaattgcgtatatatttacactgctcattgaagaattagctaagttgtatgcaccataagtcgtagatgaactaccaatgcaattattcatatagagacgaaaattcactagacattaacattcgcagaagttcggtgtgcgcagctactcggccaagagcaccatcgaggacatcaagttccgcgtgctaaaggttgtctccgcctacgacaaagtgaccgccgaaaaggtaaagtacccattgcatggcgccactaatccggtctttgtttccttcctttttttctcgggccggccaaaaaccaggagtgccgtggtcgctggcaaacgcaattggtgcgcagatactcggcgaaaccgccgctctcgctgaagctgatcaatgagcgcgtcttgcttgtgctcaagctctacgacaagatcgatcccagcaaggtaaacgccacatattgcctttgccagtgcaatggtcgcctcagaaatcagaactgaacaaagctgatgaaacctttgaatacccaatgctaatggctcgcatttacagctcaacgttgagtcgcacttcatcaacgacttgggactggattccttggaccacgtggaggtcatcatggccatggaggacgagttcggtttcgagatccccgactctgatgccgagaagctgcttaaacctgccgacattattaagtacgtcgccgacaaggaggatgtgtacgagtaaattgtaattgtaatgcaagccattgaacggattacacttaaatttaaatagaaaacaagtcaaatacaatttgatcaactgaataaaccaaacgttaaattaacttgtagtcagcaattgtacacgagggctataattaactgcggaatagcagctaataaattaactatccaaataaataaacgagtcatttagtactggcggttaaatttaaatttcgatagaaacgttggtctttcgattgttttagaaagccttgtgtattttagatacgcagcgacggtcacgttaatctgctagcattacaaacagaatattcgaaatgtcagacgctgtggacaaaatgttggcgggaatgggtaaatatatctttaaaccaccgacacgcgttctattccgtgcttccaatttcagcggccaatcggcagaccatgaaccgccagctggctaagatagacgagataatggagcggtcgaacaacacattgctccacatcgagtccaacagcaaggcattcagtcagaatgtggctttgtcggagacccagaagatgtacaacctcaggccggaggctgagatgaccctgtccaagatcctggagaacttcaagctgctcatgtctagcagtgaccagcgggaggagacatacagcgctctggagggctgcctggcctacaggcatcgcgtggagcaccttggcagctccgtgcgtaagctggtggcgctctacgacaccgtgggccagatgaagaactcacaggaagagcagtatgccagcgaggattccccctagctcatccatttttagaatttattattatgttatagttgaaaaataatttaaataaattaaacatttgatttgtatttaaagctctttaagcgaggttttcaaatcatggccatattgtagctgctgacttggagaagcgtataggtaagcacctctacgaacatctccaggcgagcggcaagactcccggtggcgagtatctcatt

SEQ ID NO: 4637 - DNA, 459 bp, DROSOPHILA
atgtcgttcacacagatcgcgcgcagctgcagtcgactggcggccactttggccccaaggagggtcgcctccggcattctcatccaatcacaggcctccaggatgatgcacaggatcgccgtgccatcgatgaccagccagttgagccaagagtgccgtggtcgctggcaaacgcaattggtgcgcagatactcggcgaaaccgccgctctcgctgaagctgatcaatgagcgcgtcttgcttgtgctcaagctctacgacaagatcgatcccagcaagctcaacgttgagtcgcacttcatcaacgacttgggactggattccttggaccacgtggaggtcatcatggccatggaggacgagttcggtttcgagatccccgactctgatgccgagaagctgcttaaacctgccgacattattaagtacgtcgccgacaaggaggatgtgtacgagtaa

SEQ ID NO: 4638 - protein, 152 aa, DROSOPHILA
MSFTQIARSCSRLAATLAPRRVASGILIQSQASRMMHRIAVPSMTSQLSQECRGRWQTQLVRRYSAKPPLSLKLINERVLLVLKLYDKIDPSKLNVESHFINDLGLDSLDHVEVIMAMEDEFGFEIPDSDAEKLLKPADIIKYVADKEDVYE

SEQ ID NO: 4639 - DNA, 2391 bp, DROSOPHILA
ggactaaaagtttattttaatgttattactttcaaaaaaaagaaattttaataaggtttgaactgtctgtagttcatttaaaagcagataacttaaaatgctaaaccaaatacctacattaaaagagtatacatgtttaaaaaacaaacaagagagaatgctatagtcgggttttcctacggttacggatatcgacagatattgcaaaataaaatgagaaaaaatttaaaaaaattttaaaagtgtgggcgtgttagttttcaactttagaacctgaatgcctaatctcaaccttctagcttttatagttcctgaggtcgagacgttcatacggagagacggacatgaccaaattgactcggctattgatcctgataaagaatatatatactttatatggtcggaaacgcttccttctgcctgttacatacttttcaacgaatctagtatacccttttagtctacgagtaaggggtataaaaaaataaaaagctaaaacggagtgacttaaatagagtagaaaagttgctagaaacgtagagtcggcttaagacacccattcctgggagatggagatatggccaatatgttttaagcatatcggttgctttaaaacaatgttttaaaataatttccgatacgtgggcttcaccagaaactcgtttaacgtagggaaatattttgtcttgcccaaagtcaaatcgtctgtgtatccaaataactacaaaatttaaagattatactattcacaaataaagcacgaaaagatgagtttaagcccatatatcgtcttttagatcaatgttcattacaatcattattgtcattttataagtcacatacatttcattccttcgtgttatgaaagacgaatggtacggttattgagctacacgacctaagcgttcttttttgatattacaccagagcgctgaaagcgtggtaccacaaaacaacttggatgtaattaataaaaaaaaatagtagtcataaatcttaatgtgacaacattgattgtatttgtagtagcattgagtaaatagtatatttaaatattataaagcgtttacgctgtacatgaaaccagctgccctcaacacaaaacaaataatatagatgcggattaaatcaatagaatccaggacgaaagccatatccaaacgagagttcgccttcgggtggtactatagttacccttctgttgatgtccagcctagaacctcctccaacagatccaccgccaaagacccgcataagttgctcgatagaacaaagagcgctaccagtcattagagtgaatgtaatcattaaaacctgtgaggtagtcatcattaggagtgcgcagttttaattaaccaagttttcttaccaaaattcgaatcatgctgtaaactgaactcaagtgtcttactgaaaatatttcccagttgatagcgaataagtcttgaatcgggcttatatagcaatattttacaattgaaatgcatatttaaaatatgttaaaaggagtcgtaaaaatttgtacccacatagtcaaggttaattcgattttactgaatgcattcatttcattaaccataaattgacaataattttttgaggtggtttagtatgttattgtgaactttataatattgtattatcttaactatatatcgccactatccatatgatatggatatccatatccactatccaaacgagtagatcgatttggcaagacatgagaagcaacttctaggtagataagtagtctctcacaaaccaatttaagaacaagggaaaactttcacataccttttactcagttaatgggaatgcgatgaagacatttaagtgaggaagcgactttttcctagatttgccacgagtgccagagtaatgacgaacagtcgggcgcacagagggatatggccaaatcaactcgcctagtgattacactcaagaatacatgtgcattaatccataatacaaaaatcttatagcaagaaattacgaatttagtagaaatcaaaagacaaaggtttagttgagatccttgactatcatatacccgttactaagatggtggtaatttgagagaactaaaaattcctctgccatatcgatagatagtaacattactagaatctgcatgcttaatctcaaatttttatcttatacagcttcgcatatcactgagattaatcgaatacacagacgggaatgggcagatcaactaggttaggtataggtaatcagctatcccgaggccataagttccaaataaaacaaacgtaagcttgtttattaaaagctcgaatgcattgtttatataccctaaaatactcctttatctttgtcttttaaaaatcgataaaatttatgatagtcccggcgaattttatgaat

SEQ ID NO: 4640 - DNA, 336 bp, DROSOPHILA
ttacagcatgattcgaattttggttttaatgattacattcactctaatgactggtagcgctctttgttctatcgagcaacttatgcgggtctttggcggtggatctgttggaggaggttctaggctggacatcaacagaagggtaactatagtaccacccgaaggcgaactctcgtttggatatggctttcgtcctggattctattgatttaatccgcatctatattatttgttttgtgttgagggcagctggtttcatgtacagcgtaaacgctttataatatttaaatatactatttactcaatgctactacaaatacaatcaatgttgtcaca

SEQ ID NO: 4641 - protein, 59 aa, DROSOPHILA
MITFTLMTGSALCSIEQLMRVFGGGSVGGGSRLDINRRVTIVPPEGELSFGYGFRPGFY

SEQ ID NO: 4642 - DNA, 3146 bp, DROSOPHILA
aatggcttgctgaatccctgacctttccgcgacccctgctcattgcattttgcgggagaggagagccaaaggcgacgaccgattttaaccttgacagctctcccagctttttttaccccacctcacctacgccaactgaggcaatcacacacacacacgctcgcagattatggctatttgttatcaatgcgaattacggcactcgggcgttttagccaacatttcacttaagactgtttgtgcttattttaatcacgtaggccaccgaatttgccaaataaacaaaaaaaaacgcacatacaacgcacacacacagacgcacgggcagctatatgtgcattgttgttggtttttcctgcgagtattctcttttgtaagacgttttagggttgcaacttttaaccctattgactgttttataccctgccttgagctctattacgccccttgtttataaaaaccgcgtaaactgtgcaaaaaaagggaaaaattcttaactcagcactaaaatttctttttgatagcgatgggcgtcgaccgatacttagcgtgcagcgattgacatgtactcgttgtacagcactattaccggcgggcagtaggtatcgatagctgaacgagccaacgttagtggtgattattttatactggcacttatatactaacggtaatcaaagctttttatttcgctatttttatttactagctttaatatttaattgcacaagattcggaaacaaaaagctattgggaaaattaactcaaagcggccattaaccccataagaattactttaatacaacttcagtcgatcgtttatcaattaagcaaggtctctaagaatggcaaatacccttatcgtctattccaatacatttatatatatatattttaaagtcgatagtcgatagcgcgatgtgccatctccattatcaaaactaaacagatgctgggcggaaaatcaactggttcctcgtgataacttaatcccactaataagcgcaatgtcgtccagtgaacgagtggccaaagtggtgctggtggacatcgagggcaccaccacttcgattagctttgtgcacgatgtcctgtttccctacgccaagcagaatgtggaaaagttcctgagggattcgtgggaagaagatgatataaagcgtattgtccaggatctacagcaagtgccccagtatgcggactacaaggccctgttaagtggtccacctacggaagtggatgtagatctgattgcaggctttgtgcgctatttaattgatcaggatctgaaggtcacgccaatgaaaacgctgcagggcttgatttgggcgcagggctacgctaatggagagctgaagggccagtaagttccccattcaatattctcctatcatggccatataagttttacaatctgaactctagaaggttatcaaagaaaaggcttacttaacgtctgttcccaaaaataatttgggtgtctttctgagatccaattatacagcttggtgattttttaaatatgtatgctagctatattctccgcacgggaatgtttaacttttgctgatttcaatagttatcagataacattcaacatagtaaccaaaagtacaacgcaacaactcattattattgataattaattaattatctataaatgttattatagtgtatacgaagacgtccctgcagcttttgaggcttggcgtgctgctggcctccagattgcagtctactccagcggcagtgtggctgcccaaaagctgatattcggtcatagtttggccgggaacctgcagccgtacttgagtgcttatttcgacacccatgtgggccacaaacaggaacagcagtcctataaaaacattgccaagcaattgaaggaggacccgaagcagatactctttctcacggatattccaggaggtgagtggctgatccacacgaatcctcatccgtaacatttttaatgtgaaattatattttagaagcggccgccgctcgctgtgcgggcttgcaagccataattctgaagcgtcctggaaacgccgccctagcagacgatcaaaaaactggattcgagttgattccggactttaaaccacttcacaacctgaaagttccggtcaataaatcccaggcttaggtcattccaaaaaagtatacatatattgtgactatgtgcttgggaattaggtgaatctctagaggaaagctcgatctgcgctgcacaggtcgtcaccgctgtcgtggctgggcgtctcggtcgtgagcccctgcggccgtcgttcggaccgcttgcttcgttgagactgcctcgaacaggacttttctgagccatagaccttacgcagttgctgcagcttagtatccgcatcgggaacaggaaactctgactttttcttcctacgttgccggctcccctcgcacgaatgacgcagttcctcggtccggcaggtgtgggtgagcttgcccacttctggaccccagaacgtgggtccttccagaagaaggggagcggatttgacccgttgacgcatcatctccatatgcagttcgtactgacgctcctgaaaagcctgctctgccttgcgagtggccaaccgaatggatagcagtgccttgtgggattcgctaaagaaagaacactgaatgtgtgcgaaacttaatatttggtgaactactcacttcaaggacagtgatttccaagccggcgttttcctcacctcccaatcgaattgcggacgaggatcatgataagtgcagttgttcttcagctccttaaccttcttcctagatacttcagccctcaaagttgccgctagattaggacgagataccggatgcaacggggacacactgggcgttctcctctggaccggttcctccggcaactcatagatgctcagcggtggtagtggcttctcatcctttacgctagaccctggctttggtttccttactcttccgcgtcttcctcgacctcttgctgcgctggaagcactactacttcgcttcgacgaggtggtgggtgattgaatctgtatcttgggaatttcctcctgcttgctgagtgggaaatagttgcttcgcgcaggctgagctagtttggaaggcttcgaatgagcctctaaggcaatcccttg

SEQ ID NO: 4643 - DNA, 763 bp, DROSOPHILA
cgcaatgtcgtccagtgaacgagtggccaaagtggtgctggtggacatcgagggcaccaccacttcgattagctttgtgcacgatgtcctgtttccctacgccaagcagaatgtggaaaagttcctgagggattcgtgggaagaagatgatataaagcgtattgtccaggatctacagcaagtgccccagtatgcggactacaaggccctgttaagtggtccacctacggaagtggatgtagatctgattgcaggctttgtgcgctatttaattgatcaggatctgaaggtcacgccaatgaaaacgctgcagggcttgatttgggcgcagggctacgctaatggagagctgaaggtatacgaagacgtccctgcagcttttgaggcttggcgtgctgctggcctccagattgcagtctactccagcggcagtgtggctgcccaaaagctgatattcggtcatagtttggccgggaacctgcagccgtacttgagtgcttatttcgacacccatgtgggccacaaacaggaacagcagtcctataaaaacattgccaagcaattgaaggaggacccgaagcagatactctttctcacggatattgaagcggccgccgctcgctgtgcgggcttgcaagccataattctgaagcgtcctggaaacgccgccctagcagacgatcaaaaaactggattcgagttgattccggactttaaaccacttcacaacctgaaagttccggtcaataaatcccaggcttag

SEQ ID NO: 4644 - protein, 252 aa, DROSOPHILA
MSSSERVAKVVLVDIEGTTTSISFVHDVLFPYAKQNVEKFLRDSWEEDDIKRIVQDLQQVPQYADYKALLSGPPTEVDVDLIAGFVRYLIDQDLKVTPMKTLQGLIWAQGYANGELKVYEDVPAAFEAWRAAGLQIAVYSSGSVAAQKLIFGHSLAGNLQPYLSAYFDTHVGHKQEQQSYKNIAKQLKEDPKQILFLTDIEAAAARCAGLQAIILKRPGNAALADDQKTGFELIPDFKPLHNLKVPVNKSQA

SEQ ID NO: 4645 - DNA, 6083 bp, DROSOPHILA
ggtgcattgtgagaaatatgagttcttcgctgcgttctttttttgtaattgcaaaattgctgaaaagaatgtgtcttctactgaggtacagggtacatggttctgaactacacactacacgtatctaagtatctaagtacgtatctgcgaatctggagccgggatgcattgcgactgcataacgacatccgttggcggagcggcagaggcaacgcgagagcaaaagcacatcgcactgcacgtgaatgcagcgtcgcgccgtctcgctctcgctcccgctgcgctgttaattagcacagtgaagcctcgttgcaggcaaccaccgtgtgggcgacattgttctctatctatcgttctgagtctgggccgggcagagagtatacgattcaatcaatggccaccatgcaggtgcaagtcaaggtgacaatttcacaacaatgctccagccaattaggactagaagttatccaagccatgattcatgaacatgaatggcaggcagtcggaacacgtgcaacgcctggtttcccccccatcatccattcgcttggcctagaagatcctagaaagcgttggtggttagctgggcggcacaatactattggcgagcaacgtgaagacggtaacgaagcaacattcggaatttgaattggattctagagaatcgggggggtttgcgcgtcgcagcccggtgccgcaacagatttcgtgattcatttcatcacccggccgaagtgaaactactcacaacgcaatcgactcacgttgatgcaacagcgctgctctgaatgaatccggtgcaaatagaatccgcattgtagtggttggtcattcattcaacggatactcagtagtcacggaatctcctcgaaggaaggacaaacatagatacataggttcatcatagaagtgaaatcagttagttagttatttagttacccccattcaaggtcctatcaaggataactgaagtgctaatggtcatcatacgattttccagaatctcgcactagtcaaccaactgggcaagctggagaacctaagcaccatggagggcggcgagtccacggagtccacacacaacaccaaggtgtccgactcggcctactcgaacagctgcagcaacagccagtcgcagcgcaggtgagtccatttgatgtgctcaatcatgcgagtagtctaaacgatccatcccctttccagtggcagctccaaatcccgcctgagcggcagccactcctccggcagcagtggctatgggggcaagccctcgacgcaggccagcagcagcgacatgatcatcaagcgcaacaaggataagtcgcgcaagaagaagaagaacaagggcgccggccagggggcggggcaggcgcagaccctgatctcggcgtcgacgagcctagagggcagggacgaggagaagccgcggcccagcggcactgggtgcgtagaacagcagatctgccgagagctgcaggatcaacagcacggcgaggatcacagcgagccgcaggccatagagcagctgcagcaggaggaggaggaggatcagtccggctccgagtcggaggcggaccgagtcgagggcgtggccaagtcggaggcggcacagagctttccgattccctcgccgctatccgtcaccattgtcccgccctcgatgggcggctgcggcggagtgggccacgcagccggtctggacagcgggctggccaagttcgacaagacctgggaggcaggtccgggcaagctggagtccatgaccggggtgggcgcagcggcggcgggcacagggcagcgcggggagcgggtgaaggaggacagcttctgctgcgtcatctccatgcacgacggcatcgtcctgtacacgacgcccagcatcaccgatgtcctgggctacccgcgcgacatgtggctgggcaggtccttcatcgattttgtgcaccttaaggaccgcgccaccttcgccagtcagatcaccacgggcatacccattgcggaatccaggggcagcgtgcccaaggacgccaagagcaccttctgcgtgatgctgcgtcgctaccggggactcaagtccggcggattcggcgtcatcggcaggcccgtcagctacgaacccttccgcctggggctcaccttcagggaggctccggaggaggcgcgaccggacaactacatggtctccaatggcaccaacatgctgctcgtcatctgcgccactccgatcaagagcagctacaagggtgagtatctgtgcccgttttggtttcatccagccatctaaccatcgatctctgccccccccagttcccgacgagattctctcacagaagagccccaagttcgccatacgccacacggccaccgggatcatatcgcacgtggacagcgcggcggtcagtgcactgggctatctgccgcaggacctgattggccgcagcatcatggacttctaccaccacgaggacctctcagtcatgaaggagacctacgagacggtaatgaagaagggtcagacggcgggcgcctccttctgcagcaagccataccgcttcctcatccagaacggttgctacgtccttctggagaccgaatggaccagcttcgtcaatccatggtcccgcaagctggaatttgtcgtcggacaccatcgcgtctttcagggtgagttcgcgtgccgacccagtgatccaatgatcctctaaacaggtcatttcaccttccaggacccaagcagtgcaacgtcttcgaggcggcgcccacatgtaagctgaagatatcggaggaggcacagagccggaacacgcgaatcaaggaggatatcgtgaagcgcctggcggagacggtgtcccgtccgtcggacacggtcaagcaggaggtttcccgccgctgccaggcgctggccagcttcatggaaacgctcatggacgaggtgtcccgggcggatctcaagctggagctgccgcacgagaacgagttgaccgtctcggagcgggacagcgtgatgctcggcgagatttcgccgcaccacgactactatgacagtaagagttccaccgagacgccgcccagctacaaccagctaaactataacgagaacctgctgcgttttttcaacagcaagccggtcacggcgccggcggagctcgatccgcccaaaacggagccgccggagccgcgcggcacgtgtgtcagtggcgccagtggtccgatgagtcccgtccacgagggcagcgggggcagtggctcctcgggcaacttcaccaccgccagtaacatacacatgagcagtgtgacaaatacgagcattgccggcactggtggcacgggcactggtacaggtacaggtactggaactggaactggaaccgggacaggaactggaaccgggacaggaactggaacgggaacaggtacaggcacaggcacaggcactggaacaggcaatggaacaaattccggcaccggaaccggcaccgccagctcatccaaaggcggaagcgccgccataccgccagtcacgctgaccgaatccctgctcaataagcacaacgacgagatggagaagttcatgctgaagaagcaccgcgagtcgcgcggacggacgggtgagaagagcaagaagtccgccaatgacacccttaagatgctggagtacagcggtccaggccacgggataaaaagaggaggctcccattcctgggagggagaggccaacaagcccaagcagcagctaaccctgggaacagatgcgatcaagggagcggcaggaagtgcgggcggagcagtcggcactggcggtgtgggatcaggaggagccggtgtggcgggcggaggaggatccggaacaggcgtagcaggcacaccagaaggcagagccacaacgacctcgggaacggggacaccaggtggagccggaggcggaggcggagcaggagcggcagcagcggctggagcgtcctcctccgtgggcagttccacgccaggaccctcgtcctatcccacctgcacgcaaaacataaacctctggccaccgttctcggtgggcatcacaccgcccgttcactccacgcacacggccatggcccagagcagcttctcctccgccggcctcttcccgaccttctactacatccccgcctccttgacgcccaccagtcccacgcgctctccccggatgcacaagcatccgcacaagggtggcacggacatgcccaccacctcgcagcaggcggctgccgcggccgcccaggccatgccgctgcagtacatggccggcgtgatgtacccgcatccttcgcttttctacacacacccggcggcggccgcggccacggccatgatgtaccagccgatgccctttccgggaatggccaacgctctccagattcccgaacgtccgttgggctcccaatccgcgtacaacaagtcggtgtacacggtaagtcagtggccggtggtgcctcaccgaactgtcttaactccaactccaactccatactcgtccatagaccacgccggcgtccatgacgaagaaggtgccgggtgcattccactcggtcaccactcctgcccaggtgcagcgtccctcctcgcagagcgcatccgtcaagacggagccgggctccagtgcagcggtatccgatccctgcaagaaggaggtgccggactcctcgcccattccctccgtgatgggcgactacaactccgacccgccctgcagcagcagcaatcccgccaacaacaaggtatgctatacgaatgaggtccattggtgattggtcattatgaagaacatggtctcatccacagaaatacacggacagcaatgggaatagcgacgacatggatggctccagcttctcctccttctactcgtccttcatcaagaccacggacggatcggagagtccgccggacaccgaaaaggaccccaagcaccgaaagctgaaggtacgtacagttcagtccacgatgcgattcaatgtaatccatttccgttcttttgcagagcatgagcacatctgagagcaagatcatggagcacccggaggaggaccagacacagcacggggatgggtagtagccacacccgcagttgctgctgaccgacgtacacaaccgagtgcacaatgtcgatccctgggatgatccgagcagcagacaccgaggagcagcagggtcctggaaacgagtgagcaattgcctccggtctgggcaccgagtaccagccagtcccaccagttcctattcctaactcccccttccattcccttcaagttcttcgaatcaacgcgaacgcttccgtgggatgtcaccattcagtatccgaacaagtaacgaaagcatcagacgaactgacgtggaaggatgcccagaacccatgcaagccgaggataatgtagatctcaagccaagcaaagcttttagatgatatctatcctatgtttaatcagaatattaagtgaattgaaaactagagagggttcgaacatcgaaccacccttctcagccctaaggtttatatatccgaatcttttttagttatttattgtacaataaatatcgaaaagccaacgccaacacttgtagtagttgttttaatcgaagatggattggatttagctgcaattaggtagtttaatcagtaattagctagagtggctagttagaccggactttgttagatacatatgcgttcattccttttcgaagaactcgtcgtagggaatgttggcccacagactctgtacgatggcactgaaggccttggcgcaggcctcgttgatcttcggctggacatcgagggccagggtgctccactcctggttcagcaccttcagcgtgctgtcgcgcagctccttgttgtcgttgaacagattcgacaggtcaaagtggccactacgagaagaggtttgaggtcaccattcagttggctagacatgcaggccatgctcaccccttgatcttggtggccgtcttgtagtcggtgatgttgagataggtgtggccatcggagcgcttcactggctcggcggtaatccaaacctttgtgtgcacatcgttcaaccgaatggtcaggt

SEQ ID NO: 4646 - DNA, 3705 bp, DROSOPHILA
aatctcgcactagtcaaccaactgggcaagctggagaacctaagcaccatggagggcggcgagtccacggagtccacacacaacaccaaggtgtccgactcggcctactcgaacagctgcagcaacagccagtcgcagcgcagtggcagctccaaatcccgcctgagcggcagccactcctccggcagcagtggctatgggggcaagccctcgacgcaggccagcagcagcgacatgatcatcaagcgcaacaaggataagtcgcgcaagaagaagaagaacaagggcgccggccagggggcggggcaggcgcagaccctgatctcggcgtcgacgagcctagagggcagggacgaggagaagccgcggcccagcggcactgggtgcgtagaacagcagatctgccgagagctgcaggatcaacagcacggcgaggatcacagcgagccgcaggccatagagcagctgcagcaggaggaggaggaggatcagtccggctccgagtcggaggcggaccgagtcgagggcgtggccaagtcggaggcggcacagagctttccgattccctcgccgctatccgtcaccattgtcccgccctcgatgggcggctgcggcggagtgggccacgcagccggtctggacagcgggctggccaagttcgacaagacctgggaggcaggtccgggcaagctggagtccatgaccggggtgggcgcagcggcggcgggcacagggcagcgcggggagcgggtgaaggaggacagcttctgctgcgtcatctccatgcacgacggcatcgtcctgtacacgacgcccagcatcaccgatgtcctgggctacccgcgcgacatgtggctgggcaggtccttcatcgattttgtgcaccttaaggaccgcgccaccttcgccagtcagatcaccacgggcatacccattgcggaatccaggggcagcgtgcccaaggacgccaagagcaccttctgcgtgatgctgcgtcgctaccggggactcaagtccggcggattcggcgtcatcggcaggcccgtcagctacgaacccttccgcctggggctcaccttcagggaggctccggaggaggcgcgaccggacaactacatggtctccaatggcaccaacatgctgctcgtcatctgcgccactccgatcaagagcagctacaaggttcccgacgagattctctcacagaagagccccaagttcgccatacgccacacggccaccgggatcatatcgcacgtggacagcgcggcggtcagtgcactgggctatctgccgcaggacctgattggccgcagcatcatggacttctaccaccacgaggacctctcagtcatgaaggagacctacgagacggtaatgaagaagggtcagacggcgggcgcctccttctgcagcaagccataccgcttcctcatccagaacggttgctacgtccttctggagaccgaatggaccagcttcgtcaatccatggtcccgcaagctggaatttgtcgtcggacaccatcgcgtctttcagggacccaagcagtgcaacgtcttcgaggcggcgcccacatgtaagctgaagatatcggaggaggcacagagccggaacacgcgaatcaaggaggatatcgtgaagcgcctggcggagacggtgtcccgtccgtcggacacggtcaagcaggaggtttcccgccgctgccaggcgctggccagcttcatggaaacgctcatggacgaggtgtcccgggcggatctcaagctggagctgccgcacgagaacgagttgaccgtctcggagcgggacagcgtgatgctcggcgagatttcgccgcaccacgactactatgacagtaagagttccaccgagacgccgcccagctacaaccagctaaactataacgagaacctgctgcgttttttcaacagcaagccggtcacggcgccggcggagctcgatccgcccaaaacggagccgccggagccgcgcggcacgtgtgtcagtggcgccagtggtccgatgagtcccgtccacgagggcagcgggggcagtggctcctcgggcaacttcaccaccgccagtaacatacacatgagcagtgtgacaaatacgagcattgccggcactggtggcacgggcactggtacaggtacaggtactggaactggaactggaaccgggacaggaactggaaccgggacaggaactggaacgggaacaggtacaggcacaggcacaggcactggaacaggcaatggaacaaattccggcaccggaaccggcaccgccagctcatccaaaggcggaagcgccgccataccgccagtcacgctgaccgaatccctgctcaataagcacaacgacgagatggagaagttcatgctgaagaagcaccgcgagtcgcgcggacggacgggtgagaagagcaagaagtccgccaatgacacccttaagatgctggagtacagcggtccaggccacgggataaaaagaggaggctcccattcctgggagggagaggccaacaagcccaagcagcagctaaccctgggaacagatgcgatcaagggagcggcaggaagtgcgggcggagcagtcggcactggcggtgtgggatcaggaggagccggtgtggcgggcggaggaggatccggaacaggcgtagcaggcacaccagaaggcagagccacaacgacctcgggaacggggacaccaggtggagccggaggcggaggcggagcaggagcggcagcagcggctggagcgtcctcctccgtgggcagttccacgccaggaccctcgtcctatcccacctgcacgcaaaacataaacctctggccaccgttctcggtgggcatcacaccgcccgttcactccacgcacacggccatggcccagagcagcttctcctccgccggcctcttcccgaccttctactacatccccgcctccttgacgcccaccagtcccacgcgctctccccggatgcacaagcatccgcacaagggtggcacggacatgcccaccacctcgcagcaggcggctgccgcggccgcccaggccatgccgctgcagtacatggccggcgtgatgtacccgcatccttcgcttttctacacacacccggcggcggccgcggccacggccatgatgtaccagccgatgccctttccgggaatggccaacgctctccagattcccgaacgtccgttgggctcccaatccgcgtacaacaagtcggtgtacacgaccacgccggcgtccatgacgaagaaggtgccgggtgcattccactcggtcaccactcctgcccaggtgcagcgtccctcctcgcagagcgcatccgtcaagacggagccgggctccagtgcagcggtatccgatccctgcaagaaggaggtgccggactcctcgcccattccctccgtgatgggcgactacaactccgacccgccctgcagcagcagcaatcccgccaacaacaagaaatacacggacagcaatgggaatagcgacgacatggatggctccagcttctcctccttctactcgtccttcatcaagaccacggacggatcggagagtccgccggacaccgaaaaggaccccaagcaccgaaagctgaagagcatgagcacatctgagagcaagatcatggagcacccggaggaggaccagacacagcacggggatgggtag

SEQ ID NO: 4647 - protein, 1218 aa, DROSOPHILA
MEGGESTESTHNTKVSDSAYSNSCSNSQSQRSGSSKSRLSGSHSSGSSGYGGKPSTQASSSDMIIKRNKDKSRKKKKNKGAGQGAGQAQTLISASTSLEGRDEEKPRPSGTGCVEQQICRELQDQQHGEDHSEPQAIEQLQQEEEEDQSGSESEADRVEGVAKSEAAQSFPIPSPLSVTIVPPSMGGCGGVGHAAGLDSGLAKFDKTWEAGPGKLESMTGVGAAAAGTGQRGERVKEDSFCCVISMHDGIVLYTTPSITDVLGYPRDMWLGRSFIDFVHLKDRATFASQITTGIPIAESRGSVPKDAKSTFCVMLRRYRGLKSGGFGVIGRPVSYEPFRLGLTFREAPEEARPDNYMVSNGTNMLLVICATPIKSSYKVPDEILSQKSPKFAIRHTATGIISHVDSAAVSALGYLPQDLIGRSIMDFYHHEDLSVMKETYETVMKKGQTAGASFCSKPYRFLIQNGCYVLLETEWTSFVNPWSRKLEFVVGHHRVFQGPKQCNVFEAAPTCKLKISEEAQSRNTRIKEDIVKRLAETVSRPSDTVKQEVSRRCQALASFMETLMDEVSRADLKLELPHENELTVSERDSVMLGEISPHHDYYDSKSSTETPPSYNQLNYNENLLRFFNSKPVTAPAELDPPKTEPPEPRGTCVSGASGPMSPVHEGSGGSGSSGNFTTASNIHMSSVTNTSIAGTGGTGTGTGTGTGTGTGTGTGTGTGTGTGTGTGTGTGTGTGTGNGTNSGTGTGTASSSKGGSAAIPPVTLTESLLNKHNDEMEKFMLKKHRESRGRTGEKSKKSANDTLKMLEYSGPGHGIKRGGSHSWEGEANKPKQQLTLGTDAIKGAAGSAGGAVGTGGVGSGGAGVAGGGGSGTGVAGTPEGRATTTSGTGTPGGAGGGGGAGAAAAAGASSSVGSSTPGPSSYPTCTQNINLWPPFSVGITPPVHSTHTAMAQSSFSSAGLFPTFYYIPASLTPTSPTRSPRMHKHPHKGGTDMPTTSQQAAAAAAQAMPLQYMAGVMYPHPSLFYTHPAAAAATAMMYQPMPFPGMANALQIPERPLGSQSAYNKSVYTTTPASMTKKVPGAFHSVTTPAQVQRPSSQSASVKTEPGSSAAVSDPCKKEVPDSSPIPSVMGDYNSDPPCSSSNPANNKKYTDSNGNSDDMDGSSFSSFYSSFIKTTDGSESPPDTEKDPKHRKLKSMSTSESKIMEHPEEDQTQHGDG

SEQ ID NO: 4648 - DNA, 6536 bp, DROSOPHILA
aaaacacatgcttcagcgacttgagatcagagttgaagtgcagaaactggcaatctgagtccattgctcccgggacactttcgtacaattcttttatgaaggcaaagctgaggttcttttgtgctggccagtgagccaccgccctcttcacaatgatgggcattgaggagtacgcgtgcggtgcaaactcctccatggtgagattggccaagatcaggggagccctcacccctttacaaaactcgcagtcactaatgggcctggtggcctcccataccaagtagttgttgggcagaaagcaacgcactccgagcaggaacgagatggtctcataaaagaccggggtggccaccatgatgaagaacacgatgcccagcagccagagcagattcaaccggttcgggttgtggtccatgtcgcgcgttttgcggaatgcctcctccagctcctgtgtggacaccagaccagtccgcatcacattacgatgcagagcgtccagttgatcagctaagtccggacccaagcgctcccgaaccgcctgcattcggttgcccagcgtccgcgtgggacggctgatgaactggaccgttcagccctttattattttgcatttcttcagtacttattattcctcaccagaaacatttccaattgatagtccttcccctttgttttgcttccaaacagctgagaacgataggctcatggcgcgagctcttttgcctatcgactacagagttgtcagggcttcataatttaccaaatatttcgttttggtagtttagatatttacaacttaaaatgttaatagggctgtaaatgatgtgcgggtataagtattgctttcacttatattgtcaaaaatatttaagtaatttttaacatttatacactgaactaattttagtcacgcttagtattttttctggcttcagtcacaaactgtgcccatgcactcgccagccctgtcagccgttcttcgtatattttaacggttcgcccgcggtcacacttgtcattcacttttcgctctttgctcggtcgtagtatcggccagcagctaaaaatttggaaagatcgttcgggctgggattttctgctgattagtacaaagccaacgtgacaataactcaaaaatgtgtcttgaatagtgcgtgcatttacgttttcattcatcttttatcgttcatccgggctcggttttctaatcagcactcctccttctttggctgtcaacgtgaccccgaaagctgtccttctcgcacacactttcactttgcaacaacaacaggaacaacgaacaaataacccagcataaacaattgttgtgcaacacttattagcaaaacattagagcgcctataatgtcggcgcaggaaaaggttatacgcgttggatcgcgaaagagcgaggtaagtgtgttaaaggcgacgagaactaaaatatgtgcatactacatccgcttggaattcgaattggaagtgctgcatttgaatttcaatcacattttcgtggctctctctttctctcccgtctccccctcccttatgcaagacttgttgctctccgcgtggtgttattgcagttgttgtacttgctctgctttttggttactgttacacaattcgctatagcaacagtacgcacttttgcagaatgagaggaagagagaggcagacagagagggtgagagagagaggccaaactaatacagtgcactttcgcaaagtaaaccaacataattaaccgaaagtagaaaaaacgaataatacacaaaacaaatgtgttcctctgtcgagcccgcactgtacttgtttttgtatggaccccatttgaaaacttgattttaagctgggccttttaataatttttgtgttaattgcactgagccgccacctttgatcgtgctcgaagtgaaggccacctgtgtgctgctggcattccaatttgaaattacttgacttatttgcgagctaagtgccctactctctccttctctctgttaatttgcatttagcatataataggcactctattaaacaatttaacccccttcccccttttcagctcgctctgattcagaccaaacatgtcatcggccgcctgcagaagctatatcccaagcagaaattcgagatccgtaagtgaaagtcggggttgataaatattggggcaccggctggaaggggaattggaaactcatgatcagcaaactgaaagggagttggaagtgcttacatacatacatgtaaacagcgcagtcatgctgcacaggggcctttagaaactctacacgaagcatgacttgtggaaattccagcaggagccatgcttatctagcgttctgatagtggtcatagcaaatgttgcgactgtttaaatgggattgcatacgatcggctttatgcatatcggcttctctaaattcattgctctcgctctttcgtcatctcttttccgctcacgtgccatttgccgaagtttgctcaatgtcaatggctgtgctgttgttgtttctcccgagattagggaatgccaactcacacatacgcacaaacatacagtagcgggcaaataatcagcactagagataattattattctttggaactaccaaactgttttggccatataaattctgttggctgaaccacattacgtgagaatttttgtttggatgaagtgatacgacattcgatcggtctatctctgatcgcagtgaaatattcgataagagtcgcactttctggcgacattatgggaaatctgttgaaattgtatttgcacaggcatgttgagtacctttgaacccgataagattggccagtttatggaaatacatttggaagcacccacgatgagtcagtcggtgtggctttatcatggctagcaccaccgtaatctatttgaaattgttggatttcacttgccctatccatatttcattgacataaaatttgccaagtgctttactcaacgcctcgcacgcaatttccctctttgatatacgcttttattcaaattctattcccggtccgataagcaaaacatttggaaaagacattatcgctgcgggtccaaactaggaaaggggaaattggggagatatacctattccgtttgcatgtctcgcttgattgctgtcgtaaagtggagaacctggcgtgctactgggttccttatcaggtgatgatgacataacaaactgcaattatggaaacgccatccttagattattgatctaagatgtcgtttcaagtgggtacaatttctgaggtcagaagaagtaaattgtgtacgataatgaatatgaaatcgcttatcaaagttaaatatttagtaagataaatacaaaacgctatgttgtttcaaccggtctaattgtattttacagacaccatgtcgacatttggcgatcgtgtgctgaacgtttcccttcctaagattggcgagaagagcctgttcacccgcgacctcgaggatgcgctgcgcaacggtggcgttgactttgtggtgcactccctcaaggatctgcctacagccctgccaacaggaatggccatcggagccgtgctggagcgagaagatgcgcgggacgccctcgttctgcgggagaacttcaagggccacacgatagcctcgcttccaaagggcagcgtgattggtgggtgtgacaaatatggctaattgtgattaaaatgattcaaatgtaccctatatccacaggaacctcatctcttcgtcgcacagcccagattcgcaggatgtatccccatttgacggtgtgcgacatccgtggaaatctaaatactcgactggccaagctggatgcagccgattccaagttctccggcatcatactcgctcaggccggcttggtgagaatgggctggatgagtcgtattagccaggtgctggagccgaccgacttgctctatgctgttggccaaggagccctggccgtggagtgtcgggctaatgacgaccaagtgctggcaatgctgcagaaacttatgtgcctgaatacaacgtgccgcatcctagcagaacgaagcttcctgaagactttgggagggggttgctccgcccccgtggctgtttggagcaacttaaagggcgagcccttgaatggaaacagccaggaggtgggactatccctcaccggtgcagtttggagcctggatggtgcaatagagatacggaaccatctggcatgtgccttaaatgaacaaaaattggagggggaccaacggaaacgaggggcccaggaggccaccagccagttgcaggaggagaccagcagcagctgcgattctcccccggccacgaagcgtgccagaaatggcaacgacagttcgggttcggactcgaattccagcagtccgcgccagcaaggcagccctccagtgatctgtgaggatgcggctgcttgcgcagctctctccggttacactgtggatcagctctcggatctggccagtcactgcccagtgctgagtaacaacaatgctgtgggacctaccggagttagtggtggtggcgatgcggataccaacaatgtgaacaccactccccgtcagtgccctcttcgcttggtgggcggtcaggaagtgatgggccagtgcccagtgccgcacaatcaggcaatggttcctgccaaatgtccagtagcgcatgcagactctggggattccttcagcgccaagagtggaagtggaggggaatcggccaccactgctcactgtccactacagatgcccgtgggacaggacttcatgggcgaatgtccgtacgttaacaacgatgtgaaggtatcctttgcccaagctggaaagtgtccagtgactggcggtgtggcaggagcatcagcttctattttgcccacgccaccgagcagcagagccagtaatgccagcagcgctggcgatgaagtggataatgttgcaacttcctccaagtgtccctttgcggccatgcatcagggcagcggtcttgaggcgccggctaaggacaacggaaacgcagccacagccaagtgcccgttcctgcagaaaacggtccaaatgttcgactacgccgacgaggagcagccgacgccgcagcactcggtgctcattgaggatgtggaaaacctgttctgcggtctctaccagcacgcctgtcacagtcggggcatctacgagaaggccaaccagctgggcaagacgctggcggaggacctgatcaagcgcggcgccctcgacgtgatgaaggtggcccaggcagagattcacggcaaagtggcgtcgtcttgagcccgtcatcaatatcatcgtttacattaagtagaaaagtgtaactagacaaaatgtttttcatttccgcctcgttgttgaactcccgtggagaactcatgcttcccctgatttaacatcggtattgtattcaatccttctgctctccccggcgaatgcatcgttaatggttggtttccgcgtaaacgttattttagttttgtttttgtttcgggaatatgacaaataaatgtataagtgaactcatattgtgtcattttttctctccactgattgaaacaagcaatttcgtagctttttgccattttttattaacagttcatcgctcagtacaaatatgtttattacattcaagctaatttatatactcttggtgagtacaagtggtgtaaccaatgcggttataataaagtcttaatatacaaattaaacttatcttttgaattgaacttaataatagttaaaaatgtatgaagtaaccttgttataaattgcagttttcatcgacttttatcaactttatatagaccctttcaaagttagccattgaaaattcaaagaattatacttaacatagcaataagctaacgtaaaactacattggtcaagagaatgaaatgaaaaacaaaaataaaagggagtctagtgcaactagtggcgcttgcgcaggtgcgaggataggaagttggcctccgtgaagaccttcttgcaattggctacgccgcatggaagtccaccttcggaaccacagttcgagaagtgagccacgtaatccatttggttctggtagacttccttgcatagggtgcactgtagtttggcggcgtgctttttctccatgtgcgagtccaagcgttgacgcgatttgacgaacttcccgcaccggtcgcagctgagggtcgactcgtcggctgttgagtcaccaatggactccaggcgagcctttttgtgcggccgcacgttgtagttgatttcttccactatgtctacatcagatgaggggagcgtgtcctcagatttgtcttgtttttttcgtttttctgactttgcaggcgaattgccattggttgtggacacagacagatctacgtgactggtcttctttgtctttttagctggcgaccgaggtgcaatcatgcctccatcgacctggtgctgaatgttgttcctggatcgtataatcttttcttctgcgggtccttcatcatcctccgcggtgttgtcagtcttaaaagcgtccac

SEQ ID NO: 4649 - DNA, 2565 bp, DROSOPHILA
ccgcggtcacacttgtcattcacttttcgctctttgctcggtcgtagtatcggccagcagctaaaaatttggaaagatcgttcgggctgggattttctgctgattagtacaaagccaacgtgacaataactcaaaaatgtgtcttgaatagtgcgtgcatttacgttttcattcatcttttatcgttcatccgggctcggttttctaatcagcactcctccttctttggctgtcaacgtgaccccgaaagctgtccttctcgcacacactttcactttgcaacaacaacaggaacaacgaacaaataacccagcataaacaattgttgtgcaacacttattagcaaaacattagagcgcctataatgtcggcgcaggaaaaggttatacgcgttggatcgcgaaagagcgagctcgctctgattcagaccaaacatgtcatcggccgcctgcagaagctatatcccaagcagaaattcgagatccacaccatgtcgacatttggcgatcgtgtgctgaacgtttcccttcctaagattggcgagaagagcctgttcacccgcgacctcgaggatgcgctgcgcaacggtggcgttgactttgtggtgcactccctcaaggatctgcctacagccctgccaacaggaatggccatcggagccgtgctggagcgagaagatgcgcgggacgccctcgttctgcgggagaacttcaagggccacacgatagcctcgcttccaaagggcagcgtgattggaacctcatctcttcgtcgcacagcccagattcgcaggatgtatccccatttgacggtgtgcgacatccgtggaaatctaaatactcgactggccaagctggatgcagccgattccaagttctccggcatcatactcgctcaggccggcttggtgagaatgggctggatgagtcgtattagccaggtgctggagccgaccgacttgctctatgctgttggccaaggagccctggccgtggagtgtcgggctaatgacgaccaagtgctggcaatgctgcagaaacttatgtgcctgaatacaacgtgccgcatcctagcagaacgaagcttcctgaagactttgggagggggttgctccgcccccgtggctgtttggagcaacttaaagggcgagcccttgaatggaaacagccaggaggtgggactatccctcaccggtgcagtttggagcctggatggtgcaatagagatacggaaccatctggcatgtgccttaaatgaacaaaaattggagggggaccaacggaaacgaggggcccaggaggccaccagccagttgcaggaggagaccagcagcagctgcgattctcccccggccacgaagcgtgccagaaatggcaacgacagttcgggttcggactcgaattccagcagtccgcgccagcaaggcagccctccagtgatctgtgaggatgcggctgcttgcgcagctctctccggttacactgtggatcagctctcggatctggccagtcactgcccagtgctgagtaacaacaatgctgtgggacctaccggagttagtggtggtggcgatgcggataccaacaatgtgaacaccactccccgtcagtgccctcttcgcttggtgggcggtcaggaagtgatgggccagtgcccagtgccgcacaatcaggcaatggttcctgccaaatgtccagtagcgcatgcagactctggggattccttcagcgccaagagtggaagtggaggggaatcggccaccactgctcactgtccactacagatgcccgtgggacaggacttcatgggcgaatgtccgtacgttaacaacgatgtgaaggtatcctttgcccaagctggaaagtgtccagtgactggcggtgtggcaggagcatcagcttctattttgcccacgccaccgagcagcagagccagtaatgccagcagcgctggcgatgaagtggataatgttgcaacttcctccaagtgtccctttgcggccatgcatcagggcagcggtcttgaggcgccggctaaggacaacggaaacgcagccacagccaagtgcccgttcctgcagaaaacggtccaaatgttcgactacgccgacgaggagcagccgacgccgcagcactcggtgctcattgaggatgtggaaaacctgttctgcggtctctaccagcacgcctgtcacagtcggggcatctacgagaaggccaaccagctgggcaagacgctggcggaggacctgatcaagcgcggcgccctcgacgtgatgaaggtggcccaggcagagattcacggcaaagtggcgtcgtcttgagcccgtcatcaatatcatcgtttacattaagtagaaaagtgtaactagacaaaatgtttttcatttccgcctcgttgttgaactcccgtggagaactcatgcttcccctgatttaacatcggtattgtattcaatccttctgctctccccggcgaatgcatcgttaatggttggtttccgcgtaaacgttattttagttttgtttttgtttcgggaatatgacaaataaatgtataagtgaa

SEQ ID NO: 4650 - protein, 652 aa, DROSOPHILA
MSAQEKVIRVGSRKSELALIQTKHVIGRLQKLYPKQKFEIHTMSTFGDRVLNVSLPKIGEKSLFTRDLEDALRNGGVDFVVHSLKDLPTALPTGMAIGAVLEREDARDALVLRENFKGHTIASLPKGSVIGTSSLRRTAQIRRMYPHLTVCDIRGNLNTRLAKLDAADSKFSGIILAQAGLVRMGWMSRISQVLEPTDLLYAVGQGALAVECRANDDQVLAMLQKLMCLNTTCRILAERSFLKTLGGGCSAPVAVWSNLKGEPLNGNSQEVGLSLTGAVWSLDGAIEIRNHLACALNEQKLEGDQRKRGAQEATSQLQEETSSSCDSPPATKRARNGNDSSGSDSNSSSPRQQGSPPVICEDAAACAALSGYTVDQLSDLASHCPVLSNNNAVGPTGVSGGGDADTNNVNTTPRQCPLRLVGGQEVMGQCPVPHNQAMVPAKCPVAHADSGDSFSAKSGSGGESATTAHCPLQMPVGQDFMGECPYVNNDVKVSFAQAGKCPVTGGVAGASASILPTPPSSRASNASSAGDEVDNVATSSKCPFAAMHQGSGLEAPAKDNGNAATAKCPFLQKTVQMFDYADEEQPTPQHSVLIEDVENLFCGLYQHACHSRGIYEKANQLGKTLAEDLIKRGALDVMKVAQAEIHGKVASS

SEQ ID NO: 4651 - DNA, 4356 bp, DROSOPHILA
ctgcacgcactcaaccgacggggcaatcacttatggaaattggtaactattcgcagcattaacacagccgtggcatattaattatatttggtgttttcatgtggccccctgattgtcagtctgtctgtccgctcgtccgcctgtcgcaacgatttctggtttgagcttcctttttttagcttttcggtttctttcgattcgattcgatttaactcgctcgcagctcacggctaacacgtccagcagccgttcgtgttggatttactctatccgcatgtcatcatgtcgcaagggtacaagcccagagccgagcgtatgatatacgtactcgggtcgctcgggagatccgacaggacctgcggctcaccaaaacaacaaccccctcctgagaaagccaccgagctgagagtcacgcacacgtgctgccgctgtctgtttttgtatacatttttcgcaatgccagggttgacaagacttcgaatcgaatagtattttttgagcttggcgtttaggcaattttataggcgtttcaaaaatgcaagccacaaggaacagaattccggcaagaaacacaacttcttaaagttgtatatttatatttatatttattataagttgtgcatatatttaaaatctctttaagactcgcaaggtaacctatgcgacacctatggacaaaatactagtttctgggcgacacctaacgataaaattcatattcccaagcgcaccatctattgtcaaattactatttccccagtggtgccatctagcaacaaaacagttcatcgccacctattgaggatttcataaaatgccacgtggcgacacctggtgctaaatccaaaagtaccacaacactagcgccatctagctctgttaaccagcttccagataacatactattaacattgctacttgcgcacggagtaaccgtgtttgtatacccaaaaaataccgttaaaaagcggttttaatcacacaaggtgggactggctacactaagcgcaaacaagtcttgcattttgcaataaattctctaaccggttttgttattgttttggtgctcaagtaccgcagaaaagctcatatctgaccttgaataagtacgtgtaaatcttatctgcgaaatcggcaataatcagtaggtaaaccccacaaaaacagtgaagttgctgcaaacaattcgaaggatgagccaaggtgcctcggaggtgccactttcgggtaagtaacattaataacctaatattatgttgtaataaatggcctgctggtaactctgtggaactagcacttcgtctgaagtactgtgagcgcaaggacgccttcctggaggataacatcaaggtgaagaatcccttctgtgtattccgagactggctggagttggcgctgaaaaccccggagatcttggagcccaatgccgccgccctggctaccgtgagtgcggagggtaggccttccaatcgctatgtgctggttaaagaagccaccgccgagggattcaccttcttcacgaactacggtagccgcaaggctgaggacatcaagtccaatccctatgtagccatatccttctactggctccctttgcggcgaagtgtccgcatcgagggcgtggctgagaagatctcggtggaagactccctcaagtacttccaccagcgaccaagagccagccaaatcggagccgctgccagtccgcagagccagcggattccgtcgcgcagctacttggacgacgtggaggcggcaattaagctagaactgggtcccgatggcgaggtgccgctgcccaactggggtggctacttggtgcgtcccgacctcattgagttctggcagggtcagaccgatcggctccacgatcgcatccgctttagacgaggtggaggagtagaatccgaagtcgacagcaaactggttcacaaaggagaggatggttgggtgtacgaacggctggctccttaggcactgggttctggagttcagctacagatgcattgaaaatgtcttccaaattaagttgttatgcgcaggataatagaggaacgtttaaagctgcttcaaaataaatgttaagacataaccaacaactatgtacatctgtacaagcttaactaccaaatacaaatttaagattgcctttaaatattgtcataaggtgtaagtgaaattacaattcctttttaaatttgaaagtacactagctaagatcacatcctaaaatatggcttatagcccttaaaaaagttggacaagtagcctaagcattttttatccgttgccttgaagtgcgttataaattgtagagcatattaaaaattactatgtcgactgttttggcacaaaagctgtggtgtacgctttggtcagcaggatcactaggtcgctttgcacagcacatgagcaacgctgcccaccaggtgagctgtataggcagcgaggagcagcgggtgtacgaggagccacacgtaatcttccagaactggctgatggccgcccagaaggaggctcctcaggtgcggcctcgactggcctgcatggccacggtggacaagtccggtgagcctgtgacccgcctaaccagcatcgaggaggtcaattcccatggaatcaccttcttcacaaccctcggcagtcggcaggcgggcgagataagcgccaatcctcacgtgtcgctacacttcaactgggcgccgctcatgcgcagtgttcgcatagcaggatctgctcaccagctaacggaggagcaggttcgggaccagttccgacgatttccgcgccacgtccagatgagcatcacccatggaccacgatacgctgcggccgagtggcaatcccgatccgggttctttgcgcggatcggacagcgcttgaacacctggcttggcaagcaaccggaggagatccccatgccgcacaactggggaggctatattcttacacccagcctatacgaattcggaatgctaagcggcgagaaggccggtaggactcgggtgcgattccgacggtgtcttgaaatgccaagggtacgtacaatcataattattgcaccggatgatgagccataagccaatttaaatatacttgtagaacctattaattaatttatatatatcgctatttggctttaatctcagatatcataatttccacttttttgttttgtaaatacattttgtcaatttcttttaatatgcaaaatagttaattatattcaatttcataaattcatttcttccagggtacaagagttggtcacgttcaagctgaaaggcaggactgggtttatgattcgtgtgatgaaaattgatacaaaactattcaaggatatgattctactctaaatccttctgtgtataaaaaccaattgttttatgaccagcgtacccttacagctaaatcctatgtcaaataaaattatttgtttaacaggttaacaggttttataaatttacttacttgaatttagagaaaaaggtaattcaagtaatattgttactataaaaactaccatattggaaaaattaattgatggcagttttttttaaatttcaaacatactttaaatggatatcttaaggtctgtttgttaacagtccgttttcaacgggaaaaaataaattaatttaccatcaggggagcttatgtggttaacagattggtggcaaattggatttaagtgaaagcgttagttcactcagcttggcctcaatcgcatttaaaatgcattaaaagcacggctcgtagccgcctaattggatgtccttggctccttgaaatgcccactgcaggtgagtgtacgcgtgtgtgggtgtgggcacgtgaaaatttaataaaataaataggcgagtgcagtcgagcgcaaagagtaatgcccgctgggaaatgttggatagatggtcgaatggatgtggtgtttagggaggagcagggaacaagggccaagcggcagtgacagcagacaacaaatagtgaaagccaagcgcaaggccggaaaagcacacggcttccagccataccagccatgccaccacccacattttccgcccgctctacaaatttgcctttgcactcctttgtaattgtagccatcgctctgtcagtcgttcgcttccttccacggttcgtttttgcctttcctgtttactttgtcttggtctgcgctttgtcttatccttcgtctcgccgttttgttttgctcgttctatttcgtcctttttcggcttttcccgcacagagcgttagtgtttagctctttctctctctgtcaatctctctctgcggctcgctcgcggaaaatgcaaggataatgaatatttcttactttcgttgcgtgccagctca

SEQ ID NO: 4652 - DNA, 1587 bp, DROSOPHILA
actaagcgcaaacaagtcttgcattttgcaataaattctctaaccggttttgttattgttttggtgctcaagtaccgcagaaaagctcatatctgaccttgaataatgaagttgctgcaaacaattcgaaggatgagccaaggtgcctcggaggtgccactttcggcacttcgtctgaagtactgtgagcgcaaggacgccttcctggaggataacatcaaggtgaagaatcccttctgtgtattccgagactggctggagttggcgctgaaaaccccggagatcttggagcccaatgccgccgccctggctaccgtgagtgcggagggtaggccttccaatcgctatgtgctggttaaagaagccaccgccgagggattcaccttcttcacgaactacggtagccgcaaggctgaggacatcaagtccaatccctatgtagccatatccttctactggctccctttgcggcgaagtgtccgcatcgagggcgtggctgagaagatctcggtggaagactccctcaagtacttccaccagcgaccaagagccagccaaatcggagccgctgccagtccgcagagccagcggattccgtcgcgcagctacttggacgacgtggaggcggcaattaagctagaactgggtcccgatggcgaggtgccgctgcccaactggggtggctacttggtgcgtcccgacctcattgagttctggcagggtcagaccgatcggctccacgatcgcatccgctttagacgaggtggaggagtagaatccgaagtcgacagcaaactggttcacaaaggagaggatggttggctgtggtgtacgctttggtcagcaggatcactaggtcgctttgcacagcacatgagcaacgctgcccaccaggtgagctgtataggcagcgaggagcagcgggtgtacgaggagccacacgtaatcttccagaactggctgatggccgcccagaaggaggctcctcaggtgcggcctcgactggcctgcatggccacggtggacaagtccggtgagcctgtgacccgcctaaccagcatcgaggaggtcaattcccatggaatcaccttcttcacaaccctcggcagtcggcaggcgggcgagataagcgccaatcctcacgtgtcgctacacttcaactgggcgccgctcatgcgcagtgttcgcatagcaggatctgctcaccagctaacggaggagcaggttcgggaccagttccgacgatttccgcgccacgtccagatgagcatcacccatggaccacgatacgctgcggccgagtggcaatcccgatccgggttctttgcgcggatcggacagcgcttgaacacctggcttggcaagcaaccggaggagatccccatgccgcacaactggggaggctatattcttacacccagcctatacgaattcggaatgctaagcggcgagaaggccggtaggactcgggtgcgattccgacgggtacaagagttggtcacgttcaagctgaaaggcaggactgggtttatgattcgtgtgatgaaaattgatacaaaactattcaaggatatgattctactctaa

SEQ ID NO: 4653 - protein, 484 aa, DROSOPHILA
MSQGASEVPLSALRLKYCERKDAFLEDNIKVKNPFCVFRDWLELALKTPEILEPNAAALATVSAEGRPSNRYVLVKEATAEGFTFFTNYGSRKAEDIKSNPYVAISFYWLPLRRSVRIEGVAEKISVEDSLKYFHQRPRASQIGAAASPQSQRIPSRSYLDDVEAAIKLELGPDGEVPLPNWGGYLVRPDLIEFWQGQTDRLHDRIRFRRGGGVESEVDSKLVHKGEDGWLWCTLWSAGSLGRFAQHMSNAAHQVSCIGSEEQRVYEEPHVIFQNWLMAAQKEAPQVRPRLACMATVDKSGEPVTRLTSIEEVNSHGITFFTTLGSRQAGEISANPHVSLHFNWAPLMRSVRIAGSAHQLTEEQVRDQFRRFPRHVQMSITHGPRYAAAEWQSRSGFFARIGQRLNTWLGKQPEEIPMPHNWGGYILTPSLYEFGMLSGEKAGRTRVRFRRVQELVTFKLKGRTGFMIRVMKIDTKLFKDMILL

SEQ ID NO: 4654 - DNA, 2925 bp, DROSOPHILA
ctacaactccgacccgccctgcagcagcagcaatcccgccaacaacaaggtatgctatacgaatgaggtccattggtgattggtcattatgaagaacatggtctcatccacagaaatacacggacagcaatgggaatagcgacgacatggatggctccagcttctcctccttctactcgtccttcatcaagaccacggacggatcggagagtccgccggacaccgaaaaggaccccaagcaccgaaagctgaaggtacgtacagttcagtccacgatgcgattcaatgtaatccatttccgttcttttgcagagcatgagcacatctgagagcaagatcatggagcacccggaggaggaccagacacagcacggggatgggtagtagccacacccgcagttgctgctgaccgacgtacacaaccgagtgcacaatgtcgatccctgggatgatccgagcagcagacaccgaggagcagcagggtcctggaaacgagtgagcaattgcctccggtctgggcaccgagtaccagccagtcccaccagttcctattcctaactcccccttccattcccttcaagttcttcgaatcaacgcgaacgcttccgtgggatgtcaccattcagtatccgaacaagtaacgaaagcatcagacgaactgacgtggaaggatgcccagaacccatgcaagccgaggataatgtagatctcaagccaagcaaagcttttagatgatatctatcctatgtttaatcagaatattaagtgaattgaaaactagagagggttcgaacatcgaaccacccttctcagccctaaggtttatatatccgaatcttttttagttatttattgtacaataaatatcgaaaagccaacgccaacacttgtagtagttgttttaatcgaagatggattggatttagctgcaattaggtagtttaatcagtaattagctagagtggctagttagaccggactttgttagatacatatgcgttcattccttttcgaagaactcgtcgtagggaatgttggcccacagactctgtacgatggcactgaaggccttggcgcaggcctcgttgatcttcggctggacatcgagggccagggtgctccactcctggttcagcaccttcagcgtgctgtcgcgcagctccttgttgtcgttgaacagattcgacaggtcaaagtggccactacgagaagaggtttgaggtcaccattcagttggctagacatgcaggccatgctcaccccttgatcttggtggccgtcttgtagtcggtgatgttgagataggtgtggccatcggagcgcttcactggctcggcggtaatccaaacctttgtgtgcacatcgttcaaccgaatggtcaggtcgcccttgctgacaatgggcaggatgagcagcttgccgtctacgtcgtacttggcccgcacctccagttccggattgtccaagagcagggtcagcttgagcggcctggtgaggtccttggtgaatcccttcaggctcttgaccatcatcgagttggccagattgtagagcttggcatcgctcatggtcagtttgaactttatcgactccgagtggccgccgctctcgatgaacatcgtgcccagggcaatgggctccagcgcggccacctgccgctccggaatgccattcttgaaggcttggaaaaaggtttgcgcctgagccagcaagcacgactcatcctggagcttgcagcgcttcagcggcgatgctgccaatcgatggagtatgaagtaaacaattaggaaacatcaggagccacttcacatatacggattaacgattgaaaactcacgaaatccttcggaggcgtccactctgcaggaaacccagctgagtagacccacccatacgaggaacatagaggcaccggttagctgcatttttccgtgttccgtagtccgtagtccgtaatctctgtatggcgatttagctaagcgacaactgacggaatccagccagaagtcgggcctatttatcctctggcggcgggtgcaagttcaagtccgattctgcgaccagattgaattaattgcgcccaagtgcggcttaccggcatgaaacttcgttttaatgcgtactgggaaaactggaaaaacatcgcttttgatcttttccattataaatttgaacttaaacgagtcgaataaaaggcattctccttcctacataaatcatcggccataactaaaggcgctaaagtaagtaacttgccggtatggatgtgagatacgtccaagccgcactcggatcattcatcgaatccgatcggatgtgagtaaaagccgaacgattctcaactgggttgcaatggagaactggtttctcttctccatatctctctcgcgcgggaaatctcctctggagattcaatagaaacgctatgaatatggtataccctgatatttaggtagcttcgatccactaaagatactcttggcatctcaaaaaagtatgttgtgtaaaatagagttcatagttgcgctcctctcattcaacacggattcggattcggatatggactacgatctggtgaccatcgaaccgctcggccaattgacagtgcgtgtcaggttcgaggtcggcgtggacaagtgtggagtcaactttgatctcctgccatgtcggtgagatgacgcgccgactcaacatgggcgccaatcaacggcgagttttgtgaactgaaacagtgatgtcggcttatcatgttaagctctaaattaattcaatttttacaatctaaaccattttacattgaattcaagtagtagttacaatagtttctgtaaaaacctttaatatattgccttaggtcaacaaaaaatacataacaatttgtgtgccgctcaccatcgcatcgagtgcattcatttccgggacgtg

SEQ ID NO: 4655 - DNA, 795 bp, DROSOPHILA
atgcagctaaccggtgcctctatgttcctcgtatgggtgggtctactcagctgggtttcctgcagagtggacgcctccgaaggatttccatcgccgctgaagcgctgcaagctccaggatgagtcgtgcttgctggctcaggcgcaaacctttttccaagccttcaagaatggcattccggagcggcaggtggccgcgctggagcccattgccctgggcacgatgttcatcgagagcggcggccactcggagtcgataaagttcaaactgaccatgagcgatgccaagctctacaatctggccaactcgatgatggtcaagagcctgaagggattcaccaaggacctcaccaggccgctcaagctgaccctgctcttggacaatccggaactggaggtgcgggccaagtacgacgtagacggcaagctgctcatcctgcccattgtcagcaagggcgacctgaccattcggttgaacgatgtgcacacaaaggtttggattaccgccgagccagtgaagcgctccgatggccacacctatctcaacatcaccgactacaagacggccaccaagatcaagggctcttctcgtagtggccactttgacctgtcgaatctgttcaacgacaacaaggagctgcgcgacagcacgctgaaggtgctgaaccaggagtggagcaccctggccctcgatgtccagccgaagatcaacgaggcctgcgccaaggccttcagtgccatcgtacagagtctgtgggccaacattccctacgacgagttcttcgaaaaggaatga

SEQ ID NO: 4656 - protein, 264 aa, DROSOPHILA
MQLTGASMFLVWVGLLSWVSCRVDASEGFPSPLKRCKLQDESCLLAQAQTFFQAFKNGIPERQVAALEPIALGTMFIESGGHSESIKFKLTMSDAKLYNLANSMMVKSLKGFTKDLTRPLKLTLLLDNPELEVRAKYDVDGKLLILPIVSKGDLTIRLNDVHTKVWITAEPVKRSDGHTYLNITDYKTATKIKGSSRSGHFDLSNLFNDNKELRDSTLKVLNQEWSTLALDVQPKINEACAKAFSAIVQSLWANIPYDEFFEKE

SEQ ID NO: 4657 - DNA, 8626 bp, DROSOPHILA
ggcccatccgatttcatatggattcatagtgcctcgctttcgggggtggttacttgaattttgttaaagtgtgggttacacatataaaaaatatttgcgtcctctcacgctacacgtttatataaatatgtttcttgggattgggactgcacacttactctactggaaaaaccattgaatagtctttcgccttcttcgttctctcgttctaatacaaaatggtttcgctatggcaaaacctggattataattaaatcatacacctatacttcgcttagcgacttagtaaaccgattttagtttaatttgatttgcaactagccacgtgcaactagtccacggtcacaatttgaaaaaagaatcactttattttgatttcagatcgatcgggggcgagtgtgcgaaatgaacaattttgattataacactccttaaaagcgttaaacgagatataggtgtacatcgagctgttttgtttaaccgtaagttattgctttaatggcgctgaatttcgattcattaataaagtgctcgtttaaggggggacagggtctttaattttaaacacaacaattcaaagttagtggtagtggtaggcgggaggcaaagtaaaattaagagtcgtttaggacacttcgtacaattctccgattcggttctttttggcacattgctgcactttatattttgccatgtactacaacaagtggtggtttctcataatcttcataaataaatatacataggtcgtatgctataagaaattgctgtacaacaacaagtgaagcgtgtagtgggtggttgtcgggtgcttgaaacattggtagttatgatattcttaatattttaagcatagcgagcaagtagggtgagctttgcatttggtatggctcgtttggggcatctggtcggttatcaatccatttttagagtgtagaaaataaatttgatctaaaatgtcagtctattgcgcaaaatctacatttgacgtgatttctacccgattttcgttagtttagtttagttgcttcttttctttcatttgtttcttttgttttccttcttgtatttcgtatataaaaaattccctaatatttatgcatcttgtatcgttcgttcagctcaatcaatccgccatccgcaattcgtgtgcgattgcatggcgttgcgatgcgattccgtccgatctctgatcctttccgatccgttgcacgtcgtccttgattcgttgcccgcattagatgccgggtcaggcggacgagcaggtggggatcggaagtcggaaatcgggtatcaggggaggaatcggtctcctacggcaactaaatacgtcatacagctattgctactactgatctacgactacttagtggctacggggcacttaacctagcttcgtgtatgcgtaggcgcagatcacgcccaccacaacaccagcggcaatatatgtgagtaatgaccttcgtttctttgccgccagctgtttgtcctcgttctcccgctgcttccgcttcatgtcgttgaccttctgctccaggctggcctggtattcgttgcgttttcgccgcttcagctcgttctcgggactgaaaagtacgaatttggaaggggattagagggatttttgtttgactaggcggttgaaaaatagatactgagcagatctaagactagattcttacctggctgggagctggcctggaattggatcgatgccgttcgccttgtgctgctcgtcgactggcaccgctggcttctcgttgttggcattaacatcgtcggcatgtggctgtgttgtcgcgggcacgtgtccattaactggatcggcatcgtgctcgttaatggtctcgtactcctcatcctcatcggtgtcgtcctcgtcatcgtcatccagcaagtaatcctcatcgctgtccgaatcgttgaaagcccttacgggtaatggcggcaagggacgactgtcggccacctcggcatcgtggatcatgtcgtgctgattaatgaagttgttcagggcgtccttgctcagctctttgccgatactttcagctccattagcctgggccgcgcgcatattgagcgaaagtataccgccggaattgggggccagtggcagattaagcgattggacgcgtgggggcaatggcggcggcagctcatccagtgtgtgagtctctgtgtcgttgctaatgaggggttcttcagcgtcaagaaaggtctgaagagaaatcaaatgttctaattagtcgcggaaaataatcagggccttcacagaaatctctgcaaaccaaaaacaatggtttctttttcgcatcaattaaacaataatcattaagctgatactagatcacataataaaaaacaaaactaaacataatacagttttcaaaagtaatcataattccattaaacaatatgaattctagtaaccataaccaagcccagagatttctgtgaccccccagaataaatagcgatgtgcaatatatacggcggtgcttggcagcccccaagtttgactcccaaacgccgaccgctggtcgcgcatacatacgggatcgtgcagctttttaatgccctcgatgatcgcctggtaggagaagtccagctggtcggcggtctgtatgaggcccatgcggtagctgcgcagctcgcagagcaccttggacacattgcactctccgtacttgtcgataagtaccaggcaacagtccaccaggcagaaggtgcccgaccgcccgattccggcactgcagtgcactacggctggacccacgtcgcggctgaggcagccggagtcgcgaacctgctgcaagaacttaaggaatgcgttcggcgagctgggaatgccaaagtccggccatgtggtgtagtggaactgcatcacttcacgactctgctgcgtttcgagatcggttaatctagagaaatagtcaaaggcaattagtccacatgtacaaatggtttgaagcagaagaagaataaagagttctactcacttgaaccatcgccgcacaaagttctggtaggtctcgagacggacgagctccacggtgagtttgacgtggggcagtttcagggccttgtcggctcccatctcgttgggccagtagaggtggcacttgatctgtttcttctccatcagcttgttgagcatgagaactgctctggacttctgctcccataccatcagccagaagtggcccactgtgtccaccagcggtccttgggtcaggatgtactggcgctcggcgcgctccagctagaaaggattgattgatcgcattaggcgtttaattaggggtgtgtgtatgcattaaaaacgtgacccacctgaaccaggttcgcattgatgtagtctacgctgccgcgcttcaaaacaatgcgggaatgatcgtacggattcacatcccgatagcgattcaggccgcggttcgtgtggcgttccgattccgaggtgctgaactgcttctccttcgcctcccggtcgcaggtctcacaaatttcctggaattccgaaaagagcgattagtacaatcgaaactacccataacaacaaaggttgaggtggtattaaaattcggtcgctttactgacaacttatcagtcaatttgcaggcggtaattcaggggattttgtgagatttgcgctatttacctaagcgttccagaccccagaagacaactactatagtgtcttactggaagatctcttctttctggtacaaaattcgtaaaaaatatagttttcgtgttactcaattatctaagacagtaataagaccaaaagttcaaactaattaaacatttatgcatgaaatgacccaacgaattcttcgatacaagagcaaacagcaaatagcagtgcacaatagtattgaatggcattgttaaaacgaatatcagagcttccttttagaaccatacaaactgagaaactgtaaggcgcaattaagctttttacgatttgtgttccgagaaaatgaaaacgttcagactcataatggtctgataataactagttttaaagtgatacatttgtttgactgactcgcaaacaaattgtcaagaaacgaattgataagatcctgttagaagaatgctagaatgttacagaaatcgaatttgtttttttccatgggggttgccccctttgcagtgattcatcacttggcccagcgacaaggggctcctccggattggcaaaccctgcgattgaagcgatagtagatacatgtaaggggcatcggactgggagggaaccatgcggcatatgaaaagcccacccagtctacatagcgggcgtgactaattagccatgcgatgttggtgatggcgatggcaaagcaagctgtcggtaatggcattatcttgggcatgaccggtgcggcattatcagcagtgtgaacggggaattgctggcgcagctgaaagtggccccgccaattgaaccatcgaatccgactaccgaaccgttaacaaggtcaatggcaaccacctggcgacgacaagtgctccttaaactcggctcaaagctaatcacatgcatgcggtgatgagtaaccatttaatatggttacccatcagctcgcgttgattgcagctcgaaaatcagttgttaattgtcagttcgtcatgtttcaacaatgaatcagctgcaaattctgcagctgacctgttatgaaataactttaaagagtcatatttttacgtaatctccaaatctgagacgggctaatgaccgataaggaagcttttcaaagagcaaaatctcaatggctatcgctacatttgataattcgtaattagaaacggaaagaaatccatggttgcacttaatatttctcgaaactcctcaactcaatagcatttctacaatcacctatttaaggtctgataatcgacgagtcacgtgagaatacgcgcagataattgagctgctttatttaaatgtttgccaatgataaagactttcagtgtacttatgatgtataaagttgtattccttgtactatatcaaactagatatgatatataaaatcaacaatccatccggaacttatgtaaatccatagcttggattggattcattctgatggagaaaacagttcttcggctccgttgaacattaagtcttgggccgtttaccagctacatactgttttttatgctcggtggctatccaggtgacccttctaaacggagtggcgaaatccaagcgaaggcgcggaaatctcgggggctttggtttccaaagcgtgtcgtgcaaaccgttttatggttattatgtttctgctttaccttgcaacgctcgaaggaaatcgagaaacagtaacaaaaacattgcatgcacgcagagcacaattgcaacgatggataaagacttcttggccaatacgaatttgacataccctttcacacacactatgcgagttaacaagtttcatatttcataaaatctggcttgactgtttccagagaaacgaaaaagaagacggtcacctgttgataccaacgactggtaaggactataacaccctctggcagggtatagctgtggaggagcttcgtcacagtccacggaggttgtcataatgggacggagtgggttgggtgggatgttgatggaacggatggatcgagaaggcgctaggtatgagctgataggcggggaggggcggcgagttgagaagacccagtgtaacgcacttcgttcaatggaaatgattaaacataaagcaaagcatagcaaaacaatacggtccgaatgcgtcactgcgtttttggctacagtccaaatcccctatgatgggctatcatatggcaaatgtcaaataaattggaagttttaatgataaccacaaaattagttgtaccgtttatgttcacacatatttgcgatttattaattcttagaagaatgtgttttggaatttctataataaagacagataagtgcctataatggattataattttcttcagaaatgtagtagcatgcacagctaaatgttattaaagtaaaaattggggtaggtcggtcttattcataaagtaatcatcgaaaaatgtgatgttttcacattgatcatagttgtttttcattgcaacaaaaatgagtcaacgtttacatgctatggaacatataaaattcagcgaatttagatgaatttcacgaaagtaatattatcaagctgaaaactatttatgatttaatgagaaaatatgattaaagaaagtttattgaaatctcactttggcctaacaagatcgtcttagtcaagttgcactgtatttcagtggaaatggctggtagctattttccagtcagtttcgacgcacaattgcgggctgccttccagttagctggaaaattagattatcctcgacgcgagcacaaaggatgacgaacgaggatgccgaggagcgggtccagaaacgagatatttctacacacgaccatatactgtgtcatcctaactgcggagtggaattccgtgaaatcccaattcaagtgagtggaagcgctgaaagaggcacagaggaacagaggaggaggagtagcagctgaagacagttcgccggaactggctataaagaacgagtggaggtggaggaggagagaagaaggggcaaggagaggattccgactccaattccgacaggcaaccagaagcagcccaaagcgagactcaaaaaaccagacgcatgccctttgtgcccctgtgtgcgtgagcctctctctcctgctcaacgcgagcgggtgtgtgtgtgtgtgcgcgcgttagaggagttcttcagtggagagcactgtcacccctccacgaattgtattttgtttttgggggacggcaatcacaaacacaacgagcttcccagaaatcgcctccaatttgatttggccaaacgagaattcgcggaatagctcaagcgctctattgatagtcaaaggaaagcgtttttggggaaaggtatggcagaataacaagcataaatatgccaaatacaggccaatacacacgcacgaactcacacacacacgcgttcgatggagaatgcaaagtaaagtgcagcaggtgtgcgtgtatgtgtgttggtgctattctgtttgtacattcttttccatgggtttttgtttttggccaaagcctggctgttaaagcaacaactgcaacaacaacagcactgacacacaatacacacgcacacacgtaaagctcgccgctgcactggtgttggtggtggaggcatctgcagaagccttttgcgcactcatcacattttcgtggaaatcggagcgccaaggagctgtggaaaggtgtatactccgcatccgttgcgaatccttggcgaatcgaactgtgccacaatcattcgtccagtttgtaaccagttttcagtgcagtcgcagttgttgttgccaattaccttgtagaagcgatgccattgcggccccttgtccttgtactccgcctcgatttgcagacgggcagcggccgccgacccactcccactcgttttctgctcgctcattgtgcacactttgctgcgatttgttccgatttaataacttttaatttggttatcaggcggctggttaatttcagaggagaactagagctggacaactcacgacagtgtcgatgtatcgaatatttgagcttgcgaaatactatcggtatttgcagtgcgataccgagtgatagttcgattgtacatcactatattgatcgcattacatattatattctcttatggtgattcctatttacaaatgcaagccaaacacaatatattgtatctgcgacattattattctgaaatattagttacgtctatcgatattttcaccatcaaataatgtgaccaggcgctgtagagcaatagaacacatactgaaactaaagtgcttgcgcagaaattagaactttactgaaacataatataacattcgggataagttttctataatttatataaaattaaatacttaactaaagacataacaatataaaaacaattgaaataaaatattttaaataaaaataaaataaaaaaaataaaataaaatattttaaaagtaaaatagaaaaattctgataagaaaattgggttcaaatactttaaaataccgatattacaatcgctcatcgttgaccagtgttatcgagtaataccaaaagtatcgaatcaacaactgttacccaatttattaataacaacagaaagaagccaaagcaaaatgctgacccgcgtgttccgcctagtgcacgacaggcgcctgagtgtgcctgtcctgcgttgcttccaccacgagttctccaagccgccacaacaggcagcgaagggccaggaaatcgaaggcaatcccgaaaagactttggttgccggcgtgcaagacaagtacaaaatattccgcgatgaggaagccacggagatttttgatgtggaagaggcacgccaccaggagcagcaacttccagagccggacctggagctggatcactattacggcctcaatttaaagcgtaggttggcaatcgtccagggagagcagaaatttaagcctttgtttccctttgcaggaggtgttcgcggagtgttcgacgttgaggacttggtggag

SEQ ID NO: 4658 - DNA, 2124 bp, DROSOPHILA
gtccagctctagttctcctctgaaattaaccagccgcctgataaccaaattaaaagttattaaatcggaacaaatcgcagcaaagtgtgcacaatgagcgagcagaaaacgagtgggagtgggtcggcggccgctgcccgtctgcaaatcgaggcggagtacaaggacaaggggccgcaatggcatcgcttctacaaggaaatttgtgagacctgcgaccgggaggcgaaggagaagcagttcagcacctcggaatcggaacgccacacgaaccgcggcctgaatcgctatcgggatgtgaatccgtacgatcattcccgcattgttttgaagcgcggcagcgtagactacatcaatgcgaacctggttcagctggagcgcgccgagcgccagtacatcctgacccaaggaccgctggtggacacagtgggccacttctggctgatggtatgggagcagaagtccagagcagttctcatgctcaacaagctgatggagaagaaacagatcaagtgccacctctactggcccaacgagatgggagccgacaaggccctgaaactgccccacgtcaaactcaccgtggagctcgtccgtctcgagacctaccagaactttgtgcggcgatggttcaaattaaccgatctcgaaacgcagcagagtcgtgaagtgatgcagttccactacaccacatggccggactttggcattcccagctcgccgaacgcattccttaagttcttgcagcaggttcgcgactccggctgcctcagccgcgacgtgggtccagccgtagtgcactgcagtgccggaatcgggcggtcgggcaccttctgcctggtggactgttgcctggtacttatcgacaagtacggagagtgcaatgtgtccaaggtgctctgcgagctgcgcagctaccgcatgggcctcatacagaccgccgaccagctggacttctcctaccaggcgatcatcgagggcattaaaaagctgcacgatcccacctttcttgacgctgaagaacccctcattagcaacgacacagagactcacacactggatgagctgccgccgccattgcccccacgcgtccaatcgcttaatctgccactggcccccaattccggcggtatactttcgctcaatatgcgcgcggcccaggctaatggagctgaaagtatcggcaaagagctgagcaaggacgccctgaacaacttcattaatcagcacgacatgatccacgatgccgaggtggccgacagtcgtcccttgccgccattacccgtaagggctttcaacgattcggacagcgatgaggattacttgctggatgacgatgacgaggacgacaccgatgaggatgaggagtacgagaccattaacgagcacgatgccgatccagttaatggacacgtgcccgcgacaacacagccacatgccgacgatgttaatgccaacaacgagaagccagcggtgccagtcgacgagcagcacaaggcgaacggcatcgatccaattccaggccagctcccagccagtcccgagaacgagctgaagcggcgaaaacgcaacgaataccaggccagcctggagcagaaggtcaacgacatgaagcggaagcagcgggagaacgaggacaaacagctggcggcaaagaaacgaaggtcattactcacatatattgccgctggtgttgtggtgggcgtgatctgcgcctacgcatacacgaagctaggttaagtgccccgtagccactaagtagtcgtagatcagtagtagcaatagctgtatgacgtatttagttgccgtaggagaccgattcctcccctgatacccgatttccgacttccgatccccacctgctcgtccgcctgacccggcatctaatgcgggcaacgaatcaaggacgacgtgcaacggatcggaaaggatcagagatcggacggaatcgcatcgcaacgccatgcaatcgcacacgaattgcggatggcggattgattgagctgaacgaacgatacaagatgcataaatattagggaattttttatatacgaaatacaagaaggaaaacaaaagaaacaaatgaaagaaaagaagcaactaaactaaactaacgaaaatcgg

SEQ ID NO: 4659 - protein, 548 aa, DROSOPHILA
MSEQKTSGSGSAAAARLQIEAEYKDKGPQWHRFYKEICETCDREAKEKQFSTSESERHTNRGLNRYRDVNPYDHSRIVLKRGSVDYINANLVQLERAERQYILTQGPLVDTVGHFWLMVWEQKSRAVLMLNKLMEKKQIKCHLYWPNEMGADKALKLPHVKLTVELVRLETYQNFVRRWFKLTDLETQQSREVMQFHYTTWPDFGIPSSPNAFLKFLQQVRDSGCLSRDVGPAVVHCSAGIGRSGTFCLVDCCLVLIDKYGECNVSKVLCELRSYRMGLIQTADQLDFSYQAIIEGIKKLHDPTFLDAEEPLISNDTETHTLDELPPPLPPRVQSLNLPLAPNSGGILSLNMRAAQANGAESIGKELSKDALNNFINQHDMIHDAEVADSRPLPPLPVRAFNDSDSDEDYLLDDDDEDDTDEDEEYETINEHDADPVNGHVPATTQPHADDVNANNEKPAVPVDEQHKANGIDPIPGQLPASPENELKRRKRNEYQASLEQKVNDMKRKQRENEDKQLAAKKRRSLLTYIAAGVVVGVICAYAYTKLG

SEQ ID NO: 4660 - DNA, 3970 bp, DROSOPHILA
ctataacttcgagcagactaactcattggttgggttggttaacaaaattgcccaagagtacctcaataaatgcccaccggtcatatattatgatagctttgtggaaaaatctgacggattaattctagagaatttgttcaaggtaagctcgaaagaagcctttagtgcactaatacataagaacattgcatttaaaatatcaaactaaggttatataatgagttcactacattttttatcaatataggtatttacatgtaatctgtacaccttatggacctgaactgggcgatagccatatcaggccatatcgtatccgtataagcaacagacattcgttagtaatcgtgtttaaataggttctcgcagatatatcaaaattatatagcataaaatcattagttacatcatttaacaaacattcgctgcgtctttgtttttggaatgtgagtgcttaatctcaaatttctagcttttatagttcctgggatttcgacgttcatacggaccatatcgacttggctattgatccttatagaatcaatatgtatgtagaatgtatatactttacatagtcgaaaacgctcccttgtacttgtaacatttattttaaagaatctcgtatacccttttactctacgaataacgggtatgaatacaattttatttacttttcagactattcctattactttctaccacggggaaatcaatgcagactacgaagcaaaaaataaacgttttacgagccatatagattgcaattgcaaaagctacattcttttcctttcggacccattaatgacgcgaaagattttaggcccgcaaactgaaagtcgtgtagttcttgtctcaaggtccacccaatggagacttcgtgattttttgtcttcggagctatcctcaaacattgtaaatttactagttattggggaatcgctcatggctgacccgatgcgcgtgagtattgcttaatagggatacgtttttgtaacaaataatgcgcttcacacaggagcgcccatacgtactctacacccacaagctctatgcagatggacttggctcaaacactccggtagtgctaaccagctggataaagggagctttgtcacgtccacatataaatcttttcccatcgaagtttcaatttgggtttgcgggacacagatttcaaatttcagccgcaaatcagccgccgtttatttttcgaattcgcactttagattcctcaggaatgggccagttgcgttgggacggagttgaatttcgtctgctgacaatgatatctaagcggctaaacttttcgatagatatcactgagaccccaacacggtcgaatacgcgcggggtagtagacaccatccaggaacagattatagaaagaacagtagacattggtatgtccggtatatatataacacaggaacggctgatggactcagccatgtcggtggggcactcacccgattgtgcagctttcataacacttgcatcgaaggcgctgccgaaatacagagccataatgggaccgttccaatggccagtctgggtcgctctgatttgcgtttacctcggtggaatatttccgatagtttttaccgaccgtttgacacttagccatttaatgggtaattggggtgaggtagaaaacatgttctggtatgtatttggcatgttcacaaacgctttctccttcaccggaaaatactcgtggagcaacacgcggaaaaattccacacgccttctaattggagcatattggctctttacaattatcattacatcttgctacacaggttccatcatagcattcgtaacgttgccagcttttccggacaccgttgactctgtgttggatctgctgggattgttctttcgcgttggaaccctgagtaagaaaaggttaggctcgctacatttgtatataatatttgggcttcttacttaaagacaatggtggctgggagacctggttccagaactcgacccatataccgacgtctagattgtacaagaaaatggagtttgtcgggtccgtagatgagggcattggcaacgttacccagagcttcttttggaactatgcctttcttggctcaaaggctcagctcgaatacctggtgcagtcaaatttttcagatgagtaagatcgatcctttatttttaatcttcccaccgtaaacgatatcctcttttagaaatatttcccgccgatcggcgcttcatttgagtgaagagtgttttgctcttttccaaataggatttctgtttccccgagagtcagtgtataaaatcaaaatcgactcgatgatattacttgcccagcaaagtggtcttattgcaaaaatcaataacgaggtaagctgggtcatgcagcgatcatcttcaggacgcctgctccaggcaagttcttcgaattccttacgcgaaataattcaggaagagcgccaattgactacagcggacacagaaggaatgttcctgctcatggcactgggctactttctaggagccacagccctggtatccgagatcgtcggtgggattaccaacaagtgccgccaaataatcaagcgctcccgcaagtcggccgcctcctcttggtcgtcggcgtcaagtgggtcaatgcttcgcactaatgccgagcaactttcccatgataagcgaaaggccaatagacgcgaggctgctgaggttgctcaaaaaatgagttttggaatgcgcgagttaaatcttacccgcgcaacgcttcgggaaatatacggaagctacggggcacctgaaacagatcatggtcagctagacatcgtccacactgagtttccaaacagttctgcaaaattaaataatattgaagacgaagaatctcgggaagctcttgaatctctgcagcgtttagacgaatttatggaccagatggataacgacggcaatccttcctcacatacattccgtattgacaattaatcacagaaatttttaaatgcaaatacaaaataatcactttagtgcacatgaaattatatgtattgaaataaaaagtttgatgcaacaacaaattttacagttgtttggtattttgtatgggaaagtttgtggcaatatatggttttacttgaaagcggattggacatggtcacactgcccacaaatcacaacattgcgttataaatgaagcacatctagttttgtgttaagaaagtggttcacaatttatatagcaggttatggtaaaacatcgatcgttccgaaaaattccgctcgttggcacattttctaaatttttcgtgcgacagcggtgattattatatgatattattatgattatatatacaaaaattattataattatataaaagttggcgaccatatcaaaaaggttgctataaaaacaaatggcaatttatagcggagtttcactcccaaagcgatgttctccacccattccagtcagtcatggtaaatataccttctaaaaaatatatgattttttcgatagagatacacgggcacactagacccaccgatcgcgactttgtgtgtgttaaaatgacgcgcatatcgttttgggctaataatattgttcacgttttataaaacagatacacggttaagctctgaccggtcgtattattatctgtgtgttcttggttgacacgtttatttcatttattctcatttaaagcaacgatgtgaagaacagtgcgggcgtttctcaacataagaatacatacaaacttatgcgtgatggtgagcaaataaaatagttcaaaaaattactcggccaccgccttaaccgtacaaacggaaatacataaaggtaaagggctcaacaacagtattactgattaggcaattgatttatatttcaaacttcttaaataaagtgtccacaaatatgtatgttcttagcatagaggcgtagtcggtgagtcagccacgccaacagttaacagtcgtcattttg

SEQ ID NO: 4661 - DNA, 1674 bp, DROSOPHILA
atgcgcttcacacaggagcgcccatacgtactctacacccacaagctctatgcagatggacttggctcaaacactccggtagtgctaaccagctggataaagggagctttgtcacgtccacatataaatcttttcccatcgaagtttcaatttgggtttgcgggacacagatttcaaatttcagccgcaaatcagccgccgtttatttttcgaattcgcactttagattcctcaggaatgggccagttgcgttgggacggagttgaatttcgtctgctgacaatgatatctaagcggctaaacttttcgatagatatcactgagaccccaacacggtcgaatacgcgcggggtagtagacaccatccaggaacagattatagaaagaacagtagacattggtatgtccggtatatatataacacaggaacggctgatggactcagccatgtcggtggggcactcacccgattgtgcagctttcataacacttgcatcgaaggcgctgccgaaatacagagccataatgggaccgttccaatggccagtctgggtcgctctgatttgcgtttacctcggtggaatatttccgatagtttttaccgaccgtttgacacttagccatttaatgggtaattggggtgaggtagaaaacatgttctggtatgtatttggcatgttcacaaacgctttctccttcaccggaaaatactcgtggagcaacacgcggaaaaattccacacgccttctaattggagcatattggctctttacaattatcattacatcttgctacacaggttccatcatagcattcgtaacgttgccagcttttccggacaccgttgactctgtgttggatctgctgggattgttctttcgcgttggaaccctgagtaagaaaagaaatatttcccgccgatcggcgcttcatttgagtgaagagtgttttgctcttttccaaataggatttctgtttccccgagagtcagtgtataaaatcaaaatcgactcgatgatattacttgcccagcaaagtggtcttattgcaaaaatcaataacgaggtaagctgggtcatgcagcgatcatcttcaggacgcctgctccaggcaagttcttcgaattccttacgcgaaataattcaggaagagcgccaattgactacagcggacacagaaggaatgttcctgctcatggcactgggctactttctaggagccacagccctggtatccgagatcgtcggtgggattaccaacaagtgccgccaaataatcaagcgctcccgcaagtcggccgcctcctcttggtcgtcggcgtcaagtgggtcaatgcttcgcactaatgccgagcaactttcccatgataagcgaaaggccaatagacgcgaggctgctgaggttgctcaaaaaatgagttttggaatgcgcgagttaaatcttacccgcgcaacgcttcgggaaatatacggaagctacggggcacctgaaacagatcatggtcagctagacatcgtccacactgagtttccaaacagttctgcaaaattaaataatattgaagacgaagaatctcgggaagctcttgaatctctgcagcgtttagacgaatttatggaccagatggataacgacggcaatccttcctcacatacattccgtattgacaattaa

SEQ ID NO: 4662 - protein, 557 aa, DROSOPHILA
MRFTQERPYVLYTHKLYADGLGSNTPVVLTSWIKGALSRPHINLFPSKFQFGFAGHRFQISAANQPPFIFRIRTLDSSGMGQLRWDGVEFRLLTMISKRLNFSIDITETPTRSNTRGVVDTIQEQIIERTVDIGMSGIYITQERLMDSAMSVGHSPDCAAFITLASKALPKYRAIMGPFQWPVWVALICVYLGGIFPIVFTDRLTLSHLMGNWGEVENMFWYVFGMFTNAFSFTGKYSWSNTRKNSTRLLIGAYWLFTIIITSCYTGSIIAFVTLPAFPDTVDSVLDLLGLFFRVGTLSKKRNISRRSALHLSEECFALFQIGFLFPRESVYKIKIDSMILLAQQSGLIAKINNEVSWVMQRSSSGRLLQASSSNSLREIIQEERQLTTADTEGMFLLMALGYFLGATALVSEIVGGITNKCRQIIKRSRKSAASSWSSASSGSMLRTNAEQLSHDKRKANRREAAEVAQKMSFGMRELNLTRATLREIYGSYGAPETDHGQLDIVHTEFPNSSAKLNNIEDEESREALESLQRLDEFMDQMDNDGNPSSHTFRIDN

SEQ ID NO: 4663 - DNA, 3317 bp, DROSOPHILA
aaattagctcatattgtcaggctagagcgaatggaggtcatatggagatcgtcgcgtgttcattttttgcttacgtgatgaatgtcatgaaactgaaagctttcgatctacttaaaaatcaaatttaaaaggtagctacattaagatgcaaaaactattgagttattaatacacaaacaaagcaaacaacaaggtgcatcgcaattatcctgatgatcttgacaacaagcgaattagattagatagtcagtgcgaccactaagaaattctatgggaatgccgtcagcttccaaatgtaaagtgacttgcataagtcagcacagtccccttatgtttggggtagattttgtaggtcaggtgacaaaggtgaaccaggtggcactgaatggagccgaacggccagccgggtcacgtttcccccaaatcccacaataatggggttggcgctgtctagaaccgaccttggctatagcaatagtctactatgcaataaatagtgtgcactcgtaatgcgttcccaacaggggtttcggtacagaaatcaatatcaccgcaatggccatcggcaattgacaacggacaatgattgaatgggggataatggggcctagctgggcagaccccaacatcggaatggcatttgtacaacttctgccataaactatgcaaatctggcgtctcctgggatatccgccgttcgcaatagcaaaatgtcgactgcatttccggcagccaatttaattagttgttaggcaaacattcgggtaatcagtggctaaacagcttatttagctgcatttggtcattcaagttggattatgtctgtgcagcgtaaatatgcacaaaatgttgcacattgtttcggctgaaatataatattatcttacaatgagacatagaagcagcgtttaacgcgcacaaacataatgggcaaccgacatttaaacaatcactatagcactgaaaaagttgacaacctcaaacttcatacgtttggcagctcggccagcatttcagttcattgatatacagaacattgttcagtctacatcaattttgaattgtgaatattcggtaaagattattgtgataaaaatggaaaccccaagcgagttaactgagaaacagaaccaagaccaacctacctaccagccgcgactgaacgaggtggcccaaaagtttctcgccgatttggacgcggagcgcaagcgattgtccgcggagtttccactttgcgcactgctaatcgacgaatgtaaaatcaatttggctctttacagggtattttaatggtacttatcccaatattccagctgtggaccgtgtctactccactggtcgcattcccggcaaggagcccttcgcagacgtgtaccagcagaagccgatgaagattatccaaaaggtcttcgtgcctgttaataagtttcccaaggtgcgttttatacaattagctgtcccctccgtccgcaaaataaatccgtacccttgcgcagttcaacttcactggcaagatcctagggcccaagggcaactcgctgcgtcgccttcaggaggagacccactgcaagattgtcatcaagggtcgcaactcgatgcgcgatcgtaacaaagaggaggagctgcgcagctcaggcgacccgagatatgcccatcttcacaaggatctctttttggaggtcagcgcggtggcccctccggcggagtgctatgcacggatagcctacgccctggccgagatccgtaagtacctcattccagacgataacgacgatgtttggcacgagcagcagcgcgagctgatggaaatgaatcccaagtcggccaagaaaagtaacggactcaatatggcgccctacaggtaatggtcatcttattctctctgcataccgatgcaacttgacttacttgacaagcaagttaagcatgtggtatccatctgcttgccattgggcaaagggtaaaaatccattgttattttgcagatcgaatttcgacaaggcgattggagccatcaggaatagggctcccaagtacaacaaccagattaggcgagttacggaaaatccgcgcgagtaagttacttgtaaagtataattttgtatcatttaatgaccaaaccaggagttaccgcgtcctagtagttccttgaatcctagccaacatgcgttaaaccagcatttaacatttcgatctttatagagtcgcctatatggaggaggtggaatatgattatgatgaacatcttatgttctgctccccagtcgtccgtctataggctatgagtatagcaaacgtaagtgtttggtagtgccggggtctgttacataagatagttttatgagatgcaccttagatgggaaccttgggatttccattagattatattgtactatcaaaaccaaaaacagtgcatgagtaagatctcagatcaaactctataatatactagaatgactaatattatacaacgatttacttcagtttagtaattacaaataataatcaaccaattttatagcacctacatcaatgacagcgacaaacgctacgccatttaaacgtggatatccgtatccaagtataagcccaatcctgctatgtggactgactgagtttatacaatccaaggaagcacattaaagaaagcagcatttaaaatgattcttttaattaataaacaaacatttataaaaagcgcacttgttaaaattatatcctgagttcgtaattttctatgaatttaaaaaactaataaaatgaaaggcaatgcatgaattttataaatactttgtactcagatctaacaatatcttttatattcttactccgtaacttacgccgacacgaaagcttaatttattctttaaccgaaaagatattccatgctttcaagcttttgtgtaaaatacaatgtaaaatcgaagtatgtaacgtaaggaaaatgtaaaaagtaaataaaacccaacgaaaaatgttaaatgaatttatatgcaaattaatattcagtcatatatatatatatgtcatatatatggcatatatgtcatatatcattatggaacattgactaatatctttaagatctcttctgagaaatcttgccaaaagatttacggggtttcgtgtcagtttgaaatcgaaagacactatagaaaaatcgaaagtggatcaataaactttatacggcgccttcgtgactgataataatcagtccataatcacgcgatttatatccttcgatcggtggcacacttcagtcacatgccacatggatcgtaaaacgcaatcgagactatcgctatggactttggaca

SEQ ID NO: 4664 - DNA, 928 bp, DROSOPHILA
ctcggccagcatttcagttcattgatatacagaacattgttcagtctacatcaattttgaattgtgaatattcggtaaagattattgtgataaaaatggaaaccccaagcgagttaactgagaaacagaaccaagaccaacctacctaccagccgcgactgaacgaggtggcccaaaagtttctcgccgatttggacgcggagcgcaagcgattgtccgcggagtttccactttgcgcactgctaatcgacgaatctgtggaccgtgtctactccactggtcgcattcccggcaaggagcccttcgcagacgtgtaccagcagaagccgatgaagattatccaaaaggtcttcgtgcctgttaataagtttcccaagttcaacttcactggcaagatcctagggcccaagggcaactcgctgcgtcgccttcaggaggagacccactgcaagattgtcatcaagggtcgcaactcgatgcgcgatcgtaacaaagaggaggagctgcgcagctcaggcgacccgagatatgcccatcttcacaaggatctctttttggaggtcagcgcggtggcccctccggcggagtgctatgcacggatagcctacgccctggccgagatccgtaagtacctcattccagacgataacgacgatgtttggcacgagcagcagcgcgagctgatggaaatgaatcccaagtcggccaagaaaagtaacggactcaatatggcgccctacagatcgaatttcgacaaggcgattggagccatcaggaatagggctcccaagtacaacaaccagattaggcgagttacggaaaatccgcgcgagtggaatatgattatgatgaacatcttatgttctgctccccagtcgtccgtctataggctatgagtatagcaaacgtaagtgtttggtagtgccgg

SEQ ID NO: 4665 - protein, 266 aa, DROSOPHILA
METPSELTEKQNQDQPTYQPRLNEVAQKFLADLDAERKRLSAEFPLCALLIDESVDRVYSTGRIPGKEPFADVYQQKPMKIIQKVFVPVNKFPKFNFTGKILGPKGNSLRRLQEETHCKIVIKGRNSMRDRNKEEELRSSGDPRYAHLHKDLFLEVSAVAPPAECYARIAYALAEIRKYLIPDDNDDVWHEQQRELMEMNPKSAKKSNGLNMAPYRSNFDKAIGAIRNRAPKYNNQIRRVTENPREWNMIMMNILCSAPQSSVYRL

SEQ ID NO: 4666 - DNA, 5144 bp, DROSOPHILA
tttgaacttaaacgagtcgaataaaaggcattctccttcctacataaatcatcggccataactaaaggcgctaaagtaagtaacttgccggtatggatgtgagatacgtccaagccgcactcggatcattcatcgaatccgatcggatgtgagtaaaagccgaacgattctcaactgggttgcaatggagaactggtttctcttctccatatctctctcgcgcgggaaatctcctctggagattcaatagaaacgctatgaatatggtataccctgatatttaggtagcttcgatccactaaagatactcttggcatctcaaaaaagtatgttgtgtaaaatagagttcatagttgcgctcctctcattcaacacggattcggattcggatatggactacgatctggtgaccatcgaaccgctcggccaattgacagtgcgtgtcaggttcgaggtcggcgtggacaagtgtggagtcaactttgatctcctgccatgtcggtgagatgacgcgccgactcaacatgggcgccaatcaacggcgagttttgtgaactgaaacagtgatgtcggcttatcatgttaagctctaaattaattcaatttttacaatctaaaccattttacattgaattcaagtagtagttacaatagtttctgtaaaaacctttaatatattgccttaggtcaacaaaaaatacataacaatttgtgtgccgctcaccatcgcatcgagtgcattcatttccgggacgtgacaattagtggagttgtactgtactgtccgttaggttgttaaaagtcgccttgcccgccgcgacgcgtcttattagcgagcaattagttaatgaacaccgatcgggagtcatgtagaaaggtaaacaactttatttacattcaacgcacatgagccaggggcgggcgaaaaggtgagcgactaggggcacgtggcgtacgaagactatggctatgacttgcgatctgagttggacccatggcctcaggcttttgtggcatccgtgtcggtgcttaggttcttcagtgactgctcaaactccacgctctctacctgccgcttgcccagatcgtatggcgggggtccgattagctgcaccacctggtcgtagtccagcgtttccttctccagcagagcttcggccagctaaaaaaacaaaaaagaaaagcgattatgtctagaagcacgtgaatctaataaaacagtttacgaggcataaaccaaaaccaattaatcttttgattgttaattatccattaaatctaaggaaaatcacaaaatctaagaaaacgtataaaggagtgccaacaaaccttctccagcttatcgcgatgcgtagtgagtatgccctcggtggtttggtaagcactcgccaccacatgccgcgcctcgttgtcaatcatgctctccatggcacgcgagaagggctttttgccaccgctgcccatcgcaccgccgccctcggtctcatccgcgtcgcgtacgtagatgggaccgagggtgtcgttcatgccgaacttcttgatctgcgagtacgcgatcttcgtcaccttttccagatcgttttgagctcccgtcgttatgcggttaaagactagattctcggcagcgcgcccgccgagcgccatgcacatcttgtcgaacagttcctccttgctgtacaaatgctgttcgctgggcgtatattgggcgaagccgagcgccagacttgtgcgcggcacaatggtcaccttaagcaggatgtccgagttgggcaacatccagcccaccagcgcgtgtcccgattcgtggtaagcgatcaccttgcgctccgccagcgatagggcatgcgaacgtttctcagttccgcctgattgcaaagttattaatgaagtaattaaataatctgcttgttcgaaaacaacttaccaactagacgctcaacggcgtactcaagattcttgctgctgacctccatctgtgtgttgcgcgccgcatgcagggcggcctcattgcatacgttggcgatgtcagcacccgaaaaacccggtgtcaggcgggccaagcgttgtgagaaggtcgtgggcggcgactccagtttcaccgatgacaagtgcttctcaaagatctccttgcgctccgccagcgtgggcaaatcgatgagaatgtggcgatcaaagcgaccgggtcgcagcagcgccttaaaaaatgtaacaagtatggtatggtatggtaatgtcaaatgattggcttgttccgaaccttgtctaggatatcagctcgattcgtactggccaacatcagcacgccctccttggtggccataccgtccatctcgaccagcagctgattaagcgtctgctccgattcgccagagctgccctgtcccatgctttcagttcccgaacgttgccgaccgatggcgtctatctcatcgatgtaaatgatgcatggcgcccgttttttgccttccttaaacagatcacgcactcgcgcggcccccagaccgccaatcatctcgatgaactcggagccgttcatgctgagaaacggcacctgggcctcggtggcgaccgccttggccagtagcgtcttgccgcatcctggtggacccaggagtagggctcctcgcggcaccttggcgcccagccgctggtacttctccggcgacttgaggtaatctacaaattccttcacctcctgtttcgcctcactgagaccggccacgtcccggaaaagcacaccgcgaccgccatcgaaaggatcaactagcgtgaacttggcacggcccatttggttctgaaacaaattaactacgtgagatccgcgaatttttagcctatacaccactactcacaaatgaatccatgctgagcgggctcttgatgctcttcatgcgggtggcaatcgacataagcagagcgcagacgagaagcagcatgagaatacgtccggtggtgtccgtctgccggtcgtaggtcaccggcacaccatccttgatgcccaaacgcttctccacatcacgcagcttctcctcaaacttgttggcatcggccaccgccatgtgaaagatggtggaagacaccttccgacccttgatgacggctccctcgtgcagaatgatggtcaccatttccatgtcgggtctgatgatcagctccttgacttcgcccacggccagcatgtggtgcacgaactcgttccacgacacatagcgcgtggaaccctgtacaataggatagattaaaaaactggacaccttttgcgggctcagacttacctctggtctctcggagcgcggagtaattagcagggaaaagaaggccacaaacatgtagatggtaaagagccacagtacggccttagtcagtacagaacgcatcttttcgtcattctcgttgctgtttttgttgggatcttcgccgggctcaccaatggtactgctagaagtaggagtactggcggcctcctctcctgccgctctgctgctcttatcgccatcctccgccgcgacagctgactttttctccttcgacgaatcatctttagccttggcactgcccttctcgggctgttcatgcttttccgtcttgccatccgaagcggtaggaggttttgcggtgctgctcaggctgcgcaggtgcatcagtctaacctccttgggagtcagctgcagggagcgcgctattaggcccacaattgccttgtactccgcctgcagctgcatcacctacagagaggaacagcctgcgtaagtctctggaggattgggatagccctctcatcatacctgccgccggctgagctgaaggagcgacagttcccgcccaatccttgggggttgtcctgtggcactgcggagctggatcagctgagatccaccgcgctgcagcgcattccgcacatgccgcaggcccttcaacattatttcccaatcgcggaccggctgcgactacgtaactccaccgaatccgaacacaaaacactatttcgttgacaggtcccgattaggacggcagcccctgcgaatactgatttataaccgaagagctccctaattcccggaccacactcttggccagccccaaaaaatgatgatttaactaaaataaaaacacacgaaatttcacgatagaccccgatagatcacacaaataccgccttctgatatcgatgaaggaaggatccgataggcgtagtcgaattgtcgtcatctatatcgatatgtcttgtttttgtattgttcaaataaattttttaaataataaacgcactctttgggagttgttagccactttatgcgtgcaattttgaaaaatttgcctatcattaatgaaagtgtataagagctaaaacttatgcgttacgcaaggctttaaataatgggtactctattaatgatagacattaatttttggtttggcgcgctctttgcgttaaactgatctccttatccaaccgatggaaggcaactgatacacgttcattttaaacatgtacaaatttcagagtctttagtttcaatacaaaatctgcagatatatgcggatataaacatatttgcgtatggatatgatggggcataatctgtctgtcaatccacccctcctatcgcactggacctactatcgatgttatcgactaaacaaatattgtgttcatcgcgccattcaaagtactgacatttacattttgttagcaacgcttttcgagaacaaaccggtgactatgaaacaatccaaggacgaagacaaggaggaatcgccggttcaaccgacgacccacaattccagcgcaggcagcaacggccacgacgccaaatctccggtggtcactactgcaccagcggcaacttgttccgtatcggtttcggatgcttcgggggccggagcttccgttcgcaccactggacgggtgaaggtgagtgagacccgcatccctgcaccccacaattctccatctgatcttgaatccgtgtcctgcagaaacccaaacaggtgtacgatccctcggacaactatgtgtcccgggccagcagcaaccgcaactctctctcttcagtcccggccacctccaatgtccagtcaccgccagtcaaggaggccaccgattcgcaggactccacaaccagtcctgtttcggagcagca

SEQ ID NO: 4667 - DNA, 2684 bp, DROSOPHILA
tgatctatcggggtctatcgtgaaatttcgtgtgtttttattttagttaaatcatcattttttggggctggccaagagtgtggtccgggaattagggagctcttcggttataaatcagtattcgcaggggctgccgtcctaatcgggacctgtcaacgaaatagtgttttgtgttcggattcggtggagttacgtagtcgcagccggtccgcgattgggaaataatgttgaagggcctgcggcatgtgcggaatgcgctgcagcgcggtggatctcagctgatccagctccgcagtgccacaggacaacccccaaggattgggcgggaactgtcgctccttcagctcagccggcggcaggtgatgcagctgcaggcggagtacaaggcaattgtgggcctaatagcgcgctccctgcagctgactcccaaggaggttagactgatgcacctgcgcagcctgagcagcaccgcaaaacctcctaccgcttcggatggcaagacggaaaagcatgaacagcccgagaagggcagtgccaaggctaaagatgattcgtcgaaggagaaaaagtcagctgtcgcggcggaggatggcgataagagcagcagagcggcaggagaggaggccgccagtactcctacttctagcagtaccattggtgagcccggcgaagatcccaacaaaaacagcaacgagaatgacgaaaagatgcgttctgtactgactaaggccgtactgtggctctttaccatctacatgtttgtggccttcttttccctgctaattactccgcgctccgagagaccagagggttccacgcgctatgtgtcgtggaacgagttcgtgcaccacatgctggccgtgggcgaagtcaaggagctgatcatcagacccgacatggaaatggtgaccatcattctgcacgagggagccgtcatcaagggtcggaaggtgtcttccaccatctttcacatggcggtggccgatgccaacaagtttgaggagaagctgcgtgatgtggagaagcgtttgggcatcaaggatggtgtgccggtgacctacgaccggcagacggacaccaccggacgtattctcatgctgcttctcgtctgcgctctgcttatgtcgattgccacccgcatgaagagcatcaagagcccgctcagcatggattcatttaaccaaatgggccgtgccaagttcacgctagttgatcctttcgatggcggtcgcggtgtgcttttccgggacgtggccggtctcagtgaggcgaaacaggaggtgaaggaatttgtagattacctcaagtcgccggagaagtaccagcggctgggcgccaaggtgccgcgaggagccctactcctgggtccaccaggatgcggcaagacgctactggccaaggcggtcgccaccgaggcccaggtgccgtttctcagcatgaacggctccgagttcatcgagatgattggcggtctgggggccgcgcgagtgcgtgatctgtttaaggaaggcaaaaaacgggcgccatgcatcatttacatcgatgagatagacgccatcggtcggcaacgttcgggaactgaaagcatgggacagggcagctctggcgaatcggagcagacgcttaatcagctgctggtcgagatggacggtatggccaccaaggagggcgtgctgatgttggccagtacgaatcgagctgatatcctagacaaggcgctgctgcgacccggtcgctttgatcgccacattctcatcgatttgcccacgctggcggagcgcaaggagatctttgagaagcacttgtcatcggtgaaactggagtcgccgcccacgaccttctcacaacgcttggcccgcctgacaccgggtttttcgggtgctgacatcgccaacgtatgcaatgaggccgccctgcatgcggcgcgcaacacacagatggaggtcagcagcaagaatcttgagtacgccgttgagcgtctagttggcggaactgagaaacgttcgcatgccctatcgctggcggagcgcaaggtgatcgcttaccacgaatcgggacacgcgctggtgggctggatgttgcccaactcggacatcctgcttaaggtgaccattgtgccgcgcacaagtctggcgctcggcttcgcccaatatacgcccagcgaacagcatttgtacagcaaggaggaactgttcgacaagatgtgcatggcgctcggcgggcgcgctgccgagaatctagtctttaaccgcataacgacgggagctcaaaacgatctggaaaaggtgacgaagatcgcgtactcgcagatcaagaagttcggcatgaacgacaccctcggtcccatctacgtacgcgacgcggatgagaccgagggcggcggtgcgatgggcagcggtggcaaaaagcccttctcgcgtgccatggagagcatgattgacaacgaggcgcggcatgtggtggcgagtgcttaccaaaccaccgagggcatactcactacgcatcgcgataagctggagaagctggccgaagctctgctggagaaggaaacgctggactacgaccaggtggtgcagctaatcggacccccgccatacgatctgggcaagcggcaggtagagagcgtggagtttgagcagtcactgaagaacctaagcaccgacacggatgccacaaaagcctga

SEQ ID NO: 4668 - protein, 819 aa, DROSOPHILA
MLKGLRHVRNALQRGGSQLIQLRSATGQPPRIGRELSLLQLSRRQVMQLQAEYKAIVGLIARSLQLTPKEVRLMHLRSLSSTAKPPTASDGKTEKHEQPEKGSAKAKDDSSKEKKSAVAAEDGDKSSRAAGEEAASTPTSSSTIGEPGEDPNKNSNENDEKMRSVLTKAVLWLFTIYMFVAFFSLLITPRSERPEGSTRYVSWNEFVHHMLAVGEVKELIIRPDMEMVTIILHEGAVIKGRKVSSTIFHMAVADANKFEEKLRDVEKRLGIKDGVPVTYDRQTDTTGRILMLLLVCALLMSIATRMKSIKSPLSMDSFNQMGRAKFTLVDPFDGGRGVLFRDVAGLSEAKQEVKEFVDYLKSPEKYQRLGAKVPRGALLLGPPGCGKTLLAKAVATEAQVPFLSMNGSEFIEMIGGLGAARVRDLFKEGKKRAPCIIYIDEIDAIGRQRSGTESMGQGSSGESEQTLNQLLVEMDGMATKEGVLMLASTNRADILDKALLRPGRFDRHILIDLPTLAERKEIFEKHLSSVKLESPPTTFSQRLARLTPGFSGADIANVCNEAALHAARNTQMEVSSKNLEYAVERLVGGTEKRSHALSLAERKVIAYHESGHALVGWMLPNSDILLKVTIVPRTSLALGFAQYTPSEQHLYSKEELFDKMCMALGGRAAENLVFNRITTGAQNDLEKVTKIAYSQIKKFGMNDTLGPIYVRDADETEGGGAMGSGGKKPFSRAMESMIDNEARHVVASAYQTTEGILTTHRDKLEKLAEALLEKETLDYDQVVQLIGPPPYDLGKRQVESVEFEQSLKNLSTDTDATKA

SEQ ID NO: 4669 - DNA, 52872 bp, DROSOPHILA
tgcccaaggtcggattgtaaattctattttttctgtttctccgcgttgaaatgcagttcaccttagggcaaattctctgggcaattgctgcggccttggcggtaatttccttgtcaggtgaaaaacacaggtggcagggggttggccagataattgtaccactttcaccccctcaacagtgacctacattaaagttgaggaaatgcatttgccgccgaggagctgggagcgaaatcaaataattacagcggcgtcacatggcgtatgagtaatttaaatgaaattacaaagtcgccgcagctgactaacctccaaaaaataatagcaattgcaattcaaaacaagttcattgcacatgcgccccagcattagaagcaacaaatcgaatgggaaacgtaccgaaactttgatacccttttcggattagatgatgatatagatggtatctagcactgctacaaatactaaataatcgaactgaacccatttgaacgattttaattagttacattttattacttgtaacttatctactctgtctatctactgttcaactgtgataaagttagagtatctttcaagatcctctgccatggtgtcaacactcctggaaagtgtattaaaatcaatcggcagtcgtacgtttcgctggcaacatgtgtccaaacatcgccaagtggaagtggaaataaacggaaataagccaaactcaagcaggtttaggtttttggcctgcaacaaaaacaaaaacgagtttgttgcagcacatgtggatgtgtatgtgtatgtggatgtggctgccccgcgagacacgacatatggacatattgcttgtaacatttatacaaatgtactctgttcgcttcataaagttagagtatcgtgcatgttgccccgcaacatgtgctctcgctggcaacatgtgtctaaacatcggtaagcagacaacttttttgtggatcgattcgatcagtttaagttttccatttgcaccgaacgcaacgcaagtagctcccacaaaatcggaatcagccgaaacgaaaacggaacacaaataacagaacgcgcgcgctcaaagtcagtgcttgatactaagatatagcacagatatactacatacatatgtatgtggagcatcggcgataaatattgtaaaattatttttaaaaatatgttcgactcgtgtgcgactgtttgtgcgacgccgaccaacgcagtccgcaaattatttttctgcactcatttcatttggcgattgtccgttgcaattcggccattggtgtccgttttcctggcgaaagaaatatattaagttgtttaatttaacatccgtgctcgggaattcgctataacagcatatacacgagagttttttaagtgagagcgagatttttctgcaaaaaatattaatgcaactgtaaataacattgccccccacttttgttttaaatggcttaaatttaacgccctgtcaaaattgagtttaacattaaggtcatttgagttcaaaaagtcccttgcaagcaagcaattaatcgaaagcatacatgtttcaaggcatttaatttaaagtaaattacgcggggcattctcacaattgaccaaattttcgctgagtctcggactcccaaaaattccgagtgcataaaagtaattataattatactaattcaaccacaaatgtccacagaatatacaagtataattgaaaatataagtgtacgcgagtgccaatactgtgaaatcaatacgaatgagaaatgtgactaaccaatcaaaggaaagcaattgtgccaaacctcgttgaaagacaacaaattaaaaaaaggtatagaaatatttgcaaccatttgtgatgcaaatggtaatggatgcaaaataatcgtaattaatggctgcgcttgcaatttaatttttggcccagcttggctttaatttcgtctctctgcttctctccttcgccattctgttttgcgattgctttaggcgcggcttgcggttttttcggattcttggtgaagcgaacggttttattttagtcgcttggcttagtaaaccgttctaatcggcattattcgcagattcttttggctttttctttgttcgtcgcttatttggcttgcctttccagctgcgaaatagaagcaacttagtttattatattcctcagctgcaggtcatgacattcgtgaaatatctttttgttagtgcctattattgcttacgacgactggaagcagcaaagaaaaaatataaaaaacagctgaccacgtcaaaagaaaccaatgaaaaaaaaacttggccaacaatgacgaatacggcgaacacaaaagcaaagacctacgcctaatttaaggtcatcagcacagtaaaacaacaacactggcaataagccgaggaagaagcagcatttactgcttatggctacgaaaaaaaaaactaaagtcgccggcgtctctgattttttcttcggattttctgattttgtctatggcccttccatgccatttgcgtggagaattatcgggcaacggcacaaaaagccatgattgcacgtacaccaatgcactcgcgttcgtgttcgtacatcccaaataaaacagtaacagttgctgctccccctcccaaaagctcagctcatttgccttctcggtttgaacagcaaaatggaaagaaagcccctagaaaacagtgatgatagtactgtagttaaaccaggtttccagtatttaaccattgtatccattttatatatcttaaatttcgtatacttaccatacatacatacttacaagaagataaaagcttaaataagtaattattattaataattattgatacctaaagaagtttccaaactcccaacctatctatgtagatccaaaccagtttcgaaaatccggcagactgaaaggcgactgttgcggatgctttggttttccgacgagaaaagtggaaaagtggaaggcagccccactcgagataatcgatggctttggtcttctctctcgtgcgcttgtttatgttttttataaatagctcaaaaaatgcgtaaaatgagcaggcaaaaacaaggtataattagaataaatgttaagcccaaccactgacacatgtacactaaaactgggcgtgcaagaatatatctggtgaggttttgggccagaacgtgtaatgcatttctatctataagttgtgatacgctccatcaacacttgatagcataattaatgcggattaacatttcagcttctatttcgacgcaagtcggcacaaagcgttcgtataatatttattgacaaagccatttatcacgatgtccgctgggtgtgcataattttggggccacgtgatgtcgcccgacttatagatagtggtacacagcgagtacaaaattatatacctacatatgtatttagaagtcagtactatctaaaataaaggtggggtggcccacctaaaagtgcgactgactgactatgcaaatcaattgaaagtgtcaggaagcgatggggagaaatggaagtgggaaaattaaaacgagcagcaaggggggtaaattggaaataataattttaaaaaccaacacggaaatgcaaattcccattttgtatctacgcatagccgcatctggttttaacttttattgattttaagtgacacgtccacgcgatttgaacgaggaagtctctgagtcacttagctgttgtgtcattattgcacaatgattatggctgccaaaaggaggcttgtcgcaggacagaatatttaaatctgcctgttcaataattaagtatacaagcatgagtacttttatgagctgcttttcgccgtgttgtctccgcatgtgatttatttatggtcttttgtttgcccctgcccactgtgcctgacttcgtcgaattctacttggcccggacaaagagccttactgctgtttgtttgctcaagttggcgtgaaaacagtgtcataattacacaaataaatataagtctctagatatgtatttataggtatgtacatatgtatacatacctgtcggtgcgccgaaattcaaacaaaggcactcgagatgtccgtccaatcgcattcagatattcgagaccacgagagcactctcgattatcatctaatactttgtgactggccgtcgacaatcgatgatttaataaattccctgtttaggtatcataaaatgtttattacacatttacgattcggtggcccaaattgtgccaaatttgcaagagcagctgccaagaaacttttccggcaatatgctcaataaatttttaatgtatatattttaggcttgaacagataagaccaattaaataaaatacgccttaggatttgcgtgggcattaaataaaatgtgtcaaagtttttagtttcgagagggaggatttcagcactttgtaggcaatatgttagattataaaatgtgtttcagttaactgatttaaagatttacgagacgtagcatttcttttttgacggcttagatccgcaatgaatacataaattagaaggtgccaaatctcacttccacttcctgtgccacgcccacatatatatctacgtagaatctagactccagtgtccgccgatcattaatcattaatcactcataacccattcaaatcatcgcctgttgcgattcggatttgcatattgatcggcgcaggcaggtgactatatttttatagtcttcccaatctgtgagattcggggcgagacatgggcccacccatttgatcggttccgtcttggtttgattcggagcacttgtaatttgttttctgttcacatttcgcattttgcggaacacaaagttgtcgattgattggctctgattgagcgggtagttgcgcgggagacagtggactccgagccagaactggtttcccacaaaggcgacgctacttccgccatggaaagacactttgttttgtttccagtgcggcaagtaattatcgagccgagacacccgggaaaccaaaccacagtcgtcagaacactttgattgccgggcaagagccgggactcggatgcccagaccatgtcagccctccctctgcggttcacgcacaaatgggctcagctgtcacggttacggattatattatgtcacttcgtgtcgccacatcagtctgctatccggttacattcgatattctaagccggacttataacgtcgtttgttcgattatttatcaatggttgtggactgagcaggggttcaggtgtgctcggaatcttagaagaaatccgaagttgtgttgtttactgtttagataatactcaattatcaacaacgatatgtgatacacgctcgctaatttctggaaaaaatcgttagattcgagatggtctttaagttttttaacatatcgcggagctatatgtgattacgtgatcctttctggaatttttatattttatatggcttacgtgttctgtttagtcaagtggctggattttgttctaaacaatccgaaagattatttttttgtgtcatcgaaccgggcatcttttttgtttgcaaacaactttttttctttgtttattttttatgagtgtttgttgtgttcatattgaattactgctgggaccggaggtatctgtaactcgaaaatgagtttcgtatttctgggaacgcttatctggatttcacagttttaggggagcacaatatttttatctgatagatacggaacttgctccggaaaaggaaggttaatgctactattgaggaaatatctaaacttttcttcaacgaatgagtcaaatacatatcgaaatataatataattaacgtagtgattcggaggtgtgcaaatatgtcgtgcacaagaacgctactttcacaacggactggcttttaaaggagtgtcttgaaagaatgaagaaaaaataaatatgaaggcgatgaagacatcgtttctcgatgaccatgggacacccgctctaagtccggaccaacccactttccccatttctgccagctcgcatttatagaattccagatacgcagaacactcccacgcccccgcgtgcaatacggtcagatggaccccacccagcgccctgcattaggtgtgcaggtcggccaggtgtaaactggttagttaatgatcggatggacaggcaggaattcgccagtgagtaaacacgtatgggcaatgcgagcagagtctattaatatagccgcaggccgtcttgtcatgtgaaactgggcttaaacaaacgggcgggccggtgcaattgctgttgccgtctagtgactttgttttgaatggccatttcgaaaaggaaattcgagctattgggtaaacagaacccagacacactcgtatcttgcagatatgtcgaccacttgacgctttggctagcgacaacgcccgctgaaacggtagcacatgcagatacatttgtatctttgccgcacacgtagatacatgtgtagccagttcaacgactgccggcgaccagttttgttttcgtttcgaaaaagaccacaagaaagggaattaattatttcagtttgtgatttattgactccaattcgcgacagcttaccaaccatgcactactgatggatggagctcgacaattggcttggaatttgaagtacaatcatttaataaccggcttgctaagtgggataagaagccaaagcattaatgctttcgcagattataataactcgacaaagaggaacaccctgcttaatttcaagtctcgtgcatttccgatacatgtttcaaaactgtaatttctgcttgttttccctttcacctgggaaattattgccctccccgacgaatgttttgcggctttagtgaagcaaattgcttcaacacaacgtcagacatatcgtttacatgccgtgcacacgcgatgtatccgccaatcgtcgtgtgtagatacatttgtatctcacagtgaccattgttgcgacgtctgagtggtttatttatatcgtgttgctcttgtttcgcttctgtttctgtttcagtttctgttcggttgcatgttgtctcttctgccttttcgcatttcatttcgtttggccccataacgtgtatgcgccaacagtcaacgtgtgtatctgcgagatacatttgctgccggtcggtttccatcgaaatcgaaagtgcagttttacgtgctcgcagcccaatcgaaatgcattgtcaccaaggttattcttcttcaaatgcgtggagcaaatgattattactgaattccgaaattagtttatttctcgctaacagattatacaattaacaaaaaaggacacttgtaactcctaagaaaatgatttttcttgtgttttcaaatcaagcattataattatttcacaaattttggacaataacacataggtttttacctattgcaataaatgaataataaatgcacttgaaatctagtttggccatatcatcagttccgtattatcggtgtttttatttctatgatttcccaatcgtaaagccaaatcctcaagattagtcccatcaagtgggccataaatcaatgtcgttggacagtttaagcgtccaaagtttcgcattaagccaattgtgtttcccacactttgcacactcaaacttcctgtgatgctacaatctattctcagagcttattttatttaccactgcgttcgagcatagactatggaaaattttcacacttgatcacatcaaagtttatcaacgttttcactggacctcgccatgcactgcaaattgcagctgcagcctctgccatgtgacagttggcctcgtcatcgagtgttttatgggcccttgtctgcggcgtttccatctgagcagccagaaccgagccgatacccccaatggggtatttataggtctatgctctcgtgcgaggaggtttgtcgccttatcaggcgcaactcccgcttatcacgtgttgtagttttccgttcctctgcgtttccatggaaagtttcgtttcccgcagattgcacattgcagaaaactgaataacacaataattaaaataggtatatgggaaagttcttgaagtgcagcgatttctttcgatatcaaaacatagttacctaacttaaagaactgtgttcaaatttgaagtacaagatttctaaaattcttaaaattagctaaagttgtaaaatggcggtgaaacgagcaaaacaaaacggtccaaaagtctaagcctaaactatgaatattttatggagcatataaatagtcacttcattttctattgcttttaatttattaagggatccactatccgcgaccagttttttcgcttgactagccatgacattgacacagtaagacgttagactttgaattcggactttggctgcaggtctttgtgtttatttatttatgcgcgcattgcacaattgaccaggcgacaaccaaataaataatagactccccaatgggttgttaatgtgggccataaattgccgagtagatcccaccttcgcggctcactggagacctagacctagacctagacccaatcgtaatccgtagccccgatccagaccgagaccgaacccaagaccgcgtccgagtctgagtccgagacctaggcccgtgacttgtgtacgtgtgtacgggccatgaagcgtgaactccagtccactccgatctagtggaacctgcacttgattcgactcgactgaagtcgctttggacttacatgtaagcgccttgagctcgaccggttgtggtcagttcgagttcccgctccactcctctcgcttgtcgagcagacaaggttggcttttttccaccatccaccagcacccgtatattcaaattgctctcttcctatatattcggcccgataaggcggcgcgtatttgtgccctgtcaagtgtttgcgcacaaacacccggactccgggccaacagctcctccaaagataacacgcccagggacacatgtaagcagtctggcccactccagtgatctaatcatccggaattggaagcactacagaccccctgcttagaaagtgggaggaagctatcgtgacaaaggacacttgactttgttaaagtgtcaggagagctcgaattagttaggcagggtcagcaaggttaagtaatttacaatctatgaatatatccttgaatgtataaccctctttcaaaaccatctctcataaatcacttggttggaagccaactgccccatttgatatagcttgtttctgggtgccagacctggcacgattcacaatcgcgtggggtctaatgacccatttcaattagcttcccctgctcccccatccaagcactaactataatttgtccgactgggtgagaattgaaagtctaaatagcctcacacgacttgatctggcgttaaattgtaaagtctgtcagtttacagaaacatatgccgggagatcccgccccttaaattgccctctgccatccattgtgccgaccagaatcgtgtgatagcggcagttgtaaggcaagtcgagctaaactctaggcactttcgattttccagccaagtggcgtatcttcccccttcgttaccgcattccctttatcccaccatcaccagattctagtcagtcatcaccatcatcatcatcatcacagattcgtcgtcatcatgggatttttgtgctggtttctgtaataatgctgtatgctgtatgggctgctgttttgttgtcgtaggttgttgcccattgtttgttgctcgccatgatgtcatgaagttgtgagttaatttgcattattaactgctttgcttgttgctgcctccgcgatgtaagtacgaatactattgtggaacgggcagacaagcgggctgaaagtgagaggatgctaagcgatccgtgatagattggctatatttggtctaaatggatgcactaaacgtttaaatgattagtgtttctgctaagggtagctagttactttcaatagatttgtaatggttctttcaatcaaaatcaaatggttcaacatattcattttacgtctgactatgtaagtgaataagctgcacattcatttgggtttagagttagaatcactaacttatggatttactaccccggaattaattgcgctctcattattgttccgatgacaatgatgatccctaagccctgtcgttgaatacagctatgtactttacccctttgcccaatgcacttagatattccaacgtctgggttgttgcctgtttttcattgcggttgctggcggagtgacgatgacgatggcgacggcgttccgctcgaccgacaacggcctgctaattaccacgctaatgccggttcaatagagttcactgaaagtaaaagtttcgcaagcgcggggaaaatcgcaaagagagaaggagagagaaagagatagaaagagacggggcaacgcttggtagtaattggagcgcggcaattaagagccaaaaaacagccatagccatgttttcgacgataattaaccggtatgagtacttgcagcgcctaacggctaacggttaacggctaaagttagcagttagtacccagttaccaatctatccgcccgaccagcgccctcatccgaatcgagaaccgatccccacgccatgagcatcatcgacagcggcaagtaccgcttgcgcaaggactgggccagcgcttccatcccgtccttggtgaacatcgacgagcacgacggcgactccggcgacaccgagggcagcctcaatgccacggctccactgccaccacagaagcccccgcggcgcagctccctggccctcggactgttctccagcaaatccgataagagccagaaacgccgcagctccatagccgtctccttcctgcggcgggatagtagtaaggtaagttcggatgctcttgatactcttactaaataaactcaatttaaagttacttaaaactgcattgtgagggaaaatagcagacatagtcactcctccaacttttgagaaatttgtataaacatttgcttgaggatgtagatttaatgaataaacatatattaagtaattattcaggaattttcagtgatatttctgatatttggtaaaagagaatagagtaaagtataagctgttaggaggcatattttatataattgttcatcatacttagagaagagttataatccttggaaccagctatagaatttgagtagtaggacaaaattactagaagaataaaactattcatttgataataaaatagtttgttggagttcttatttcccaccgtactaaaaagagacatttcaactaagcctttccttcgttccttgcagaactccaccaaagactcgtacgaatcggctgtgcgcagcgagaaatctgacggatccggcacacccaccagtccggagatcgtgtacagctccgaggagaatatccgtgccagctcccccaacgatccgggcaagcagaccttcttcgaggacggcagccagtcgccgcgtccggtgctccaggggctgaacacctcgtacgagggaccccagaatgatcgacagaggcgcaggcgcagctcgctgcagaccaagctggaccggcatcgccgcaagaagatggagtacagcaaccagaggagcctggactccggcatgatgtgcagcgagtcccatagcgacctgaccaacgacagcttggccgagggctccggcagctttgccaacagaagtcgcaacggcaacgacgacgaggacgacatcatcgatcccagccacggggagtactttccgcgcgagaagcgccactcctggtggaacatcttcgtgcccgacaatttcaagaacaggtgcgccctctccgttcgtttgactctaaccaaaccgtctgcgtgtttaacaagcgccttgccaagtgactaaaatgcatcgattgcataagattgcccccaaaccaaccaaactacccacccacccaaccaatctctgctcccgctgcgaatgttgaactaacacccgtcgaatgtgtgattaattaccggcatgaaacactcccatcctcgaaactcactctttcagataaatttccggtgcccctgggcctcactttaatttatacgatgcatcggaaggggaggcatttcctcagaggagctcctcctcgcaaccgggatcaccaactgccgaatccctcgatttggcaactaaacttaacgttggccattcaatcagtcggccattcaatcagctctacataccccttgtaagattttaatagtcatacaaatgatcacaagcgaagatatgggtacaaataacaagtttcttaatggtttaagtatcaccaaatctcatcttgtctttaaatctatcttccactcaaccccacaataattgttcaattatatactatgattgatccgacttttcagatcggaaagaaaaattgaaagaaaagataatagtggatcaatctgtgatgtgtgtgggagagtaccactgctcttctgccccttcgaagcgaccgaccttcactcgggagttggtggggttcattcgctgacccctagccgtcgaccaggtcaagtcattgccgctgctcagaagcccaacggggtctttggatccgattcgagatcggccttcggacccggctcgactccattagccggctgtctatcgggcgggtcggaatatgagcctcataatgcgcactattattattattattataattattatttttattttaatgccgctcgagtcttggacgccggcggggcaattagagacggaatctgctaatccaaattcgctgatgatcagcgcttgagttatgggcatcggcttataaatattgcacgtcgatgttggtatttttgggccaatttgtgcttccttgaaagcacacaattttttgcttgttctcgtcatatcttacttttaattagccagcattttgttttttcgtcccttgtcacactttcgatttgagactttgcctgtgcctctgtttctgccttgccttgcattttaattatttttgattatttgtgattgttttgttttgttttattttctttaattaaaaacgagaaacaatggaaattatggcccaaaaggccctgtaaacaacaaaccttttcggggaaaatattgctgtgcaaacgatgcgggcttgaaagtatctttccttgttgccaaagtgacaaagagcaaaagtgggatattacttattcctataaatgaaaactttgtcacctagccatggaaattagttgcagaacatcagcgtttatcagacttatgtcttttgtatagtaaatgttttttttttctgacttacataagcgaacgggaaaaataaaaggcggcatttacaatttgcaatgtcaattaaacttgtaaagagaattaatggagcgcacaaatttagcgaattgtctaacggaatgtaaacaaaggcaataacattaattggccatatttgccgtatcggtcgcctctgtttccattctcgtatcacatcggtacatattccaataccatatattgtcatatattgtatatagtagctcgatttttaactgccatggcagcacgtttttattgcacgcgatatggatctgattgatatatagtttacattggaaaaggctttcattttaagcaaacacccaatggcattccacttgcgaacgatatgtttcattgaaagttattgggtctctgcaataataaatgcaatatatgtatatatcttttaagatttaacacaagcgcacttaataaatatatgttggtcatatctatccgctcgaaactttggtactaaaaattattcaatcatgcccttcgacagactggaacctctgtgggaaaaaccgccaagcccccactcgaagaaggtaattaaggcctggtccaaacgaatccaacagcctccagtcacaaggcataatccggctcacgtgaatatttgctcagcttggagaccgagtgtctcgccacttggctttgtgattcctaattccaatttggcttctgtttcaggccgctgttgatacaagtacgaattccatcagtcaggcaatcactcaattattccttcccacatgatgcctagacttggacttagtcttttcgatgcccacacagtagttagttaaatatcacaacattttcagcaaatatttgatcagcctatatgcttgtgcgactgtgtgcaaatgtcataaatggcatatatataactatacagaagttcttctgactctatctttagagtgcagtgaaatagttttagaaaacacagcaataaaatcaaatcgactgcctaatagcaacagaggaggtctacggtgcagaacggttatataatatactcgaagtatattattgaggtttctgttagtttttctaccgattgaccgactgtatcaggtacacaacaatttgaccagcccttttgaaactataaagttgtcgcaatgaaacgtgtttgtttttggcttacaaattaagcaatatgtcatatcaagcaccaaaaaattaagccataaaaataaataatttaaacagcactttgcaaaaccctttattataagcgtgcgctaaacgatttacaccttgtcatgaattcatacacccagaaaaattgagaacgacaaaaaaaacgagatcggttgtgcttagcgtactcagtggcatcaataagtctcatgagaagaaaccttcttgatttcgaaacaaaaacgatctcgaagttgatactttcagatggtagcagtatttaagcagtttaagagaaaaaatgagataagatgaaaatggttcgatctcgatgtgcgtatgctgagcatgattttgagatgaaaatccccaaatcgagatcgtagaaaacgttttttttctgagcataactttgactcacatcagaagtcgattagctaaaggtggtattctacctttggtctgattcactccccaaactataaggccccacacattagattgcctgactcattggtctataaggtaaaagtgcatagatcaaactgtcgtcgatgacaagcacttgaaagtgtctcagtatcagatttgaagaagcccgcacattcacgagcccaaactacttcagcttatcaaaattagcacaaaaacaaccaggccataaaaccaactcggaaaccctttaccatcatgttttcttatatatgtacatatgtttaaatcgagtactcgtaacgccgagggttttacggaagaacacaaacaaaagtaaatgcaagcgaaaatagttgtgtcgatcgaaaaaggtacttggccaaaacacgatgcctcgaaaacacactttattatattgtttataatcgaacgatttatggggtctgaccaaagaggccactcgggttcggctggccagcaactttcggtatcagcatacatatctctttataaccacccaatataaacccaattgagtcgtaattcatttttagacctgcctctgcccacaaactaaataccgtataagggtacatacttatgtacatacatatgtgctgtctaaaatcgatttttatacactgtgaatttaattaggcactctcatatgcatatgctcgtataagaatctatacatacacacatgttcatgttatccgataagctgatttgcttcagtgctaatcgatgatctctgcgatattaattacccctcagctggcggacctagaaattccttcagataattaatatggcaactaggtaatacgtttaggttcgaatgagggcccagacagctcgacgttgtcaggtgggtttctagtgatgatcaggtgtgatgggatgatgaaccgcttgaattacttgacgtgcaagtatatgctaatttcctataaatgccataagtgtggtaattaagacgtaacgttacaatccagttggggattaagtaagcgatgggacatattcattggaattaagtagctgtgacctaaaaagtattattctaacctttcactaggaagttaactggcaacctaataaaaccgagctattctacatatcaatagctcgagttacttgagtatttcaaattgctatctacatcctagtttatatctctatttgccattgtaaaacaaaattcccttctcacgttctgtttgcccaactacttagcgagcgttctaaattagttttgcaaatgtttacttatattaaacatatgctagcatttaaagaagacgtaaccgaatattactggcgaaactgccgtaatatcaacttgaaagtcatatgctaacttaagacatagattgttatttcttacaatgcagcactaccacgaataggaaatttagatactttatagaaaatccaacagctaagatatgtgtatagatgtctatatatatgtatatcttttccaacctaagttccactctgaatgaaaccaaagtggggatctggggatcgcttgggtcgagtgattacgtgcgtgtgtgcacaaagtccgccgagggagaggcctttatggcgctccgctggctgctgatttgataagtgaatacatatatatggacttactatatatatatatatatataatgtcgtaggaagagggcagcggagcacactggtatccatccatccagaatgataacatccagagctcatgccattaacaatgacacagccagacccatgggatcattttcattttgcgtctgtcagttggaaatgaaactcgcgacgcgaggcatttgaagcgagatctcgcgaattcgcggttttatcggatcgcagccgaaatatcgaaaaaatcgtcattttatgcaaatgcaaagtggcagagtgttaaactggattctcagtggcttcggcgagagtgtgttgagttaattataattcataatttatttataatacaaatcgctatatatttattgcgcgatgtgcaaagcaattaggctttatggcactaaatattcattacattaaacggcactctttaaatccaattaaatgcaatttctttgatcgcctctctacagatggaaacccaaagggaaattcattcagtttcgaactcattgttcattgaggaaaatttattcattcggattgagttttgcattcaatttcgtttcaattagattcccgctttgttcgatgctttgtttattggctgttcgttatatttcttttttgtttttgataagacggttcttatcttaatttacgtaaagcaagtttcaatttaaatgaaagataacagctctcagccgcgatgttgccgcgtcagtttgtgtaaatattttgagtttttggccaaactggtttattgaaatttctgtattctgaattcagaatcgctcgtgtattttacaaaagtgaagtcagtgaagtgaagtcagttcagtcaggtggaatacaaacatcttctggtgtttggactctcctctcatgtttgcgcatcaaggggctcgtctgtccatccatccatccatctaatcatccagttcaagaagattttgtccaggtgtccgtagaaattgcctgaatgaggcgctaatgaaggcgggctgaaattatgcctctcctgctaaatggctggcaaacacgacacatccaaactagatttatttgaatacctatcaggtggaataagagtatgcccggctagaaaaaaaaaaaaaaaacatcaaacgagttgctgatgttttcatttacgacgccgctggcgccgagaaattaaaggcaactgaccacaatcagtcgtgctcacacccgtgggtacgcgtattacaaaagtgatataaaatgcaattaattgtttcaattaaggccagtccaaaagcgctggcatccaatacgagtgcgaatgtgtgaaatgtgcgatgactgtttcctcgtctgcgcatgacaagaacccgccgacggttgatttaaatattttcgaaatacttttcatatccaaataagttactctgactatctatctccctggcagcggacgaaggccaatcttaacccaaatctgtgaatttcgtgttgattttgcggattgcggcgtaagattcataagattcaagagtagactggataagcactgaccttgtccttggcttcacacggagtatttgtgtaatggatctatctgctgatcataatcggattaaccactagatagtcatcaaattatattcatcgttcagcattgtaatcgcaccatacaaaacctcttcgagacaaactattttcattacgcaaccgtcacgtgctgacttgccctcgaaaatgacacattctctgatgccaaaagaatagcacagacaacggcaaaaagtgtcaaaaaatccaattaacctttttcttggtagttagtgagttggttggaagtagcggacgggcaaatacaaacagcatttcactcgctttatttttccagagcaaccgaaagccaaggcaaacaaacagagataacaatgcggcataaaaattctaattatgagctggaaagtgggcggtgggtattgttacccagaggggcaatttaaatatgactatcagatggtggaccgtgggcaaaacgtaatatggagtagaatcaaaaccaaagacggaattaatacacgtgacagtctttaccgcacagccgctgcagttggtgtcagctgtgtttggtcggtgataagggccgactttggggtattatatttgtatttccctgctcgacggctccgccgacaagccaattaattttgtcatcaatattttccacctcccgctgcggtgacagttaaattgaatcattaaaagtcaacagtgtcgactgaatttatcttttgcttgttttagccaccttccccttttctccaactcatctgtcaaatggcgcggctatgattgatcgaccagctaatcggtatccgatattttcccaaaacattcatcaatttcctgtaattattttagccctagtccacagaaattgcatttagtttcgggctcgtttcggtttctacttcagtgtaagcaatgtaatgaactcagtgcgaaaacccaaaaacatttgaactcacaatgcagaacgttatacttacatcgcaatactattggtaagcccacatgtgcctttcaaacacttatgtatatattaaagagtcttaaaggggttaaattcaattgcctggtaactatggaatgacagcctttcctctgaattcgtatctttatgatgactgtttcgataagatcccgatctttcgattagatgccaaacattttggtgagtcgagatggcaaattgaggtcattcacaaatgcggactaaatacttatctttaactcgaagatcattagactcactgtaaagtaagatccaaaagtaagtcttacgataaaactactcaacttccggtgagctgaagaccggagaccattacaattaggcagtataaacatgatcttgagcacgtaatcacattccccactctgccatcccaatattcctttgtttgctcattgagattcgcctttttggcgttgttagaccttgaccaaacctacaagttttggaaactgaaggtagcaaacacgatccataaatacgactacttcaaataataatgcttgattattacaagcatttacaggcttcagaccaacctatcaattgcctgttcaattagtagtgcttttccgttttcattcggtcaaagtgtctggccatttcactgccccactgaacaattgcctttcgtggcgagttcccattaattttcactgcttaaaattgccccaaatttagataaactgtctatgccaaacgctttgaccgtggcaaacatcatagactttcgggtgtttcgtatgcgaaaccttgagttctggcaatctcaactgaaatagtcgcgaattgtgggaattttctttgcactcatatcatatcggtctataaagtgttcacccttgacaagccatagtatattcgcacgtcgggttggacattgttttcaacgagatttcgagtgcgtagaatcaaactgatagtatcaactgattgcatataaatggtaattcttgagaagcactttagtgagcactgattcttagcaattctaactttttaactttccacggaaaataccaactcaagtagcatggtgttgaaaacttatgaaaaggaagagaaataaggcaggtgtgttcctctattctcactcatatatttccacgaacccactcgattcgtttctggacgtgacgattccaaagcaatatctactatatacttatatagcacatatatccatgaaactatccagtggcagatggatagctattcgacaggagggcttgggattttgattgggatcgggatcgggatcgttgagttcccaacggtacgtgtgcattccgtaaattggcatttgttaaacccgcgcgattaggcgagatacacttaacgagtttcgctgcagcgtgtattttgaatttaccatttcgtaattacacatttttatttaccttattgtttctccgtttatttctttggacctcccgttttgttttggcacactttgccgtttaattggttttgttcgcctgccccgatgtgctccttatgatttgcgaacgtgccaggtcacgtagggctagtcaagatgtttccagtttgtcacgcagcgttgacaatttggcgatacccgtgcgcaggtaagttgcaactaacacctaactattccgcctaagtccacccaactacctcccaccaccgcctccctcaccaaaacacccgtccattcaaatgcaaatgagccagagtacatagcatgtgcatatgtacatatgtattgtagaaagagcctgtgacgcacctgcatgacataactataaagccaccttatgctatgtgtatctatgtatctatgttgcatgttgtgcatgtgcatggcccgacttaagtctaacccacatttgataacccattcgtagatctaagaaataacgataaatttgacttccagcgaattgtgaccataaccattgccgcattaaattatttttgcggtctgtaaataagccgggcaaaaaactaaatctaaatcgaaatcgaaaacggcaggccgcaaatattgataatttataaggcgagagcgaccagtgttcaaattatagattgtttatagattatcttaatgttcgctgtcgtcttattaacgaattctgataatatataagtcgcgtataagcgtaaataaatggctgatgttcaagtgatgtcagattgatgttcacagattaaatcggcggtttgaggggtgtgagataaggcagtttcgaaggcagtcgaagtgagagtatgtgttccattgtgataataaatagatttgctaggatgcgaatactccaggcctatcccaagaagaggtcgcaaccttttggtgagtcacgtggaacataagaaagtacaatctctttattttcaattttacatatgcaataatcaccaatattgcacattatgtgtgcgtgcatcgcacattacgtatacgtagcgaaaactgagtcactcgctcagttcacttcggcttgtctgccattctgccattctgccattcgatgcgtaatgtaagcactgtgggtaacacccccgtgggttgttgacacacagttggctcggtggaactgtgccagtaaaatgctactgctacttttgttttttcggtgctcatgccactgatcgtagcccagggccacattcccgaaggtaaacaatgcacaagagcgataagatatttgtatgtacctatgtacgtatgaatgtacgtatgagccagcgatcgagccctgaatgacttccattcggctttcaattgctcaagagcctctggccaaatgtgactcgtcgcattgcggatacttctggagatacttgtggtatggagaacatcaggggattagtaagggcaactatatatacatatgatgaataagatgtttcattttatcctctattttgtgtgtccaactggttaatgcggaagcgtgtctatagcagttaaactactggctggcaattagttacagtgattagcacagttagaggttgggaattgctcagtgacacaacatgaaaaagatgtcttaacctataatcattctttacactatacgagtataagtataagatagtcgctgaaatatgaatagtacatatttgttgagaattagttgttggaaaaagaagaagcaattttaatctgttagaaatgttagcttattcgaaatatttgaccttcttggcagaaaaatagaagaatgcgaaaaataaattcacggcctccgaacataatatttgtgtcatttacaattatttaataattattcatgtttgcttgccgaacaaagacaaaatatgtacctatccatttcatttgagcgcgaaagccaactgtgcaaatggattccattgccatttcgccgtctgaactcaataactcggaacgtggtcgtcatcaaatgtggccaacttaaatcaaacacagttgtttcaaccaggctcttgtttttgcaatggttttccacgcgaaaaggcctagaaaacggcgagcacgaaaggttttttcagctgcgcagccaggcacttgaagactttccatggaaaattctcattggcgaacgggggtaaatatggctatgaattaaaaatgggaaaggcaaatagctgatggcgacaaatatgcgttaaataattatttagtatttgctgccgccgctgtttatttgcgaacaaaggcactttgcatgcgcctgctgccagctgaaaactccagtccgcaattattctacgcgctcgcgtatttattttttatcattgatattcaattatggttatcgccaattgcgctaattggcaacgcagtgaaaagacacgcgcaaataaacttttattattttcagggggaagccaaagaggggttccttgatcgacagaaagaggctttcatatactcaagcttatgaatagccccctcctgacgattcgggtacttggttgtcacattcacattgtcacggtgatacaactatctgggcagaggaaaccctattttcccgcccgaaatcgtaacggaaattagttttgccaatcaaacgggaacgcaataatagggaaaactgctcttatgtgagtgcagaaagaggaatgtagtgcagaagagatgttttaataaagataagcactagcaaccttttaaaaaaaaggaacgattcaaagtgtaacttaagaaaatctaatgatatatagtagagtacccttgatttagctagtgagaaacttcaatatgttgttggcatatcgattgaagtagcagacaaaaacaaaataaataaaatccatttgtctgttacacacttttctaggaatctagtagaatccactgactccacgggtgcagaaacaagcattataaagtggaatatttaggcttagatatattaaggttcgagtttctggcttgatcaaaggagttttgtaggaggaaaccccaaataagtttggaatttcaagtatggagctttgaagcacacgcgcctcccaaaaagccaccacacttcggctggacttcagactgtctatataaatatgccgaagcaaaatatatttatgattctaaaacttgcactgtacgacaattgaatttaaattgaaatgggaatgccgccagtatcagattcgaacaatcaaagcaatcttttataaattggtatgcaatcgtcgatccacgcgttcgcggatggatagcgacgactaggcgatgacgcagcgaagaattctacaatgccgaagagtcaatctggaattaaagagtgtgagtggcggaattattgaggcgtattattgcgcaggggatttcacttacctctccataagtcgctgcgagtggagaaacgcccttttgctgccgtaaaagctcctgcttataccgttgctgccgctccacgggcgacacctggcggtaggaatccgccgaataatgggacaccacaatgcccacgccctctattagggccaatagagccccgcccaccaaggcactactgagcatggaggttagtcctgccaaaaagaggaataagcaaaaaagtaaatattcgcatattcgtgcgataatagccataaagttaagcagaaagaaaaacaaggcaaaaaggatataaggatataaaagtcctgagaaagcattgaaaaccagcctggtttactaattgttaatgcatttgtctgaaaaaaaaaactttaaaactcaccagttctagcagcaagaatgcccccggtggttgctccactaattatggcgttccacgggtcctccttcttccggaagtaaaccagtgagcagtcgatggcgctgaaggtagcgccccacaccgcaaagttaccacccaccaggccggatcgagcccgtaccgccgccaatcctccgctcaatcggtatcccaggccggagggggcgtttcgaaagcccttgatcgcctggaaggctcctccgcccaaggcgcccattgcgaaggctccaccacaatcctcgacaatgcgaaagggacaaggctcccgaccgtactccgccatgtcagttgattatcggactcaggagagttcagtcgataaaattgatggggtgacagacacacacagcagaatagatggacaagtcaaagcctccttgagagcgattttcaattcaaagtttcattaaaaaacttttaaagcaaatagaaaaaattacattttaaaattagaatcagtaattagaagcactcgacacgtgtgttattccttacaaattacttatacttcatacttttccgatttaattctatcgaacacctaaggacaagtcacatgaaaatcgtgacttctcgccaattgtttaaaggctgatctaacaaaaaacaaaacagatcaaaaaccgtttaaaaaaacatttaaaatgcgtcgttttgccgtatttggacactcgctgatcgtcaagataatcattacaaaacgatagcaattgcacaacaaaaaggttgaataaaaaaggcaaacgggctgccaataaataaattgttattacccggttatggtcacaattcgagctggaaatttgtaagtgataaggatcgcaacagattgcgctccgatcgctacaagcccaaatattccattcccaaccgatttacaaccactctcccacttttccaggagcaaatcgcgcagcgtggatcacggccttgcggctccattcgacttggactcgctccgctccaaagtggagcagcgcttcgagagcgtcgacaaattatcaagtaagtcactattcaaataagtataatttaattagacagacttaaaccgatggagaatctttggttagggcagcagatggatgcagaattatatgaaaatcattttgtatttctcaaaacaaatacttatttcgggaaggatccttgctgaaccccggcttaagccccctgtatccactcactttcaattaaaatagttcaatttaaacttatatgtaatatgaatgtaaaatttgtgtagaactcgtaggttcctcaagtcaacgctagggtattctgccgccaggtgtcgctcatgctcacactctatgtaaaatcgatgtattattagaaaagtgtacatattgaatcaaatcagctagcaaaaagggtgtttttttttttaattctacagtattccgattccgatatatcagaacagattgtactttgcgcgttacattcaattttagtgcctaaaccagaggcattcttaacataatcataaaataattttcattaaaaaaaaaaacatacttacttactggcattagtttgaagttgattcagggaattgtgcgccaaccggggggtacctataaacaaattcttatcgcacctcccgtttgaaagtgcgcgccaaagctaacagcgctgatagttgattacatgtatgaatgtaattgtgacagttcgagaaaactgatgagcccgcagttttaacgatacaaaaaaaccgtatgatacagggctagaaatggtggaattgattgagatatactggcacatgccaaccaacgagttctcggttatctaccactgccggcagcaggttccgcccacaggtgtgatctgctcgcacttgcgacccgatggcgactctttcgaggtcttccagcagcgtgccccgaagaagcacgatcctccgagtaaagaactgcgagcacgtacctccagcgatacgatgccattattaattatgatttcttttcgttccgcagggcaaaagtcttcattgcccaccatacccaccatttcctacaccgtgggcaatcgcgacaccctgacctccgtggccgcccggttcgacaccacgccctcggagctgacccacctcaaccggctgaacagctccttcatctatccgggccagcagctgctggtgccggacaagagcgccaaggacgacgcctccagcagctccacccacgacgcggacggtgccagcctgtccggcaaatcgagtccggtcgagcgcaagttgtccggcgacgagagccgcgagaaaggtaagaacggaagccaacccaggcgctgctccgtggaaatggtgcaattggtgcgacgatagtgaagcgtttgccatcatcgccgcttgagattttcattttcacgagctttttacatgcatgtgccaacattttttgagaaactccgtattgcgttcttccatcgctttttgggtcgcatttactagagaagtccaaacatttgcatactatcatatatccagatgcgcaattaactgtacatatcgcttatttgattttagttttttttttaattagttcttcttaataatgttttgttagcaactgcgaaaagcggctatgtttattacattgtaaaaactaaactaatttggaaaactattgaacatttgaagccctcaaaaatgtttagtatataaattgatatataattgctataattacaagaagaagttagtctcagggctagctttaactttaaagtaactttattcagctatttaatacagaaaaggtatgtgcatatgttaattgattaatttcagatggcaaattaatgtttggccacattttgtaataactttaagatttttggcgccacttcttccacaaacagcattgcagtttcatgaataaccttactttagacgagaactttttagtatattccattactatgaggtatatataaacaaccgagctgcggtcacactgctggccaatgttgactgtttcatagaacgtgtttttccgctgtttctcactttaaaaaggctataaaatcgaatcggtcgagtgccgaaagccacgtactgagagccggataatccacgacgtagagtgcgcccggacgtactcgatattctaagtttcagcatgcacacggctgtcttctggcgcaatggaggttattgtttgattttctacctttgttgtcgctccgatctgtgaaaaagtgctaattgcggttgacaaactcctggccttgaaggtccagatattccggaaagtataaccttcggtcaagcaagggtctcgttgtccatgtcccaggaaaccgaatctcggttatggatgataaagaagttgcactaatagattcaaaaggcatcataactattgtagtttcgagctagaaactagaaattacactgttaaatttaaaacttactaccacccagttagtcggaactattaaaaagcccttttcgaaagtcgtataatgtataacatttcttcccatcccatgaccctatgcaaaagctacaccctttaggcaatatctttacgacatcaccttacacgccgaactacctaggaaaagcgctataatgccgttcccattcactggtcgtaacacctagaacaacaaagggggtcacaaggcgtagatttagtttaaactatcccatatatcaattttgctttcacaatcttatcgcggccacgggtgtagttgataaaatcacagcccagcaaaatagtacccgaaaatcacttgcccctaatataatataataactaaatggcgtttttgcagccacctagccagcaaagatattaaccaaatgccgctccttgcagacatactcgagggcctgcgccccggatccccaaaaccgggacacatcgagcgcgtgggcggcagtagccagcagcagcaggcggaggaggaggccaacaaaagcgacgatccggtgatcacacagcgcttcctcaagatcaatgtgcgccacatcacggacggacagggcgtggtgggcggcgtcctgctggtcacgcccaacgccgttatgttcgatcccaacgtcagcgatcccctggtcatcgagcacggcccggagagctacggcgtcattgcgcccatggagctggtggtcaacgccgccatcttccacgacattgcgcacatgcgagtggccggaggagcaggtcagggcctgaactccgcctcgggagacgcggagaaaccggaaatctactatcccaaaccagtattagtcgaagaagactccaaggagctacccgagcagcagtcgctgctgggcgaagacggtaataagcgcttagatggtaagttcctcgacgggtcattcctgaaatcaagtttctgtaactcctacataaaatcgttgaagatgattaactgcttagcttgcctaagatcgttcggaagcagaagtatagaaacagtgataaaatttcctttttcagaagaaattcgcttactaatgctattttcttatctaacaacagcagaaatagggtcgctggaaatcgctgacgaccaagagtcgctttgctccagcactggacgcgatggcgacgcgtttcccaaagccttcgaccgcgaacgtgtggaggtaagtcatttttatcatattactcctgtgtcccaacttattgctctttcattttctacaggactcttctatggaagccaaagatagcgctaagactgacgctctagacgatgaagacaagaaggccggcctgggcctctccagcactcgctccaccctcgaggagcggcgcaagagtttgttggatcaccactgggccattccgagcaaagaccggttagtgtttgcccagctgcctcacgcttgtgttcacacattctccaggcatttttgtttgttgatccattttaagatgttttttctcacttcgcaaaaaatgtacattttttgtataattgtacttttgatttttgaagaacgtattataatgttcgattttaagtagttaacataatgtaagtaatttgtttaccattcgtatttttaccataaacattattattagataatttggtttacctaatcgaaatggcaaagtttaatcgcgaaattataaattgattaatttcatacatcgtatccataataccttttgatggaaatgcgatttgaatctgttttctgttctgttcatgattgccataaaactcattaatttgataactcaggactataaacgcatttctaaatcaatgaaatcgatagctatatataatcgagaatatattatctcaagtagacttcatgaagtgaagtgcttgaaacacaactgtgtgaactatttcatcactggaaagcatttatagaagataagactttggcttgccaaagaccacttttaattgttttaataactgctgtttgttttttgcgtttttattttcatattttgaccacgccacgccaaaaaccctacccataaatgcaatttgtgtttataaaccaaccgctttacaccaaaactcataatacctcacacccccaaaaaccacttgtacataaatctgtgtgtgtgccgcgccccaaatattactcagctattgtttgtctaattcccgaagatcctcggaagatgagggcgacaacgagtcaaacgttaccgtagacagtggcgcacgagtccaggatccgcactcggccaatagttcggtcagcggcgtgccgcttagccagccccctgtggctgctgctgcagctgccgctgccgtcgcacccgcctccgccgtcgttcctctgcctccctcgggcattgatctggagcacttggagcagctgtccaagcagtcgtgctacgactcgggcatcgatatccgcgagcccgttcccaacgtacagccgataccaaaaaaaaccgtctacagcgacgcggacattgtcctcagctccgactgggtaccaccgaaaaccattgtgccgacgcacttcagcgagtccccgccgcgcagcaccatcctcggccagagtctcgacgccggcacaggaggcgcagggggcgtccgtaagaagacctcaagcgtgagcttcagcgtcgacgacgaggccgcccagcaggctcaggcccagtcggctgcactggctgtcacagacaagcaggccgacaagaagaacaaggtaccctacgcgattaaatcaattttaagtcctgtgttgaaatatttaccaatactttctttcctctgcagatgcttaaacgtctctcataccccctgacctgggtggagggcttgactggggagggtggtgccgtgccgcccggcggcgtgggcagtggaagcctgaacaagtcgggagacacagactcggcgcccaacacgggtgactccaaccaaagtgtattttcgaaagtattctcaaggtgagtccatctcgaaaccagtgagttaacatttagcgatctctgactataattggtaccaaattttgtttatttcgtttcgaaaactcaaaaaaataaaaaaaaaaaccgaaaatgcaaatgcttaccttcgttttgtgcggatcggctgctttgcttaacatacatactccacttgctctcgctcatgcctcccacacccacaaccaaaactacaccacacggcacaacataacacgacacataacactcgataacttgcctatatacactttccacactcatgtacgaaccatttagctcgcccattactctggtctcagagctgggcgggaatctcttttcgaaaacaccgtccgaagactctggtggctcacctgtgccgccattgactccgcattcgactcattccgagggtcacatgacctatgggtaaggacggatctccgatcagctgtcaccactttcttaatgtgttccactatgtgttgccgttgctcttgttgttgctagtgatgttgatgttgtagtgttgaatcgcaaaaaagtccaccaagcacatttacccatttttggtttaaattgattcatcagcttcattctttagttgtgagtgtaagatcgaatcatcgttccttcagtcctacgttttgatgatctatgctaacacatttttgtgatacctccgcagacgttcctcaatcggtacctttattcgtcctcactcctcggagggcacttcgtccagcaccaagctgaaggaggccaagcaggcgcccaagttggactaccgctccatggtctccatggacgacaagccggaactctttatcagtgtggacagtaagatggatttaatgtccaatcgatgggacgctcaccaatgttgtatcttccacagaactcatcccacgaccggctcgagcctgccttgacccaccattgtatctacgcctgcgcatgggcaagcccatcggcaaggccattccgctgccaacctctgtcatgtcctacgggaagaacaagttgcgcgctgagtactggttcagtgtgccaaagaatcggtgagttagtttcgtattcgtggagatcaggttcatttattgcctgtgaaagcgtatctaacacctccagtttgaaaacagaggtttggacaacacgctcaacatattcggactatccaagaatgtatttaatattgattttgttttcaattgcagcgttgatgagctctatcgcttcataaacacctgggtgaaacacctgtacggtgagctggacgaagagcagatcaaggcgcgtggcttcgagctgattcaagaggacaccgagtggaccaagagcggcacgaccaaagccggcatgggaggcggtagccaggatggcgaggagattagcgacctgacccgcgagtcctgggaggtgagtacgaatccattcgatgtcggcctgacccgaggctacccatgcgcgactatgcctttatctacctatccatatcgtttaactctttgctctgagttttctcctcgacttgttctacatatatgtactttccaatgattctctcgagctcttccacgatatttttttggaattacgaaccgaattgatattacgatattacatctgcttctttaggttatgcctcagaaatcgatttaatgattactaaataatgaaatttttacgcaaaatttgttttatacatacttatataatcgtaaatcttgtttacatttttccccacgtgttttgtacatgcgttttcttctccttcttttcttgtttttcttcttcttcctttcgtgtcttgaaatttgatttgcatttaatttccaaccgaaataatatcgaacaaattcgaatcgaaatcgaaacctacaaaccatctccatcgaaatgagcctcccatgcgccccaatacaaatctataccacatatgatatgatatgatatcttacatcctgtaactacgacagcttataaaggcgccgttcgccaagacctacaagatcataaaaacggcatcgcatgccgcatcgcatgacctggaaatgctgggcggcgaggttaggaccagaaacccttttataagaattcttcacctaaacctaactgtgttgtccgcaccaaactaaacaaaacactaaagaaaaaccagaaaaaaaaaaaaataaaaatactttggaaattgtgtgaaaactttgaatttttgctaacttatatttctattttcggttattgttgatttcaatagtttgtgctcgctggtatttatgtttccgtttccgtagatttcaaaaccttagcactgttgcacatttctttagttgtgttttattatcccacaaaaatgaatattacattttccacgaaaaaatttctggcaccctatctagcacttgttggctgcactcgtcactcaagttcttgtgttctttcggcacttttacaatcgcccaccattggtatattatcctatccattgcgatcttagtataagttgcattggctcatttctctatcgagcgaacatttaatatcctcatttgctaaaacgtcaaccaattatcttttctcgattggcaaacgtttcaatatttatactttcagtgagcatcttaaattcaaacattttcattgcatcgaaatttcaatcgaattcatattgaatatttgaatgaaggacacgaaatgcggtggtgaaggaccaaacttaaagctttaacttcgtcaaaaagagaaaaaacttgaaataacgaatacccaaaggattgtatgttcgtatatttgaatacaaagctagcaacgaggaagtaacaagacctgttttatctttttacataacatttaaaaacaaattgccatgacaaaccgctcgattgtatgcgataaccttttggttcacttccattgtaaacaaatattcatttctgtaagagccactcacttcggagaactaaaccatttccatgaatgaactcgcacgctagttcaaaaaactttattttttcgacgcttctggggcttcgctcagccaaatagaaaatgcatagcaaccacaacgaatcactttgaggctttatcactagagatacatactagcatatggccctattacccaacctagcctaacagccaacgaaacccatttacatgcgtaatatatacaacgagcacagccaagtctaaccttgcctgcgatcgacaagtatcagctggaagcccatctagagcgtccccttgatattctggccccttttgggctaaccacattattttggtctccgttcgaagctccaaattgacatgctaattagactgattcgatagggttccatttcgcaatatttaacattttaaaaggtacctgctttatacagacaaattttaattcatcgacattttacaacaattagcgccttttgtaaatttgtttgcgcgatattaacgggcacgttttcacatccccgaaagcgtgccaagtgcagttttggaatcacgatggttgagtaactccagtgatttgagggcctggctggcactgcactgtctgtaataggtccgaactgaattttcctttatcgccggaattattaatttccccgtcttatcagccgccagtgtagcaatgcaccggcaaattgtttcctcattagcgtcgcatgaaaacatccataatcgtaaaaacagagagccacagcaattggctatcaatagatcttggcacacaagggttatcgctagtaaatggtatacccatcattagtggccatgagtgaccaaacaccaactaacaatcgcttccgatgcgaacttggctttaagaaacttccgctgagccgaaatggcctgggggcccaatgaatgggatctcttgattgtcaaacccgctgagtgatttgtggtatatttgggtgaatcaaaaatgaccgtttgaagataatgcagaccaattgcgcaatacttaagcttatcttgaagcgtttttgatggatgagctcagtcggaattaagcctccattgtggattatctttgaaggaacatatatatttcgtacattgtatttcgttcgatttccctggtctacttagcactgcgctaccttaaaacattaggcatattaatgccctcagttaagaatttaatcaatatgattaatttgcggcctgcaaatcgatgaatggatccaaatgcttgtactcaaatgagcgacgagttcattattttataatccaaccaaccggttgttttagtttagattgcagaccactacttgtgcgaagatgagcgcgtgcctcgcataaatcgtttaatggatagatcgcttgatgtttcaattataaatcgattcaattaaagccagttcgaacacatgtcgcatcaggcggagcaacggctaactactaacttacatttaactatattctaattgaatcccaattaaaatacgtatttaaagcgctccacagcgattgtcatttagccggtttcagttttctgttttattttgtttgcttgccgagttgactggtgggtctcatcatcatctattttttcgattctaaatccggttcaggtgaataaaaatagcagaataaaacgatgcgccttccctcacttaagcgatcaattagcggacaagatcgtactacccgcacattgtgggcgccaaatcctaagcagtggtgctcccgagccacgccccacaattcccaggggccggtggcgccagccaaatcaacatcgcctccaattgctgaacgcctcatgcctataaactataaataaatatatatatgtgcaagtatgtggatatgtagggccggtaggcctagtagtgtacttgtaccatcaattggcttcaatgaatttttacaaacgagctgggaggacaattggaattggattgctcagaggcctgctcgtatctcgcctctccacctaccacctaccacctaccaccacccacctacaagcccatcggaatcatcttctcaatttgcatatccctcgcccagctttttccctctatctcccgggttatcaaaagatggttcatcgtatgtaagtgcactcttatattaaattgcgcactttactgcagcagccccataaacacttgcttaattctgcaattaatgcactttcgcgggtgggcggttaagtgggagtggtaaagaccttttagtattcctgctggatactttgatatttcattcacataagttaaggatcgtgggtgcggttttgcactgatcttgtttgaaagttaattcttgccttatggcatcgcaatttcttattcaaatgaatgatttgaataaggtatttgcggtatttattcaattcaaacacagatactaatccgaattaataggcaataatcataaataccaataatcattatatatagaaacgaatataaatagtatatggaataatagtactgcgtactttttacaatatcgcacctaataaacgccattaagttatgagacgattcgtatgagcagaaattaacggacgtaactggaatagagtcgatgataactcgtttgcttacaaagtactggcttaaattagaggttttattagattgcaacgaccttaatctcatctataaataataaacaaataataagtaaaatgctaaaaggatctttaacctgttcttgatcttgatgctccgaccgatccacagtcacgttgtatctgcgattcaatctagaatatttcctttagtgtgggatgtgtcgtaagtctgtggcaggtgcattcggaaaatacatacatatgtagatgcagcagcggattcgattgcctttcaaggaatgcacacaaaaggtgtacgcacacacttagtaagccgctaaaatgcttcgtttaaaagggggcatagcaaacaaatcgctggccaggcagtgaatacagtcgtataggcgctgtgcaatcgattgataagcatgacagttaatatgtttgcatagctgtaaagcaaagcgcagcaaacacctgaaaagcaattaccttgccgggtgaaagtgggtgtgggggatggagcactcttaaaaagaccgactgcataacgaaagggataacatttggaaaagctacaacgtatcaaatcataattcatctgattcgtcaataaagcgtcatttaagaacacaaaggatcaaagaattatgtgcactaagaggcctgcagtaatgcatatattatcaatgctaatattaaaataaattcctaattgttgctatacacttctactggctcattccacgttctttagcctcaaaataaatgatgactggagtagacgaaaccaaactaagaacaaaaccagaggagataattaaaaggcgacccttcctcgattgttcgtaatggcaaacttggtccgcaaaagagtcgaaagtcgccgggaagcgcaagtctagcccctgtggctctggaaccccttcaagtgatcagcatttcaaatgtaagatcacccgtgccacccacagtcgcgtccctcgaatcgtcacagtggacggacggaccgcagtcacagcttcatacactcgtatcagttgaaaggcagcagcagctgagccacgtttggctgctgttgatattgttattgtttctactggcgatgttgtttcatttgttgctgctgctgctgctgctgctgctgcggcgcttgctgcgactgcgactgtgtcgactgagccagctatggttggctttttagttttcgcaacacttccaagccgcacagtcgccgtcgcgtcccattctgaatattgaaaattcaaaataccgacttatagaccgcaacgcgtgtgatctagaagatagaaaaggtctagaagttcgccgaaaatgtgactttagttcgaccgaaaaatagagcaatatttgatcaactgcacttgggcaaatagctttcgggtttttccgcgcagagcagcgtgtccaaaattagatacggtgaaaaaaagaagaagaaagagtgcgaggaaagcggcttgctcttctctcgatcttcggctctccacgattctgcgattcttcgattcttcttgggccgccggctaaaaacgctgccaaaatgagcgccaaaacaatgaaaatctcaaaaatagccaaatacatcaagaaaagggtaaatatttatgaatcgacgaaggccaaaataaaatattagtcttctgcgggacgtgagacacttctgtccgtggtgaaagtcgtggcagaaaacaaaaatagcgaaaccgaaagcgaaatcgcatcgaaaacaaagaaaattgtatatcaaaatgcagtcagttttgtaatccgcccacgtctcaaccgaaagccaaaaatagtcaatgcctcggccataaacggttgccatatcgatcgaaaaggttcccagttgccgcccaaaaggttggattcggactccaccgaaaatgtccagccccgacgataatgtaatcatgtaaatgccgctgccacgaaggtggaatgcgaattgaaaccactgtagccacttattgcataccagatgatctgggcaatccttgtgtgtgctcgtaatttgtctgagaattaaatgtgaatcgttagtaaaattggtcaaattgcccggccaattggtgttccgccaagtagtcgtttatttaaacttattctgtgcccaagacagtgactagaatcgaatctcaattaatctccacttggaattcactgatcgcaacgtctgaaccatccgtgtttacaccacggtttacttgccgacctcgacaacctcttactatatttatgtggagcttcagaaacagatggagttctccgacttcactttaatacatacacaacacgggtatcagaggctcttgtttcttttatctccccccccccccccctccacccttgcgatcgattcgatgcgagtgtttcgattgcttaaacaaatttcatatttcggagaaatttgaattgcagattgcggatggaagcgacgaccaagtaccatggaactattgttagcctaaacttacctctttcctcatctgcataagcacatatcttatggcaccttatgatcgtctagaaattcccaattttttgagtccgagacccgttcagccggtctagaaaactccaaaatattttcggtttcatttcaatttgcattacaagctagcttttaatttatcgccattatatcgcggcacatttgacatttctttcacctttcgacattgttttggggctcgggagtcacttctctttaattacccacctttgtctgtaattaggtttaattccaaatgcattgccacacgatttcaataggacttttcatcgaaaaaagaaaaacgaactgagtgtataaacacttttgtgtttgcccgaatcgaaattcaatgcgacaacgggttctgttttaggggaaagaaatcagccagttgtgaagagccatataaccgtataagcttggttattatccgactttgatttcaattggttgactggaattatacagtgtctgaacgtatttaatttctctgaagagtggctaactagaaacaagataaggaggttcttaattttacagtattagattacgagagaaagtcttgatcaaatgacatatttactaagttactcgcttttcaatttgaatgttgtatcatttgccccaaatcgtaatggcttttttttttactaataagcattatataaattacgaagtggaacagcagcgctgagtgaatgcttccacagactttcaagttcctgtgtatgggccccctgagccgggatattagattaccagcatctagctgcaattgttgccacattatgaacatgtttttggtaacacaatacccactacctggcgattgtcgagagggcgttgcacgtatgctctcgtatcaacaaacattcgacaaggggatacacatcgggcccacgtaaacaaacaaatcaaatcggacacatctacggctgcaatgtaaagatacccggcgacacgtgattgtttcatcatttaggtcgccaaaaaataattgcgtgctgtcgatttcattgtagtatacaaattgaggagcaaaaaaggggtcagacaacttggtaactatgttttggttagtcagaaattgttgacatataaacaattttatcattgttattagaggtaattaaagcaaatcatttaagatgatctatgttttgaattaaagttatgcacagataaggcgaccgaccagcaatcatatgttaaattgttttgattgctgttatctgccgggtttttaaccagactcaaatattaaccggttaggactgattgcgagtagctaatacccaggttcggacctacaaataagccataaatcagacagctgtgggtgatacaaacttaatcttcggtacgatcatgtgatcaaaaccatctgtggactctgaaacaagggcaatttaaagagttatccgtttttaaccggttcgccgtcgatcggtctctttaaaatatcgcatgcattccagagtagagcaatgttgggaaaggcgattccggtttcagtttatttttaagtaccctctactccaacggtttgaggggcttgttgcttactcgatttgaaatacatactttaaccggtttgctgcgtaactaattagaatacgaactgaactgcatggctcatgttgttttcgacggcctgctgccgttgtcgcctcgtttaacacgcccacaaatccgtttagttatggtcatcgtctcggccatttgtcctcttcttcctccggcttgtgtaaggcgtttactacagtcaaacattgtattgcaagtttgaaccaacatatttgatatttatttattgagttcatcagtatcttattaaaaatacaacttatccagttcaaaattcaaatgctcttcatccgagctgcacaatttttctttatttactcaaagcttgttggtaaaattacgcatttaacccaaaaaaaatttaaacaaaacaaaatgagtttggcacgtgagtgcgaaaaagaaacaagagacagctcatgcttttatttctagctcagcaatttgcggcctccaataataaattattgcataaaaataaatattacgtatacgcaacttcgagttggaatgctccgagcaacatgttgaagaaacatagtgtcccaacactagacctgttgttcgaaacacgcttaacagtgctgttaacataatgttccgacagtggctaacatattatatcgacctgcaccacctacactgtaaaaagtggactaaaaagatttacaaatatctgtggtttcaaagttattacttttcaatttacatacttttgaatatttatgtagctacttgcagcatcaaattcatgatgcaggaacttccctgtttaagcaattttcataaataggagagtaaaccaaagtaataagcagaaccacataactcgtacaacctttttgccatttcggaccggctccgccacaccaaatgggagcgtttgaatggggctgataagttcgcttctgcttttataggccataaattttgtgtctgggggctggccgaagtgtgacgtgactcactgtaggtggcgtgttagcagaggcccgtttttttccgaggctccaaaagagagtccaataagtttcagtcggtcgagcaacttgtttgaaaacacacagagctgcccccaaaaggagctttttaagtgaaagaaaagacgttaaatatagaaaaaacatctgcggagagcacgttgaaaagtaaacaaatttgaatgttctaactaggaacaaagtgtttacgtgtaacgaagaaaggccaaaaacagtgctgcaacggcgaagagcggaaggcgtagagcgtgataaaagcggtggcaacaacagaaacgcaaataatcggagaaaaaagctgaagcaagtctcgtgggtcacaagaccattcagaaaagcgaaagagagagagagagagagagcgagagagagagagagagagagagagagagaggcgatatgtggagcgttagagctttcaaacagtgctagcccaaaaagtgggacacccccacgcacgaaagcttttgcatctgctacctctgcccgcttccactgctgaacaccgccactgttggccatcagcaacatgtggttcgccatttctctgtttgccatcttggccgtttgcgggttggccggccgcaggtggggtcgctacctctatctgcactacggccgccacctgctgccgcgctccctcctctcggccaagaaccgcgcgcccacgccccctctctcgcccaccaaggacgaccagagcctggaggctctcctcgacgagagcggcgaaatgcacgaaacggtgagtgccggtcaggatcgcatctggcaaagggatccaaaagggatatgtgtgtatctaacaatttaagaagaggacttctatttaaaacttctttttataagaagagtaaattgagtaaacatattgaatggatattttttattctctttatttatttctctttactcaattttcaataatctaaatccccgtttcgtcggctaaactttgttgtttagtgctgttagtaattagtgtcaagaatataagggttacgtctattatatagccattatcgcacacgtttctcctattacaaaccgcttttaattgctcgaactgatttgcaactattatggcatcatcattagacacaaatgtggctaagaccccgatcatctcgggcgaacaccatttgtcaccctgtcaggtgtcttgaactttggtgtttgcctcgggtcaacgatctctccggatgagcctcatccccaagctgtacaagtaatcggctggcacctccccaagtcgcgcggttcatcacaaagattcgctagttgctatttaaccttgacaaacacttctcttgttttgttggacaatgtgacctcacaacacatgctaaataacccaaccaaatatttgtttagacatataaattacaaggcacagagcaaaagtgcagatgcaaaaactaaacaaacctacaaaatgataaattgcgcaccaaatgcattttcatgctgttgtaatgcatttgggaaaagccaatgaagtaaaggcagaaaggaaaaaaaagcgaataagtttaaatagcacggttgaagtaacataaaccgataaggaatgcggaaaaaataggaaaaataaaaacgatatcagctctggttataattaggttatcagacttcagtactgctcatgcagttagctatttctctggagcctatttaaatataatgcatgcatacatgtatgatattcaatgcaaaagtgctttacatactgagatgtgggaaatctattggttagaaaccgagaaaatgattgaggaacactaattgaatagttgtaataaataataataaataatacgaacttcttaggtagagaaatgataggtttccatgcaaatatctgtagttattttgcacacacagagcacaaagtttattgttaggagttttcatgtgcgatttattaccatagctttgcttcgcacctctgccaagccaagcctctcacacaccttaattaccaacccatccctccgccagtctaaagtgaaaaccccactaccccgttccatttaagccaagaactcctcgcccgtatatgctcttgcatacctattacctttgtgccatgcctcatgttctttgttttagcctctttgttttgccgactctttcgcggctatcgggtctcaatacccgtttgtccagtaagctcttttcttcaactactcttcgctgctgccttttgctgcttttacctctttttgttttgaggccggttctgtggatttgcctgtctggcacaaacttttaaatttttcggaccacaaaaccagttggtgtatagccgttgctgaatatgttcgccgccgttcctccagccaaagtacgcggtctttatatttctatatgttctgcaagtgctttaaataagttagttcgagaataaacaaaatatatctaagtaaatactatataagaaatgtaaatcgaatggtgatgatcagaattcccaattctcgatttgactaaatgatgaactatctgctacccgatctttttctttgctgcctatgcggtgccaaaatatagtgacaatatattgaaagataatgatgtaccaaaacagggacagcctaatgctataatagtctcccctccctttcacaagaagcgatggaaataactttaaggctcctgccagtcagtcaatttcaacgcgctcttaactaattattaaaaacagatagaactatcttatctacatcgcagagaaaacgaaaacaaattgcaaatcttgttgtgcatataattctggtcaactgaaactcaaacctgtgtcgtgactgaattgccgagggaaactcccttgggaattattttctacccttcccaattgtgtttacgactctcgactaaacaagaggttgtaaacattaatcgcttgtacatatatgacgacaatatagatcttatccggagtgccaccgattctgggatgcaagcaaagtgggttgcaatgatttccagcaaatagaactagtttaaaggttttaaatttacgttcttaatgtttgaacggacttatcaggccaatgacggctaaatgataaaaaaaaaaaccaattattggtagcttcatcgcggcttaagttcttatcaactggagttgaacagaagtcgtaagtaaatgtaagtcatttagcatgattacatttagcacaacttttagactgatttaaaactataaactaaacgaaagttttacttttgaaatgaaagaatccaacacgagcagtttgtccccgtccgctatttttaatatgttttattttaatcgtaaagcgcaaacccgatataagccctctctgcataattataataggtataatatacctggctctctctttcgccgagcaaactcacgacttgaactgagttaatttgagcgagcggcaaataaatatattttcgctgacggctaataaaaacgcttggtctgaatccgcgggcagttggcttttgaacgcggtacgccaaagtcggtcaagtcggcggagttaatctccacagcatctcagttcctccagagcaacgaacagattctgataccgattcggattctgcctcacattcagattctgatcaacaattgtgccgagcacgtgccgaagtggcgtatacttaatattgcgcatacgccacctgcgccgtcgcgtgtgtaaaaactgtgtgcgggcagaagaaactcagaccatttgattgaaagtgacaacacaggcagtgccaaactaaatgaagatgtgcgaattaattgtcagccatggactcgaccgcgaggtaaaaatatcattagtgcgaacacatgaacacatgactcatgtgatttcccagctgttcaatatggtttttcattattttcgaaagagtttattttacgctcaacatttgagctcaactcaggcttaactgagctcgtgttttgaagtgctgggcaaatatatataaacctacatatatgcgatgtaccagccattgtcactgtcattgacgtttgactttggctctctccttcaaaaaacacactctgatctgggactgactgctgaccctcgttgaagtgcgttaaaaatcgctttttattttatttcggagtctgtgaaattgcgttctgttttttaattgttggggtcctctgaatatcgctgtcacgcctcaattactgcactcttttgtttccattgagttgtcgcaaaaaacggcgcatacatgtatgaaattggcgctgtctggtgatcaaaatgactttccgatctgtttcactgacccaaattgatctgaacgcacacatatgtttgttgtgccattcagatctctcgacctttcatgcggcttagctagctatctgcgactatttgattttatcgcagatttcatatcagactaattgccggcaaggccgtccatcgtagtcgagagcgctcggaagttccttcctaattcaatttggattgccccctagtgtttcgacactcgatggcgtatcaaagtcatggcgcaatattcgctgagcgccactcaggggttcttcaactcgagtggtggcgaaaaactaatcaatcatccgcagattatcaagatttaatcaaaccaccaactgcgacgtcgaattacatacgactacgctgctgttgtgatataagcggggccggtatttacgagctggttttgtttttgggccttatcaagacttgctaatggctgaatcacggccgccaaagaccgagagtcgatgagagactgccttgaatttaagatggtttcgggaacgcgaatgatctcacatttgaatggcagcaggtgtgggtggttggtaactgaacagtgtgggtgctgtctgaaaactcccatcctaaccatcagcagtagcagtgctacgtgtgtgcaaaacttttgccaatgcctgacatgagggagagcttattttggtaattcatacaattagcacaatcattgacgtcactagctaaatgttcacacgctggcaaaggcgacattgtcacacccagcacaatgtactatatcaagtaaaaacaaagtccgcacacacaattagtcaatgctccgaaatgtatttcacatgaaggtggtactatcaatcgatggcagcataagcagctttgcccgatcagaaactgagatttctggcagattagattgcattgaacttaaataagaggacactagtaccaggtttttcgagtgatatggctcagttctctgaagaagccccaatcaatcggttgcccatcatgggattgcacgaaaagctgcgaaagtttcaccatcatcaacggagtccctgccagcgaattttaggggtgagcttagggaatctatatggttctcttcaattgctgcaatttttaaattttctgcatatatttataatcatgccaaataaagggcggctaaaatgatgtaatagttattggaaacgaagaatgtggttccatgactatgacatttgagtgttgtgaaaaagcatttgcatgctgtggtaagcacttatctaaaaaaaaaggtattctaaattatttcccatcaagcagtcgttgtctctgccttcaacgcctttcatatggggattcgttgagcactttcatttcgttgccagtcgttgttttatttcgtttcgtacagagctctccaaaatagaaaattcgaatttatttattcagtgttttgttggtcttacgagtccgtgaaatcgagttctttagtccgtgaagaaacgtgcttcgttttcgcaggtttttgctaaattgttcgtgtatccattggttcacattatgagtactcatcagtatagcctggggaggctggcccgccgaggcttcagcctgcggatgaatccgctggccggcacactgcaaaggctttaccacacccgtagcaggccatgtgtggcccagagtgtgagccaggtgggtgaacggtccaagccaacgttgcagccctacgacttcgaccgaagccgggtgcgtaaaattgccggcgagaggaagacgctggtcgaccaggtgcggggcatgagcacaagcctgggacatgccaagttggtgccccaaaagatgtacggcaagacgaggctgttctcctccggaagcaccctctacagtcgcttgcagcatctggaacagcagaacgaggaatattcgagtcgagagtcccagccgacgcacaccacagcctcattgtcggccacccagcagaggtacaatcaggcggcaggattcggcaagggcatggccatacagacggccaaagacatcagccagtccatccaggaggagctgatggtggtggacgccgacacgcgcgacatgcttacctgcgataccagtcgcaaggcgatgcgcgactaccacgaccatatggccaagcggtcgaagaactctgtcgatcccatgcagggttggaagcatccaaagaaccttaagtatctctccgatatcccggccgatagcagtaccagtagccaagcagcccaacatgacgatgaagcccaacggcagatgaggccacgtcgccgccagatggtcatgggtcatgccattcgcaatttcgacgccctagccaatcccccgcttcatctcggcaccggacccaggtacgagatgtatacctccaatgctaaggagatgttctcagagcatcgcagcgagctgcgtccgcagacaagttggcacaagccaaagccagccgccgaggacaagcccgaggatcagcttatggacgtgtcgatgatccgaccagagcgtccggatattacagtggccaggggcctctggaagaacgaggaggacacacccgagccggattcgtggtacgagcagcccaaagcagagcgcgagttcttaaagcaggccttcctcggcggagccaagagtcgccggaaggtgggacagtcccagttggacgaactctaccacgagtcgtcggacaatgcggcccagattagtgcctcacagcaggtgattaaacagaagtacgccggcttccgcgggtcggcaaggggaaatcagaagcaaattgtagagtcagtgaatccgacgccgcagcttaagcctcatcaaaggacctttccggagccccgggacaagcgcaaaagacgtggaactgcaaaccaggccgtcgaacgacaggctgcaccacgcttttatgcggggaacagccaaccagctgcgaaagaagatgaggataataaggaggggaactccagagagtccaattggccgtcgcccagtaactcggtgctcccgtcatcctcgcgaagcgagtctcgccttcaaactgagcgcagggcacgtgggcagggtgtcatgggcgagaggcgaaccaccaagaactcgatggagactgaaaccgccgcggaggatagcgatatcgctatgtcgccaggttacaagaaggagtcggcagtccaacgcctgggaaaagctgcttccaggcacaacagccgcgccttcaacagctactgagtctccaagttccatcgcaggtgtgaggtcgtgacctctgccttctgaaaattcactctaattccgattcacggtcataattctcccggtcctacaaaagaaacttttacattcgctgtcaaaatccttaaatgtcaacaaaattgaggcccggaaatcctgctggctaagtgtagtattataatcgcataactaaagtaatttaaataaaaccttttacagttgcgaaaaaaatgcaagggtggcgatatatataaatatacatatatatatctgttctgtttagataatggtcggttatcacaacatcttctccgtatttttttactcttttttttccccctttttttgtaggggcattatagaaccggtcggttcaattttcataagcatctttcagcattgtaaaatatacatccttcctcgtgtaattgtgctctattttacttttgttcactcagctactgccttggcatcggcgagccgttttaatttgtagttaaattttaaaccactacaagggacacccacaaagtaggcagactcagaaaactagcactgcactcaaagtattaaagtatattactttcaattgaaaacccaaccactaaagcaaaccaccgaacttgaaatgctaaattccacaaaccccatttccaaaaaacagcagaaacgtatttaagcatattttagatatgtaatttgattttgatttggaattgattacatgtttcactactagattatgtttaatagttgtacattcaagtcttgcatcttgtgctaatatctgctgttttcatcaatcgtcctccaggtgctgtcaatgagcacagatgaatatcgcaagacctcgctctttgccaccggttccttcgacctggacttccccataccagacctgatcggcaagacagaaatccttacagaggagcatcggtaagtagcgcagggcctttaatagaccctttggttgaatcttagcttatgatggtttttctgctctacagcgagaagctctgttcacatctgccggctagagccgagggatactcctggtccctgatcttcagcacctcacaacatggtttcgcactgaactccctgtaccgcaaaatggcgcgtctggagagtccagttctgattgtcattgaggatacggagcacaacgtaagttgaagttcttaaggtgggatgggaacgagcagatatccaatagcaattgagttgcgcagttagaagtgtattagatcataaatgaatgggtaaaactagtatttgtctttcgctttgagaggctattgaactgcacacatatttataaacattaaatatacaatatgactgattttctcggcactttgtttccattttaataaaatacaattagtctggttttgattattcagtctggagtagtaattagacgaattctgttatttgaaccttttgaatgcatcaattagcagcgttttacgttccagctaagtgcagtgaagataagagcaattaagaaatgttacgcaaattgttttataaaattgcactaattcttgttttataacacataccttaatctcgtgtaggtatttggtgccctcacctcctgctcactgcatgtgtcggatcacttttacggcaccggtgagtccctgctctacaagtttaaccccagcttcaaggtgttccattggactggcgagaatatgtacttcatcaaaggaaacatggagagcctttcgattggcgctggagagtgagtttggtgcacttaaagcgcgcctggcacttgctaatttttgcttgaatctcttttttttagcggtcgttttggcctgtggctggatggtgatctgaaccagggacgatcgcaacagtgcagcacatacggcaatgagcctctggcgccacaagaagactttgttatcaaaacactcgaatgctgggcatttgtttaagtgaatttctgttgtcgacaacaaacatatttaaggatgggagcgagggcctcctgccgacctatctatttaattaactatatgtacttgtactaaaaaccagcaacctgagaaagatgtcaaaagctggtgtgcgtccaaggatcatcccttcggaacggtccacacagcccgaaccccgaaacacttgaatacacgaacaccaccacatgaagatggttttgaagggatctgatctgaagaaaaatgcttgtgaaaactccgttctctgaagcaactgcgagttagctatgcgttggaacgtattaattatttagtttttatatcatatattattaaacaagagcaactaaattatgtgttagacttaaacaaaacaaaacagaatatgagaaaacccaagaaacagactagcgacacaaaaacttaagcgaaaagaaatgaggataacatttgagggcatcacacatctccatgaaaaacatggcacacgcatacacccacatacgcctacattaaaaaacacacattatgtttagttcttaataccgaaaattataaacaccaaattgtgagaagagacatattgaaaataggcagatttttatcatttatcgtgtccagttctctggattgatttcagtttgaatttagtttcgattgtttgagttactagagttatttgagaacattgtgaaaagcgaagcgagctgagatgagaaaaataaaaagaatgtcgatataatttatagtgcaaaagtgctgattgcaagtaaaactaaagcgaagataactttaaacgatttgacttttatgtatatgtaaagaaggagccgcgaagagctgagagcgagcgttttatttttagttttacacgatatacatacatacatatatttaattacgattattttaatgctaatgatgttgacttttatgcaattatactaaaacaaaaacagaaacaacaccagaatgaaatacacaatattatacaaccaaaatggccaaaacagaggttttacttcctcccccacacccagaaaatgggtttcccaattgatcgtttcaagataattgtatcctaggtgtgttattcgctgtgctataagggtgcttgctataaggcacctttgttttgtagttgtaagctttcttcgcagatatcgctcacacccacatatgtacacacacacacacacacacagatacttccgcagcagaatcagacgagcggtggctggttgctggtggaaaaggttttgaggaaatcaaaccaacaaactttaatggctttatatcccttttgagatacaatttcagtatgattaaaataaattaaatatatacatacatatatgtatacacatacgctaatatataaatgtacaatggtagaaacgaatataggtatatgtaagtgtaacttttgtagtgtatttgcgccccaaaaaacaaaacccgggcgtcaacttgccacagttcccccaatcgattgaattgtgaccccctcagaaccccccaaaaaacttacggccacgctggcactcagaaacatattctaaatattcaaatacacacgacgagacgctgggaaatagatacatttcagagaacaaacgaaacgaaacaaaattgctgatattttacacagaaccgagttcgaaactaacaaaaagtaaggtattaaaaatattccatttcatcggagttcaagtttttacttgtttaaaagtgaaacaaagtcacaaaacaacgcacacaagccaaaaacaaaaattgtgaaattataaagagattgaagatattaaatgtaaagataatccgaaaccgaaacccagagaatcatctaagcatgcaacactttagagaaatttagctgaaaatttgaacgctccccagccctaaaaatggaaatatacatatgaaaattaagaaaatggtgaacgacggcgactcacgccagtgaagatgttttagaaataacatctaacgaccttgaca

SEQ ID NO: 4670 - DNA, 5362 bp, DROSOPHILA
aacgcaagtagctcccacaaaatcggaatcagccgaaacgaaaacggaacacaaataacagaacgcgcgcgctcaaagtcagtgcttgatactaagatatagcacagatatactacatacatatgtatgtggagcatcggcgaaatatacaagtataattgaaaatataagtgtacgcgagtgccaatactgtgaaatcaatacgaatgagaaatgtgactaaccaatcaaaggaaagcaattgtgccaaacctcgttgaaagacaacaaattcgcctaacggctaacggttaacggctaaagttagcagttagtacccagttaccaatctatccgcccgaccagcgccctcatccgaatcgagaaccgatccccacgccatgagcatcatcgacagcggcaagtaccgcttgcgcaaggactgggccagcgcttccatcccgtccttggtgaacatcgacgagcacgacggcgactccggcgacaccgagggcagcctcaatgccacggctccactgccaccacagaagcccccgcggcgcagctccctggccctcggactgttctccagcaaatccgataagagccagaaacgccgcagctccatagccgtctccttcctgcggcgggatagtagtaagaactccaccaaagactcgtacgaatcggctgtgcgcagcgagaaatctgacggatccggcacacccaccagtccggagatcgtgtacagctccgaggagaatatccgtgccagctcccccaacgatccgggcaagcagaccttcttcgaggacggcagccagtcgccgcgtccggtgctccaggggctgaacacctcgtacgagggaccccagaatgatcgacagaggcgcaggcgcagctcgctgcagaccaagctggaccggcatcgccgcaagaagatggagtacagcaaccagaggagcctggactccggcatgatgtgcagcgagtcccatagcgacctgaccaacgacagcttggccgagggctccggcagctttgccaacagaagtcgcaacggcaacgacgacgaggacgacatcatcgatcccagccacggggagtactttccgcgcgagaagcgccactcctggtggaacatcttcgtgcccgacaatttcaagaacaggtcacgtagggctagtcaagatgtttccagtttgtcacgcagcgttgacaatttggcgatacccgtgcgcaggagcaaatcgcgcagcgtggatcacggccttgcggctccattcgacttggactcgctccgctccaaagtggagcagcgcttcgagagcgtcgacaaattatcaaggcaaaagtcttcattgcccaccatacccaccatttcctacaccgtgggcaatcgcgacaccctgacctccgtggccgcccggttcgacaccacgccctcggagctgacccacctcaaccggctgaacagctccttcatctatccgggccagcagctgctggtgccggacaagagcgccaaggacgacgcctccagcagctccacccacgacgcggacggtgccagcctgtccggcaaatcgagtccggtcgagcgcaagttgtccggcgacgagagccgcgagaaagacatactcgagggcctgcgccccggatccccaaaaccgggacacatcgagcgcgtgggcggcagtagccagcagcagcaggcggaggaggaggccaacaaaagcgacgatccggtgatcacacagcgcttcctcaagatcaatgtgcgccacatcacggacggacagggcgtggtgggcggcgtcctgctggtcacgcccaacgccgttatgttcgatcccaacgtcagcgatcccctggtcatcgagcacggcccggagagctacggcgtcattgcgcccatggagctggtggtcaacgccgccatcttccacgacattgcgcacatgcgagtggccggaggagcaggtcagggcctgaactccgcctcgggagacgcggagaaaccggaaatctactatcccaaaccagtattagtcgaagaagactccaaggagctacccgagcagcagtcgctgctgggcgaagacggtaataagcgcttagatgcagaaatagggtcgctggaaatcgctgacgaccaagagtcgctttgctccagcactggacgcgatggcgacgcgtttcccaaagccttcgaccgcgaacgtgtggaggactcttctatggaagccaaagatagcgctaagactgacgctctagacgatgaagacaagaaggccggcctgggcctctccagcactcgctccaccctcgaggagcggcgcaagagtttgttggatcaccactgggccattccgagcaaagaccgatcctcggaagatgagggcgacaacgagtcaaacgttaccgtagacagtggcgcacgagtccaggatccgcactcggccaatagttcggtcagcggcgtgccgcttagccagccccctgtggctgctgctgcagctgccgctgccgtcgcacccgcctccgccgtcgttcctctgcctccctcgggcattgatctggagcacttggagcagctgtccaagcagtcgtgctacgactcgggcatcgatatccgcgagcccgttcccaacgtacagccgataccaaaaaaaaccgtctacagcgacgcggacattgtcctcagctccgactgggtaccaccgaaaaccattgtgccgacgcacttcagcgagtccccgccgcgcagcaccatcctcggccagagtctcgacgccggcacaggaggcgcagggggcgtccgtaagaagacctcaagcgtgagcttcagcgtcgacgacgaggccgcccagcaggctcaggcccagtcggctgcactggctgtcacagacaagcaggccgacaagaagaacaagatgcttaaacgtctctcataccccctgacctgggtggagggcttgactggggagggtggtgccgtgccgcccggcggcgtgggcagtggaagcctgaacaagtcgggagacacagactcggcgcccaacacgggtgactccaaccaaagtgtattttcgaaagtattctcaagacgttcctcaatcggtacctttattcgtcctcactcctcggagggcacttcgtccagcaccaagctgaaggaggccaagcaggcgcccaagttggactaccgctccatggtctccatggacgacaagccggaactctttatcagtgtggacaaactcatcccacgaccggctcgagcctgccttgacccaccattgtatctacgcctgcgcatgggcaagcccatcggcaaggccattccgctgccaacctctgtcatgtcctacgggaagaacaagttgcgcgctgagtactggttcagtgtgccaaagaatcgcgttgatgagctctatcgcttcataaacacctgggtgaaacacctgtacggtgagctggacgaagagcagatcaaggcgcgtggcttcgagctgattcaagaggacaccgagtggaccaagagcggcacgaccaaagccggcatgggaggcggtagccaggatggcgaggagattagcgacctgacccgcgagtcctgggagcttataaaggcgccgttcgccaagacctacaagatcataaaaacggcatcgcatgccgcatcgcatgacctggaaatgctgggcggcgagagtcgaaagtcgccgggaagcgcaagtctagcccctgtggctctggaaccccttcaagtgatcagcatttcaaatgtgctgtcaatgagcacagatgaatatcgcaagacctcgctctttgccaccggttccttcgacctggacttccccataccagacctgatcggcaagacagaaatccttacagaggagcatcgcgagaagctctgttcacatctgccggctagagccgagggatactcctggtccctgatcttcagcacctcacaacatggtttcgcactgaactccctgtaccgcaaaatggcgcgtctggagagtccagttctgattgtcattgaggatacggagcacaacgtatttggtgccctcacctcctgctcactgcatgtgtcggatcacttttacggcaccggtgagtccctgctctacaagtttaaccccagcttcaaggtgttccattggactggcgagaatatgtacttcatcaaaggaaacatggagagcctttcgattggcgctggagacggtcgttttggcctgtggctggatggtgatctgaaccagggacgatcgcaacagtgcagcacatacggcaatgagcctctggcgccacaagaagactttgttatcaaaacactcgaatgctgggcatttgtttaagtgaatttctgttgtcgacaacaaacatatttaaggatgggagcgagggcctcctgccgacctatctatttaattaactatatgtacttgtactaaaaaccagcaacctgagaaagatgtcaaaagctggtgtgcgtccaaggatcatcccttcggaacggtccacacagcccgaaccccgaaacacttgaatacacgaacaccaccacatgaagatggttttgaagggatctgatctgaagaaaaatgcttgtgaaaactccgttctctgaagcaactgcgagttagctatgcgttggaacgtattaattatttagtttttatatcatatattattaaacaagagcaactaaattatgtgttagacttaaacaaaacaaaacagaatatgagaaaacccaagaaacagactagcgacacaaaaacttaagcgaaaagaaatgaggataacatttgagggcatcacacatctccatgaaaaacatggcacacgcatacacccacatacgcctacattaaaaaacacacattatgtttagttcttaataccgaaaattataaacaccaaattgtgagaagagacatattgaaaataggcagatttttatcatttatcgtgtccagttctctggattgatttcagtttgaatttagtttcgattgtttgagttactagagttatttgagaacattgtgaaaagcgaagcgagctgagatgagaaaaataaaaagaatgtcgatataatttatagtgcaaaagtgctgattgcaagtaaaactaaagcgaagataactttaaacgatttgacttttatgtatatgtaaagaaggagccgcgaagagctgagagcgagcgttttatttttagttttacacgatatacatacatacatatatttaattacgattattttaatgctaatgatgttgacttttatgcaattatactaaaacaaaaacagaaacaacaccagaatgaaatacacaatattatacaaccaaaa

SEQ ID NO: 4671 - protein, 1325 aa, DROSOPHILA
MSIIDSGKYRLRKDWASASIPSLVNIDEHDGDSGDTEGSLNATAPLPPQKPPRRSSLALGLFSSKSDKSQKRRSSIAVSFLRRDSSKNSTKDSYESAVRSEKSDGSGTPTSPEIVYSSEENIRASSPNDPGKQTFFEDGSQSPRPVLQGLNTSYEGPQNDRQRRRRSSLQTKLDRHRRKKMEYSNQRSLDSGMMCSESHSDLTNDSLAEGSGSFANRSRNGNDDEDDIIDPSHGEYFPREKRHSWWNIFVPDNFKNRSRRASQDVSSLSRSVDNLAIPVRRSKSRSVDHGLAAPFDLDSLRSKVEQRFESVDKLSRQKSSLPTIPTISYTVGNRDTLTSVAARFDTTPSELTHLNRLNSSFIYPGQQLLVPDKSAKDDASSSSTHDADGASLSGKSSPVERKLSGDESREKDILEGLRPGSPKPGHIERVGGSSQQQQAEEEANKSDDPVITQRFLKINVRHITDGQGVVGGVLLVTPNAVMFDPNVSDPLVIEHGPESYGVIAPMELVVNAAIFHDIAHMRVAGGAGQGLNSASGDAEKPEIYYPKPVLVEEDSKELPEQQSLLGEDGNKRLDAEIGSLEIADDQESLCSSTGRDGDAFPKAFDRERVEDSSMEAKDSAKTDALDDEDKKAGLGLSSTRSTLEERRKSLLDHHWAIPSKDRSSEDEGDNESNVTVDSGARVQDPHSANSSVSGVPLSQPPVAAAAAAAAVAPASAVVPLPPSGIDLEHLEQLSKQSCYDSGIDIREPVPNVQPIPKKTVYSDADIVLSSDWVPPKTIVPTHFSESPPRSTILGQSLDAGTGGAGGVRKKTSSVSFSVDDEAAQQAQAQSAALAVTDKQADKKNKMLKRLSYPLTWVEGLTGEGGAVPPGGVGSGSLNKSGDTDSAPNTGDSNQSVFSKVFSRRSSIGTFIRPHSSEGTSSSTKLKEAKQAPKLDYRSMVSMDDKPELFISVDKLIPRPARACLDPPLYLRLRMGKPIGKAIPLPTSVMSYGKNKLRAEYWFSVPKNRVDELYRFINTWVKHLYGELDEEQIKARGFELIQEDTEWTKSGTTKAGMGGGSQDGEEISDLTRESWELIKAPFAKTYKIIKTASHAASHDLEMLGGESRKSPGSASLAPVALEPLQVISISNVLSMSTDEYRKTSLFATGSFDLDFPIPDLIGKTEILTEEHREKLCSHLPARAEGYSWSLIFSTSQHGFALNSLYRKMARLESPVLIVIEDTEHNVFGALTSCSLHVSDHFYGTGESLLYKFNPSFKVFHWTGENMYFIKGNMESLSIGAGDGRFGLWLDGDLNQGRSQQCSTYGNEPLAPQEDFVIKTLECWAFV

SEQ ID NO: 4672 - DNA, 3970 bp, DROSOPHILA
gccttgtactccgcctgcagctgcatcacctacagagaggaacagcctgcgtaagtctctggaggattgggatagccctctcatcatacctgccgccggctgagctgaaggagcgacagttcccgcccaatccttgggggttgtcctgtggcactgcggagctggatcagctgagatccaccgcgctgcagcgcattccgcacatgccgcaggcccttcaacattatttcccaatcgcggaccggctgcgactacgtaactccaccgaatccgaacacaaaacactatttcgttgacaggtcccgattaggacggcagcccctgcgaatactgatttataaccgaagagctccctaattcccggaccacactcttggccagccccaaaaaatgatgatttaactaaaataaaaacacacgaaatttcacgatagaccccgatagatcacacaaataccgccttctgatatcgatgaaggaaggatccgataggcgtagtcgaattgtcgtcatctatatcgatatgtcttgtttttgtattgttcaaataaattttttaaataataaacgcactctttgggagttgttagccactttatgcgtgcaattttgaaaaatttgcctatcattaatgaaagtgtataagagctaaaacttatgcgttacgcaaggctttaaataatgggtactctattaatgatagacattaatttttggtttggcgcgctctttgcgttaaactgatctccttatccaaccgatggaaggcaactgatacacgttcattttaaacatgtacaaatttcagagtctttagtttcaatacaaaatctgcagatatatgcggatataaacatatttgcgtatggatatgatggggcataatctgtctgtcaatccacccctcctatcgcactggacctactatcgatgttatcgactaaacaaatattgtgttcatcgcgccattcaaagtactgacatttacattttgttagcaacgcttttcgagaacaaaccggtgactatgaaacaatccaaggacgaagacaaggaggaatcgccggttcaaccgacgacccacaattccagcgcaggcagcaacggccacgacgccaaatctccggtggtcactactgcaccagcggcaacttgttccgtatcggtttcggatgcttcgggggccggagcttccgttcgcaccactggacgggtgaaggtgagtgagacccgcatccctgcaccccacaattctccatctgatcttgaatccgtgtcctgcagaaacccaaacaggtgtacgatccctcggacaactatgtgtcccgggccagcagcaaccgcaactctctctcttcagtcccggccacctccaatgtccagtcaccgccagtcaaggaggccaccgattcgcaggactccacaaccagtcctgtttcggagcagcagcagcagcagctacagcaagcggctcaacttcgcaacttcgacacgtgccagaagtgtggcaaaagcgaacccaagcgcggatctggccataagagcaacttcctcacttgcaagggctgcatgcagaaatgtaaatatccccccaattacttactactttcctacttcagacccacattaccattggctacgtaaatcatggcacgaccatagagaaacgtatacttctattgttggtcaatgctatctaccttctgtagtcgctttatcaaaaatgcaaacatgcacaaaaaacaaaactggttttaagaatcctgctattctttccgatttccatggtttagtttacactaaactataaatttgctgtttggtgcatatgtgcaatagttgttatcttacacatgtgtttacgtgatatgccactttggcaggtactaattcattgtgcatttgcattcacatcatttttcttagcatcatagtgtcttgcagtgataatagattgccatcagttcacaaagaatgtaaatagacaatctttgtcttacttatacacacaagatatataacaatagctagcgtttactggattcctataataatactcacattttgtgcatttctttacagggcacttcccctgcttgccgatcacgttccacaaccagagcacagcccgcaagaagttcaagtgcgacaagtgtcgctactgccggttatgcaacgtgagggggccaggtctttccatttgcagtttatgcgtggatgcctatcacccggactgcaatgatcccactctcaagcagagcaaagccgtcgaggccaatcccaattggagatgcttccgatgcgaggcgtgtaacatcggcggcagcacgagtgcatccagcgaggagcaaacgggggccaggaaatccactgcgagccgcgaggaccaggcccagccggtggtgccgaggaagtcgaatgcgggtcgcaagaagcgcgtccaatcggagcccaccgggcaagaaaaggcagcgaagattgagaagctagccaaacgtagacagcccttgaaaacagaaaagaagaaagagtacaaaaaggaggaggatgaggagccggcacaaataaaagtcaaggtggagaaggtcgagccggtagatatggagactgagcagattgagaataacgatctgcctgggccagaacaggaatcgctttccttacgcctaacgccaatcacagctgtagagagaagaagccatccagtatcaacctggtccgtggaacaggtcgtccaatttgttgccaagcgctatccgaaggaggcgaacgtgttccgctaccaggacattgatggcgcctccctgctgctgctcaatcgccacgatgtgatgaacggattcggtttgaagctgggaccggcgctgcgcgtcttcgaactcgtgatgtccctgcagactcaatccaatgacgttggcctcgcctggctagattagcgtccccacccacctccttagcacctaatgtcatgtaccacacttaatttaaatcaatactctcttctgtagccatcgcaaccgcatcacttcgcagccaataaagcttatattaagtcttctggcggatggctaagattttgctttagttttaaaaatgttccgtaatcccacactcgcaaatgcacatacttttgaatggtatctgctgaatttgcaacacgttatgatttttattaaggtgttttttttttttaagggtagaggcaaaggtttactcttttatagatgaactaaagttcttcagttaagaggaaaccttccttggccaataaagcaaaaaactgaccccaaaacctttgttgtgcttttacttatcgtgggttgaaagttgttattactttttgatggagtaaaatacgccttttattcgtctaatatttattcaaaggaaatgaaacatatcgatatggaatcactcttaaaacactgtgcgagtaatgcgactttagttcaaatacaaatatataagtctgggctggctcaacctaggatttctcaaaaataaagtaattggcaatgaataaataatgcacattcaagtaaatatatatacatatatatgatcttctaaaaaaaaaattcgaacaaaagtagttgtggctgtgaattggccgaacatcaagtgtaacttgaaaactataaatcgttacaaatcttagtctaaacttgagtgcaagtggatatttacaaaaggataggcacggtatgtgtggtgttgtccagtaaatactgctggcattcctcagcattcgcaaagtaacaattaaaatgatcaataaaacgtgcattcaagctgcatcatttcattaactacactttagtttcgctagtgaataccctaaatacatttaaattacataaatcattaagtattcttatcgctgctttacattacaattatcgtctcaacagaaagtgctacgaattgtccagacgttaatatccatcctaatatatatacacacaaaacg

SEQ ID NO: 4673 - DNA, 1402 bp, DROSOPHILA
acgcttttcgagaacaaaccggtgactatgaaacaatccaaggacgaagacaaggaggaatcgccggttcaaccgacgacccacaattccagcgcaggcagcaacggccacgacgccaaatctccggtggtcactactgcaccagcggcaacttgttccgtatcggtttcggatgcttcgggggccggagcttccgttcgcaccactggacgggtgaagaaacccaaacaggtgtacgatccctcggacaactatgtgtcccgggccagcagcaaccgcaactctctctcttcagtcccggccacctccaatgtccagtcaccgccagtcaaggaggccaccgattcgcaggactccacaaccagtcctgtttcggagcagcagcagcagcagctacagcaagcggctcaacttcgcaacttcgacacgtgccagaagtgtggcaaaagcgaacccaagcgcggatctggccataagagcaacttcctcacttgcaagggctgcatgcagaaatggcacttcccctgcttgccgatcacgttccacaaccagagcacagcccgcaagaagttcaagtgcgacaagtgtcgctactgccggttatgcaacgtgagggggccaggtctttccatttgcagtttatgcgtggatgcctatcacccggactgcaatgatcccactctcaagcagagcaaagccgtcgaggccaatcccaattggagatgcttccgatgcgaggcgtgtaacatcggcggcagcacgagtgcatccagcgaggagcaaacgggggccaggaaatccactgcgagccgcgaggaccaggcccagccggtggtgccgaggaagtcgaatgcgggtcgcaagaagcgcgtccaatcggagcccaccgggcaagaaaaggcagcgaagattgagaagctagccaaacgtagacagcccttgaaaacagaaaagaagaaagagtacaaaaaggaggaggatgaggagccggcacaaataaaagtcaaggtggagaaggtcgagccggtagatatggagactgagcagattgagaataacgatctgcctgggccagaacaggaatcgctttccttacgcctaacgccaatcacagctgtagagagaagaagccatccagtatcaacctggtccgtggaacaggtcgtccaatttgttgccaagcgctatccgaaggaggcgaacgtgttccgctaccaggacattgatggcgcctccctgctgctgctcaatcgccacgatgtgatgaacggattcggtttgaagctgggaccggcgctgcgcgtcttcgaactcgtgatgtccctgcagactcaatccaatgacgttggcctcgcctggctagattagcgtccccacccacctccttagcacctaatgtcat

SEQ ID NO: 4674 - protein, 446 aa, DROSOPHILA
MKQSKDEDKEESPVQPTTHNSSAGSNGHDAKSPVVTTAPAATCSVSVSDASGAGASVRTTGRVKKPKQVYDPSDNYVSRASSNRNSLSSVPATSNVQSPPVKEATDSQDSTTSPVSEQQQQQLQQAAQLRNFDTCQKCGKSEPKRGSGHKSNFLTCKGCMQKWHFPCLPITFHNQSTARKKFKCDKCRYCRLCNVRGPGLSICSLCVDAYHPDCNDPTLKQSKAVEANPNWRCFRCEACNIGGSTSASSEEQTGARKSTASREDQAQPVVPRKSNAGRKKRVQSEPTGQEKAAKIEKLAKRRQPLKTEKKKEYKKEEDEEPAQIKVKVEKVEPVDMETEQIENNDLPGPEQESLSLRLTPITAVERRSHPVSTWSVEQVVQFVAKRYPKEANVFRYQDIDGASLLLLNRHDVMNGFGLKLGPALRVFELVMSLQTQSNDVGLAWLD

SEQ ID NO: 4675 - DNA, 3507 bp, DROSOPHILA
gtagtcaaaaaacttgaggtgtatgtggattacagaacgaagtattcggatgatacttagaaaagcacacaaaacgaatttcttattgaaatgcgtttgtatataaacatacgatacgatgatgcaatgtcctgtcgtcaaagaagcaaatacaaattaatgtttcttttggaaagtcagattagtcaagataattcactttaatttaacattttagatatctaccaataaaacaaacaataacatctttttactctttttctttgcaggttcgtctcccatcagatacccaatatctaaatcatataaagaatataaatctataagaatataaacttacgataatgctattaataagactatatagcgcacacgaataaccagaacccaactcgaacacgccatatagacaacaccggacaactcagaactcgaaacaaaaacaaattgcggcacaatcgaatcgaatgcgaataagaacacaaatacagatccacactgaaccaatatcaaataggacgaatgtgcatattgctaattaaattacgaatagctaaagctaattaagcaacaatacagcagacacacacatggccagcccatatccagtcctatcttccaataatcgtccgcctctagccacaccatatagataagctgccacttttagcagccaagacagcaaagcccacaacactgaacaaaacatatttagcaaacacgggaggagaacagcaatattaaataccaactaccaaatagcatatagaaaatagcaaataccaagccaaataactagattgccttgctacccgtataaatgtctacctagatgtactgtttgatcgttccaacccgtaacgaaagtaatgaacacccaatcctgctatatgtgtgccttcgaatgtgcagtaaatgcagcttctgcatcggctgagcacgctatgcccaatatcttctatgccacctatagctaacccgactgcagctactcgaccaggccgacacatgtaaatacagaccacacgaacacaccaacacctccagatcgtatcagatcagatcatagaccagttttcagttcctgagttctcagccattggattttccgacaccgataccgatacactcacacattccgagcctagaatcctgaaatctcgcgaaaggcgacgacacacgagctaaaatgtgcgtttttccttcctgctattgtaaatttgaaacattctccaccacctatctgaattttccgtctttccacatttctccaaactattttcctccgatttctccaaaaattatactatactaaactatatatactatagaaggcatgctgcttgcgatcgcttatgattcttattcggctcttataccacatttaatccgctcatatattaaccttgtaaatccagattaaagactgatcaagagcttaaagaagacataatatatacataagttcaaatactttcttactttattcttttggatattcgttttttaaactagctatacacattttacaaatatcttataccgaaatatacctttcaatacttcctacaacctctaagtgtaatgtaaactctgtaatcatactgctaatccatttgcttttgattccatacaaatctattactaaatcctacaccaaagaaagcatttatgccaataaatataattaattgcccagcaccattttccatacccaaaaacgataatcccaacgaatgtttgtctctaagtgtcgcgaatgccaagtccatattttaagaatcgtttttctttactgttttcaactgtgatcttttcgatatttttctttggtacatgcctagcccctcgaatagccaacttttacacaccgttaatactttttggctctatgtgcaatttaaatctcaataaactctccacctaagcaacaaagtttaactaaaaccaagatatcaaagcaagttcaactcgctcgctcgtttacttcatctaatacccaatacaaccgaaagcaaaaaagagaaagcagcagctaattggctccaattgaactaattgttttatgcttctaattgttttatgcgaaattcttatcgataactaaccgccaaaccaaaccgctcaatccaaattgaattcgatccgtaatgtcgcgcgaaaactcgcctcgccacggctccttccgccgcactctcaacagcagagatccatcggcaggggcgccgggctcaggatccggatcgggaccgggatcgccacaccaccagcagtccaaccaccagcactaccaacaccaccaccaccaccaccaccaccaccaaccgccgatcatggagcacgccggcgcgccaatctccacgtccgcctcgaacatagccaccgtgctggaggacggcgagaaccagcagctgccgcccttgacgggatcgggacctagtcgccagagatctctgagggatcggctcaaggacggcatcaccggcagcttctcctggcagtaagtctcgcccagatcgtttgaagttccgatgcttcttcctcaccacttttgttcgaaatttactaccactcttttcaacgctcccgattttgaaattctttgaattcttttccgtagacctattttcccgtagtccaatctcctctgtatgttaaagctttctttctagacttgaattcgatttagttagtatccacacgatttaaaaatgcacaacgtataagtaagcaattgaaatccaaaaattactctggcaagggtgcaggatttatcacttagcctgcacagcactttttgtataaaaccatcaactaaaatccaaatttttactaaacttaaatttagaccctattcaatattggtacacatttggtaagtgcgagtcgcagttgactattatgaatcaagaagctgtgaaaagtggaaattttaagaattcttttattttctttttggaatataggtaggaaataataaaatcaacaaattaaaatacatattttattacttgtacttgtggtttcaacttcatagcttcaaaaagtcctcaaatctcacgtacggatactcatacatacggacaaacagacgaacggacatgaccagatcaacttgctcggatgaagaatataaatagtctgcaggaaatgcgttatcttaattaattatcttaagtaattatcttaagtttattggagcacaccaaaacaaactttggtagattttgtacgagtttattgggaaaaatacttttgggatttaattgggatcatcatttatattatgattgatacaagtgcatatatactttagttactatattatgtacttgattatttgatatttgatatttatctagtgacagcagtaacttatcaataactccaacacagaatggaatcagattaatttcttatttaacagaatatttatcagataagttccttatttatttgatgattggcattagcttaaatacaacaacgttgaaagcgaaagatgaa

SEQ ID NO: 4676 - DNA, 492 bp, DROSOPHILA
gccgacacatgtaaatacagaccacacgaacacaccaacacctccagatcgtatcagatcagatcatagaccagttttcagttcctgagttctcagccattggattttccgacaccgataccgatacactcacacattccgagcctagaatcctgaaatctcgcgaaaggcgacgacacacgagctaaaatagatccatcggcaggggcgccgggctcaggatccggatcgggaccgggatcgccacaccaccagcagtccaaccaccagcactaccaacaccaccaccaccaccaccaccaccaccaaccgccgatcatggagcacgccggcgcgccaatctccacgtccgcctcgaacatagccaccgtgctggaggacggcgagaaccagcagctgccgcccttgacgggatcgggacctagtcgccagagatctctgagggatcggctcaaggacggcatcaccggcagcttctcctggcagtaagtc

SEQ ID NO: 4677 - protein, 56 aa, DROSOPHILA
MEHAGAPISTSASNIATVLEDGENQQLPPLTGSGPSRQRSLRDRLKDGITGSFSWQ

SEQ ID NO: 4678 - DNA, 3748 bp, DROSOPHILA
ataacactcggcgtacagccagcagacggaaaagtaggttctcttctccttgggcagtttttccaggaatgcattccacacttcagagtcggaatctgaaaggcacagattcgttattcttatcaaagaaattcattttgcgcagggtaaatgaaataataatatataaaacgcaatcaattatgagttcaatgctattaaaagaaattaaaacagtacacttatatgattgccaacccaatgagcacccaaatacctaccattttcaccaaagggcagtaaaggaccgttgctcaggatgtcatcccgcagctgtctaacctcctttgtagtttgttcaatatcggcttccgctgcctggaatgcaatttgatatcaaaggtttaagctcaaggtcaaggtagaagtgcacacaactacccaccgcgccatatgtggccaggaggacgtccttgtccttgactagggaatccgcgatggtggccaaggtcgaaggcagacgcacacggaaggtgtagtaggcaaagctcctgcaataaatgacttttaagtaataatcataattcaattccacagcttggatgtgtgggtaacgatgggtcggcgtatttgttacatatgcgcgggccatttagacaccatctatagtaggcgctatatttagccctactcactgcttatagagggccgccagctcggtgtggggcggggttggtccgtccacgattccattctttgcgtcaaaatccgtttcgctgcccatttcgaggatctgtttgttgctccagccgaattgtactgctgcggaaagtttataaattgataaagtggcgcgtagtgtgaccgctttggcggtgatggaaaataccgaaattggaaccgataatttacaaggcgatactttttgaattttcaaaatttgttacttatgtttcaagttttttattgtttcatagcaaaaaaggtacatatatgtatatatttaagacgtctttggcttctagatatgtaacgactatttattaccaataatttaagctgaccagcctgtacaagattaatagccaaattcacgagctccgtcaacgaactgaatgaccccataactgcccgagaccatccagcgcggatccttcacactcagcgcctggccaacgccctcgggcaggccggagataacttcgctcttgacccgccgcagcacacaaatgttgctgggaaggaagccacggaggcaggtgctgagttcctgggtggggtcccagcagacgtcctgcagcagcttgcgatagttgagctctcccttgaagaccaccagcttggatagctgcagggaactatacaaatctggatccatttgcgccatgctgcaatagtcaaagatgtaattaggaggcactgaatatgcagtcatatccggaatgcgaacctgtaaaacgaatgtggtgatgtccagaaatgcgagattggcgccagttcgaactttccctcatcgatgaattgtaggaacttctttcctatcagacttataatgtagtccgcatgctcactcaagtactccagcgtccacttgaagtcccgctccgtcacatcggtgacaaaccaagggtgggccttcacatggaaccgcaccttgtcggccagtcccttctcaatcatgaactcagccagtataaagtcgctaaagagttcgtagcctgcattgtccagtataaagtccacctgcttatgcttcttcagtttagggttttccaagcacctccaaatctccgctgcctggttaaccagtacgcgctcatcggtgtttgccactttctccagcacctggcggttcgattgctttactgtatccgtgtcggtcgccacatcattgcagttgctccacatgttgatcctcagaagctcgtcgaacacctccacgctgttctctgatcgtcgtgtgtacttggtcagggccagtatatcatcaatgctatccgttagcgcctgctccttgactttggcaaagaaatcgtatgacttcagaaatacgctgttttccagaaaggagtggagtttgcggtgcagatagcactcggcatggagggagctggctttgtagaagctgcgttcgccatcgggcaggttgctgataaagttgttccaaacatctcgatcgggttctaagaaaacaaggcttataatcctcatgagaattctatgaagctaggaactaaccttcgccagtaaagttttgaaacgatttgtccgtttgcagctcgtactttagcctggagatcaatccaataatgatctttagctcctcgcgggcagcctgtgaaaattcatttgaggctggaagaagaaaaagttaatggagatgccaaaaaacgcttgcagggattaaccaaccgaattgggctaccagctcggatttgtcccgtgtcagcgtatctatcacgttggtcaggatcacgggcagccgactccggagtgtgaagaaggcaaagctctgcttgtaatggcccgacataaaggcattgagaggagtctgcaggtttacgatctggtatttggcatcgaattccgttcgcaacagtcgcgatattttgctgggttccgagtccgttttgccttcgtcctcgggcagttcgccttccgaggaagggtccttcgataaggattccatcttttctttttttttgtctgtgatttttgtgcgtttactggtgcattttagcagaatttacctgattttgactgatttttcaaagctgcaatctgtttagtgttgcctaacgcacgtcacactgcgattatgcgcaggactgtttgtgaatttgatttgttaagtttatgcgcgagtgtgaattttttcattctgacttatttttaaaattatagtttaacagataaaactcctcatgaaaaatattcagttgcttaagaaaatgcaatttaccacattcttgtttatttatttttcatttttattaatatgctaaaatttttcaagaaattatatttagttggttgagaatagatgggtttttttttcttttatttaacgaaaaggttgaagtatatttctaaaaaatttaatgaataatacaggacgttagtgtcgtggttatcaattatatgtttaagttgtttcagcttatggttttataagcatcgctatttgaatacaagcaatatattgttttaaaattttaaacaataatagttttaataaatacatatgaatgtgaaaattaaaagaaaaaatgcaaatacgttgttacgtagttaataacgtaaacatatttttttttttagatatatgcatgttattagatattttacatattttttacataagtagtattgaaaaatcataagtatcggtaatcagctgtcttacgaacagtgctggaaattgggaaagcgtgatggcttttttatcccctttttgcttccgcatctgattcatagcgctgccaacactgcccctttattgcagttttatttggcaaacgaacgcgacgcgaggtctgcaaaatgtttaaagcgcgaggaacggccaaccagtgagtgcacctcgattgatctgttcgatccgatctggtctcgcaatcgggcagcgctaaaccgcagggcaaccgcagcaaatgccatcgtgaatagaaacgcccacccgcacagacacacgaacggggatttggatttgagtttggactcggagtcaccacacacgcacacactcgcgcggacccttggagcacca

SEQ ID NO: 4679 - DNA, 1574 bp, DROSOPHILA
aaaaatcagtcaaaatcaggtaaattctgctaaaatgcaccagtaaacgcacaaaaatcacagacaaaaaaaaagaaaagatggaatccttatcgaaggacccttcctcggaaggcgaactgcccgaggacgaaggcaaaacggactcggaacccagcaaaatatcgcgactgttgcgaacggaattcgatgccaaataccagatcgtaaacctgcagactcctctcaatgcctttatgtcgggccattacaagcagagctttgccttcttcacactccggagtcggctgcccgtgatcctgaccaacgtgatagatacgctgacacgggacaaatccgagctggtagcccaattcgcctcaaatgaattttcacaggctgcccgcgaggagctaaagatcattattggattgatctccaggctaaagtacgagctgcaaacggacaaatcgtttcaaaactttactggcgaagaacccgatcgagatgtttggaacaactttatcagcaacctgcccgatggcgaacgcagcttctacaaagccagctccctccatgccgagtgctatctgcaccgcaaactccactcctttctggaaaacagcgtatttctgaagtcatacgatttctttgccaaagtcaaggagcaggcgctaacggatagcattgatgatatactggccctgaccaagtacacacgacgatcagagaacagcgtggaggtgttcgacgagcttctgaggatcaacatgtggagcaactgcaatgatgtggcgaccgacacggatacagtaaagcaatcgaaccgccaggtgctggagaaagtggcaaacaccgatgagcgcgtactggttaaccaggcagcggagatttggaggtgcttggaaaaccctaaactgaagaagcataagcaggtggactttatactggacaatgcaggctacgaactctttagcgactttatactggctgagttcatgattgagaagggactggccgacaaggtgcggttccatgtgaaggcccacccttggtttgtcaccgatgtgacggagcgggacttcaagtggacgctggagtacttgagtgagcatgcggactacattataagtctgataggaaagaagttcctacaattcatcgatgagggaaagttcgaactggcgccaatctcgcatttctggacatcaccacattcgttttacagcatggcgcaaatggatccagatttgtatagttccctgcagctatccaagctggtggtcttcaagggagagctcaactatcgcaagctgctgcaggacgtctgctgggaccccacccaggaactcagcacctgcctccgtggcttccttcccagcaacatttgtgtgctgcggcgggtcaagagcgaagttatctccggcctgcccgagggcgttggccaggcgctgagtgtgaaggatccgcgctggatggtctcgggcagttatggggtcattcagttcgttgacggagctcgtgaatttggctattaatcttgtacaggctggtcagcttaaattattggtaataaatagtcgttacatatctag

SEQ ID NO: 4680 - protein, 478 aa, DROSOPHILA
MESLSKDPSSEGELPEDEGKTDSEPSKISRLLRTEFDAKYQIVNLQTPLNAFMSGHYKQSFAFFTLRSRLPVILTNVIDTLTRDKSELVAQFASNEFSQAAREELKIIIGLISRLKYELQTDKSFQNFTGEEPDRDVWNNFISNLPDGERSFYKASSLHAECYLHRKLHSFLENSVFLKSYDFFAKVKEQALTDSIDDILALTKYTRRSENSVEVFDELLRINMWSNCNDVATDTDTVKQSNRQVLEKVANTDERVLVNQAAEIWRCLENPKLKKHKQVDFILDNAGYELFSDFILAEFMIEKGLADKVRFHVKAHPWFVTDVTERDFKWTLEYLSEHADYIISLIGKKFLQFIDEGKFELAPISHFWTSPHSFYSMAQMDPDLYSSLQLSKLVVFKGELNYRKLLQDVCWDPTQELSTCLRGFLPSNICVLRRVKSEVISGLPEGVGQALSVKDPRWMVSGSYGVIQFVDGAREFGY

SEQ ID NO: 4681 - DNA, 3384 bp, DROSOPHILA
tgactccccacaaaaacaaaacactcaactgattgctctcgggaatataatcttagaagtacgtccagaatttctgtggtcactggaacatgtgtggcacatgagattgccaccagaccccaatacacatgcgtttcatatagatcctattgctttcattaatgtatacacagcgattgtggggtctgtgaaaggggtacaattgcacatatgtacgtcttcatatatatgtacatatacgattccccacatttgaacgatatgagatcgtctcttcagttcttggtttctctcgctctaaacaaaagattgggggacgtgaagtctaaggattggcagacatatgcatttctagacaatgttgttgcatttgagtgcattcgctaattgtaaaagttgccaattcatcagcgtctgagatctgaaaaattatgctatatataattagttactagagggctggtttcgggctttcacctctatatacatgggatagtatagtatggtatgtatatagtaatcaatatttagtccaagggttgtgaaaggaaactttctataaagaacaggatacttgatcgaaagatgagccagtggcacttatttaagtatcaatcgacccgattaacttctgcagagacagtcatgcacctgttcattcaatcatatacaattagttcccagcaggcccaaacaaactgaataaatatacaaatgaactcgtctgtgtgttctttaatttgtcgcaagtgtgcaaatcagaaaaatgtgacgaaccgagcgttgtttatcaacaacaaagagaaaaaacagacagaacatgggcaatctaaatcgagaacggcacaacatacaaaggcaaacaaattggcgaagaaggcacaaaccggttgccactaagggaagtcagagccaaaagaaagcgatggaaccaaaaccggttcattgaacctgcacaccaccggcatcatggtatagacacacagaacgattccagctctttatcacacaaaaaatcattctttatttatgccatttctgtttttagttgagcacaattacttgcttacggaacgaaatgtaaataaacatggcgagctatggtaaatgcaaatgtctggaaaaatcgattatgcgtttatgcttagttcaaatcggttatgttgctgatggatgacatgctccccaaacactttagtcggtggcatcggccttggccacggagaaggcctccgaaacgggcagggtgccgctgttggcgatgaccacatccttgacgggacggtcgcgggcatcagtggccgagttctcgatctggcgcaccacattcatgcccgacaggatcttgccgaagacgacgtggcgtccatccagccagctggtctgcttggtggtgatgaagaactgcgatccgttggtgtccttgccagcgttggccatgctcagccagccggcgccatagtgcttcagcttgaagttctcatcctcgaagcgctcgccgtagatggagcgaccgccggtgccgtcgcccttggtgaagtcaccgccctggatcatgaagtccttgatgatgcggtggaacttgctgcccttgtagctgcggggtataagagcgttgcatgatggtcagttttgtcagcatgggaatttaaatttaaaaaaaaactgggtttagaactcgaaacctaaccaaaaaagaacatgcatacttataaattcagagaagaaaaaagaaatacccaagaactgcacttttatagtatggtagacttaataacagttggcgttctttgttaacccattagtgccgctttgtcaactgatgtatgcgattggccgctcaaacgccacgtaattgcttcaatctgagagccccgctataacctacaaagtgccgctgattagcggcatcttttgctggcctagcggtacctggcaccctactatgttggggtattttcggtactcaagtaccctactcacccctcgccctgcggcttcagcgccagctccttgaagttctccaccgtcttgggcaccgtcttgccgaacagaccgatctcgatgcgaccagcgggctcgccgccaatggtgatgtcaaagaaaacctacgcaatcggaagcggtttattattaacaagtcatctcacttgatttatggcgcagcaaatgtgtgtgtgtgtttgtgtgtgtatgtacgtggtgtatgcagaatgtaaggacgaaagtccaaggagcacgcaccttctcggtcactttgggacccttgctatcgtcggcaacaacgacgccggccaccagggctaccacgaaaacggataagaacagcttcatcgttctaaatattcacagcgcttcagtttattcctcaagcgacgtcgccaatggatatttcacgactgaattttcggtttctgttagtgatgtaagaaaactttgttgcatcgccaatcgatgttttccatcgttttttatgtttttgtcgaaatatcgatgcttaagtgtgaccattcgatgacgatgtctgatgatcacacattcgggcggaaaattcaaattcaaatagttaatacgccgaaagcataagttaaggttttcgtacgaaggaacaaagtaagttcgaagagttgactttattggtatagtttttaatattttagggattagaagtccagtttgcattagcacgtagcattctctcttgttttattgacggttctgtacacaaaaagtaagtaaaaaaatatgcttttatttattggtgtactgctatttgcgtctgagatttgtccatatccttggctgccttctctgctctcttcttctccctgctggccagaactttctccctggatttctgggccctttcagcgcaatccttgggtcgtgtcttcagggtcatatcatccacggccgcctgtttacgggctgatctcgaaatgcatcgttccatgcagctgatgggcacaaatcttccaatgaagcaaccgcagtgtgaacaatagtgattgatgtcctggcggccagaccattttttactgaaataaagtgaacattacgaaagatttataaagcttcatgcagatggccaaccaaagttttgtgaatcccagaaatctctgcaggcaagtgaccaactccagttgcaccaaactggttccagacttctcacacgaaggacaacggatccaggtgggctcctccttcaggtatcccacttgtggcttgtggctgacaatgatggccacaatctgcggttcgtccacggtcatgatgcgagttccagcgagaacgatcggtgactgaaagatggatcaaatttggagagatcatgggagggaaaatcaaaatcagaatcactctcccgatttctcttaaccgagg

SEQ ID NO: 4682 - DNA, 862 bp, DROSOPHILA
tggcgacgtcgcttgaggaataaactgaagcgctgtgaatatttagaacgatgaagctgttcttatccgttttcgtggtagccctggtggccggcgtcgttgttgccgacgatagcaagggtcccaaagtgaccgagaaggttttctttgacatcaccattggcggcgagcccgctggtcgcatcgagatcggtctgttcggcaagacggtgcccaagacggtggagaacttcaaggagctggcgctgaagccgcagggcgagggctacaagggcagcaagttccaccgcatcatcaaggacttcatgatccagggcggtgacttcaccaagggcgacggcaccggcggtcgctccatctacggcgagcgcttcgaggatgagaacttcaagctgaagcactatggcgccggctggctgagcatggccaacgctggcaaggacaccaacggatcgcagttcttcatcaccaccaagcagaccagctggctggatggacgccacgtcgtcttcggcaagatcctgtcgggcatgaatgtggtgcgccagatcgagaactcggccactgatgcccgcgaccgtcccgtcaaggatgtggtcatcgccaacagcggcaccctgcccgtttcggaggccttctccgtggccaaggccgatgccaccgactaaagtgtttggggagcatgtcatccatcagcaacataaccgatttgaactaagcataaacgcataatcgatttttccagacatttgcatttaccatagctcgccatgtttatttacatttcgttccgtaagcaagtaattgtgctcaactaaaaacagaaatggcataaataaagaatgattttttgtgtgataaa

SEQ ID NO: 4683 - protein, 205 aa, DROSOPHILA
MKLFLSVFVVALVAGVVVADDSKGPKVTEKVFFDITIGGEPAGRIEIGLFGKTVPKTVENFKELALKPQGEGYKGSKFHRIIKDFMIQGGDFTKGDGTGGRSIYGERFEDENFKLKHYGAGWLSMANAGKDTNGSQFFITTKQTSWLDGRHVVFGKILSGMNVVRQIENSATDARDRPVKDVVIANSGTLPVSEAFSVAKADATD

SEQ ID NO: 4684 - DNA, 9150 bp, DROSOPHILA
attttaaaatccaacttattttgtcttgctaatttaaatatgccaaaagaacatggaaatttccccctagcactcccccacaaactgagtaagggctatctgatattggaggaactcgattctcttgtttttctttaagtttctacaaccgaacagttaggttgattttcatcattaaataaataacattgggtttccctgcaactaaatctttctatcgcctccaatataccaactgagtaactctccgatttacctctaaccataaatattgcgatcggacgggaatctggtacaaggcctccattggcagaacaatatgatgtgattgcgacggcaattcaaagtaatcttagctaattaccataaaaagagaagacccaggccacatcagtctcagttccgtgccacatgtggagcaagtgaggcgaatccgagtctcgggtggagcatgcgacttgcggagctccagccatttcttaaataactccatgttattcaaaaagttacagaagtgaaagtgaaaagttgatgggggaaatccagaggcgcacgaagccgtgcgatcatgtaaatttaatcgcagatatgcccaagccatgagtcactaaaatcagtctacactgaaaagaaatatataagtggtccattttcaaattagcgctatcccttcagttttagttgggaacgagatgtttcgaaatcatcgaattctttcagcagtcatgtaaaataagtgttcaaggtgcatctcgtgatttggaggtatacactcaaaccggtctaagggcgaagtcaaaggacgcctgtccttgggagccgagttccatggccataaatagctggtccattaaaaccggcttatcgaacaatcgcaacctgggcttacttacttacctctcttcacttcgccgactctttgcagccgatcattggccacccactccaggattggcgctagcaccaaccgtgggagatgtctgcgatgcggcatcgcccgatggcccctccgggccaaggaccaggagcgggaaccgctggggagcacgtcgacagcgatgacaacaactttaccgacgacgagagctcgcccctcacccacgacatttacggcggcaggtaggtctctttcccggatcaagtatttcggaataggagtggtgcggtggccaactacctctaaagacaaccaaaacgagcgcgtatcagccagaaagctgtcattaaaccaggtgcgaccgctattgcctcacaatcacttttggttcggttcgaggcggagtcgggtctataaagtgccggaagtcgagatcatccagtcgagtgagcaatgcaaatgcagtaccatatgatctgatcgggttacttagtacaacgtttttattttaatgttattcaagatttcttttatttcctacatatcattgtttcaatttataattcttcttaaatctttactgccaatttgagcatttggtttttgaatagatcggtttgtagccaaagccattcgtagttctaattactaacagaaaattttgaaatgggtgaattagtcctacaagtccatcatacacagcttaatgaaacctcacgcaatttgcagccaacgcaccatacaagagacgaagggttgggatgttttccgggatccgccaatcaaaattgagaccggatcgacggcgaaccaggaatgcttagaattaaccgtgaagatcttgaagatcttcgcctatgtgattacgtttataatagttttaaccggtggcgtcatcgccaagggcacaatgctcttcatgacttcgcaggtgcgcaaggataagaagatggagtactgcaacaaagacttggtaagagcaccacgcccatctaaccaagtatctatcagaaactgaagataacacttacttttttatgcatttttccaagggtcgggacaaaagcttcgtagtccgacttccggaggaggagcgagtggcctggatctgggctctgctcatagcatatgcccttcccgagatcggagccttgatccgatccgcccgcatctgcttcttcaagacctttaaggtgccgaagacgggccacttcctcttcgtctggctgatggagagcttgagtgccgtgggcatggcgctgctgatgttcgtggttctgccccagatcgacgccatccagggcgccatgctaaccaactgcctgtgcgtcgtgccgggcatcttcggccttctatcgcgcacctccaaggagggcaagcgctttgtaaaggtgatcatcgatctggcggcggtggcggcccaggtgacgggcctggtgatctggccgctgctggagaaccgccgtgagctgtgggtcatcccggtggcctgtgtcatgatctcgtgcggctggtgggagaattacgtgtcgccacagtccccgctcggcctggttcgagccctgggtcgcatcaaggaggagatgaagtacactcgctacttctgccacatattcctatccatctggaagatcctgcttttcttcaccgtcacactgctcatctactgggcgcaaggcgaggaacccggcaatctgtttgccatgtacggagatgcctttggaccccacaagatcatagtctacgaactgccagcgggactgggcggtgtgcttccagataccctggaatcggccaacattgacaccgtggatgtggatgccgcctacaatacggtggtgtatgtactgcttctacagattttcggcgcctacttgtgctacatcttcggaaagttcgcctgcaagatcctcatccagggattcagctacgcgtttcccgtcagtctaactgttccgctctctgttacgttcctgatcgcagcctgtggaatccggatcgacgatccctgcttcttccatgacaccattccggactatctgttcttcacgagcccctcgaacttccggttcaacaactttgtcaccgagcaaatggcgtgggcctggatcctttggctcctcagtcagacctggatagcactgcacatctggactccgaagtgcgagcgtctggccaccaccgagaagttgtttgtccagcccatgtactcctctctactgatcgatcagtcgatggccctcaaccgaaggcgcgatgaccaggcagatgtgaaaacagaggtaagtattcgacaaggtatcttgaaagacacttaacatcccgtttacaggatctctcggagatcgaaaaggaaaagggcgatgagtactacgagaccatttctgtgcacacggatcgctcctcggcacccaacaagccatcgattaagtcctccgacaacatcacacgaatctactcctgcgcgaccatgtggcatgagacgaaggacgagatgatagagttcttgaagagcatcatgcgaatggacgaggaccagtgtgctcgtcgcgtggctcaaaagtatctgagggttctcgatccggactattatgaatttgagagtgagtaagatagattatccatttagagcgcccacaatcacaactcccttttcagcccacatcttcttcgatgacgccttcgaaatctccgatcacagcgacgatgatatccagtgcaatcgattcgtcaagctcttgatagccaccatggacgaggctgcctccgagatccatcagaccacgatcagactgcgtccgcccaagaagtatcccactccgtacggaggccgcctggtgtggacccttccagggaagaccaaattcattacgcacttaaaggacaaggaccgcattcgtcacaggaagcgttggtctcaggtcatgtacatgtattacctgctgggacatcgtctaatggagctgcccatttcggtggatcgcaaggatgcaattgcggagaacacctaccttttgaccctggacggagatattgacttcaagccgaatgcggtgactctactggtggatctgatgaagaagaacaagaacctgggtgctgcctgcggtcgcattcatcccgtgggatcgggacccatggtgtggtaccaacttttcgaatacgccatcggccattggctgcaaaaggccacggagcacatgattggctgcgtgctctgttcacctggatgcttctccctgttcaggggcaaggccctcatggatgacaatgtgatgaagaaatacacgacacggtcggatgaggctcgtcactacgtgcagtacgatcagggcgaggatcgttggctgtgcacattgctcctccagaggggataccgcgtggagtactcggctgccagtgatgcgtacacccactgccccgagggattcaatgagttctacaaccagcggcgcagatgggtgccctcgaccatagccaacatcatggatcttctggcggatgcgaagcgcacgatcaagatcaatgacaacatttcgcttctgtacatcttctaccagatgatgttgatgggcggcaccatcctgggacccggaaccattttccttatgttggtgggtgcattcgtggcagcctttcgcattgacaactggacctccttccactacaacatcgtgccgatcctggccttcatgtttatctgcttcacctgtaagtcgaacatccagttgttcgtggcccaagtcctttcgacggcatatgccctgatcatgatggcggtgattgtgggtacggccttgcagttgggagaggacggaataggctccccttcggccattttcctgatatccatggtgggctcattcttcatagccgcatgtttgcatccacaagagttctggtgcattacatgcggcctaatctatttgctgtccatcccgtccatgtacctgctgctcatcttgtactctatcatcaacctaaacgtcgtctcctggggcacccgcgaggtggtggctaagaagaccaagaaagaactggaggcggagaagaaggccgccgaggaggccaaaaagagggtgaagcagaagagcatgctgagcttccttcagagtggaatcggggacaatggcgacgaggagggctccgtggagttctctctcgctggactcttccgctgcatattctgcacccacggaaaaacatccgacgagaagcagcagctgacctccatcgccgaatcgctggacacgatcaaacatcgaatggacaccatcgagagtgctgtggatccccatggtcaccatgcctcccgacatggcaggaggagaaccacatccagtggctccaaggatcaccacctgctgacctcggtggcggagaagtctggcgatgaatcggacgagtcggactcagacacttcggcggaaccaaagcaggagcgagactttctaaccaatccctactggatcgaggaccccgatgtacgcaagggcgaggtcgattttctctccagcaccgagatccagttctggaaggatctcatcgaccagtatctctatcccatcgacaatgatcccgtggagcaggtaatatacacccatatgctattaatcttaaacttaatattctttggtgttaactcatgtttaaagtatataatatcttaagctatatgcagttctccaacctcgttcagtaacgtcaaagatagcatagctcagtaagataatttggataaatttatcaattatccagatcacaaatctaccttactgaatatggcttaaatttgcttaaaagcttgttcaaaaattgattcaaattagattgagttagattgatgcccactttcggagagaaagtgtctattaaaaacctagttttaagataataaacactttctagatctagtctactacaatagatccatatagatgtgtagtatggtagagtatttaaacttcggcccgccgaagccagccttatggttcgctgtgagtattttccccggaaaagccctcatcccgaaaataccgaaccgaacataacttaacccctatcgccggatcggataacgctcttgtaggcccgcatagccaaagatctgaaggagctgcgcgactcgtcggtgttcgcgttcttcatgatcaatgcactgttcgtgctgatcgtgttcctgctgcagctgaacaaggacaacatccacgtgaagtggcccttcggagtgcggacgaacatcacctacgacgagtccacccaggaggtaattgctgctttcacgccaaactaacactactcttttttcggtataattctttctttggcgccacgatctgaatctgaaatcgaactgaatccaaactgaatcgaaatgaaggcccgcattgcctccgacctgattgagctgcggaacaagtcggtctttgcgtttttcatggccaacgccctgttcgtgctgattgtcttcttgttgcaactgaacaaggacaagctacacattatttggccgttgggcgtcaaaaccaacattacctatatcgaagagacatccgaggtttatacacaagcttttctcgatgttatatagtattacccacaactgtgctgtcatagtgtatttgtcttaccctaaaacctccggacgggtcctctaacttcctgcctgtcctcctcagtttcactttctctaaatgtttactacccaacatgtccaacatgtcacatcaccaaacagctaatgatgctctttgttctcggtactcccgtttaccttgttagccccatcctaatggttcaggctgtttatcatacgaatacatcatgtaaaaacaacagaacaacatcttggcattttcgcggttctaacagttagccctaaaatgacaacacggtaaactgtaagcaacatacttaagtatccccctctgagtaatcacagttctgtacacaagggccagaggtgcggccagcatgttcattgttcctcagacatcaatgtgttcaataaatatataaataaaaccaaacccgacatataacctacctcccaaatggtatcacaccacaacctcaacctcaacatgccacaatcaccgactactggtatcaagatcagccattatccaagcccaaaccgtcaaccaatcaaatcgttcagtgtcactaacccaaaatcaactccttcagggccccgctaatcgtattactcatcccccataggtgcacatctccaaggagtaccttcagctggagcccatcggattggtgttcgtattcttctttgctcttattttgataatccagttcacggccatgctgttccatcgatttggaaccatttcgcacatcctggcctcgactgaactcaacttctgcaagaagaagtctgaggatctgacacaggaccaactaatagataaggtaggtggcccgtaattgacattaatacaaataataaaattatgatattatttagcatgctgtggagatcgtcaagaacttgcagaggctgcagggaatcgatggcgactacgacaatgactccggttccgggccagatcgcatagccaggcggaagaccattcaaaatctggagaaggcgcgacagccacgtcgccagatcggcaccctggatgtggcgttcaagaagcgcttcctgaaactcaccgccgatgcggagaacaatccggccacgcccattctcacccgccgcctgacaatgcgggcggagaccatccgggcactggaggtgcgtaagaattcggtgatggccgaaaggcggaagtccgcgatgcaaactctgggagcaaagaacgagtacggaatcacaactggagcaccggtgagattagaaaagtttttggagaaattttagatacaggatcataacttctttaatgcatatatgtagattaacaacaatggagctctgccgaatcagcgaagcggacgtgtctcgaatgcaggcatcagcatcaaggatgtattcaatgtgaacggtggtggtgccgaggtaaaggccaatttataatcataaaatatgtgtattctcatggaaatattttgttacgtccgcttacacttgcagcagatttacggctcgaatgggggcggcactatcaaccagggttacgagcatgtgatcgacgaggacggcgacggcaactccctgcggctgaccaccaggaatccccatccccacccgcaccaccaggtctcctggggccagaacaccaacggcggcggcggtaatggcacaggtcgcctgtgaaggacccgcccatcctagacgtagagctaagttagacctaggtaacttgttaacgaattccgcctctttccatcaactgcctaaacttaagactaagccaatacctagaattgtagtcagaaggaaggattgtgttgtatagtatgtatagggacgcgagtgagagccaggacactctggctcagaaggatcaggtcgttcataaggcttcatggcaacagaacgaacattatgcttagctaatcacactgccagtgtcgatgtgtgccaataattgggtggctgatcgcccactgtggcagcaacattcatgcgatgtactatactatcatttgttaggttatctttaagtcaatacccgcgtggatcatccgaaacacgcggccagtgcatgctgacacaaaatactcaacgtggagctgaaccgcagtggcctatttgtacactcgacgacatatcgaggatagttctttttaaatgaataatcattgatgatttgatggattgtaaaactttttaaaacaataaatagaagcatcaaacagatattcgatatttctcactctcatcaaacttgggtcatcccaaggataagctacatccgaacccaccttcggtagtggagaccctaccccaagtttagaccaatacccgcatattttcggcttagagccctggtactatacgaataactttattttcgggaaagggtagaaacattactagacatcgcttgcgggacaacattgataaccagctatgatagataatagtattagacacccatatggaaacgtcgtgtatgctcgcgttatcagcgagttaccttagtggaataaaaggttgcccttcttggcggctatgggcaagcggtcgccctggaggaacgggtttatgaccgcgtcgtccagccgaggatcgggcatcacaggatatccggccttcttagccaggctgttaacgttgttcaggctgttctcctggcccatctgcatgatgt

SEQ ID NO: 4685 - DNA, 5001 bp, DROSOPHILA
atggcccctccgggccaaggaccaggagcgggaaccgctggggagcacgtcgacagcgatgacaacaactttaccgacgacgagagctcgcccctcacccacgacatttacggcggcagccaacgcaccatacaagagacgaagggttgggatgttttccgggatccgccaatcaaaattgagaccggatcgacggcgaaccaggaatgcttagaattaaccgtgaagatcttgaagatcttcgcctatgtgattacgtttataatagttttaaccggtggcgtcatcgccaagggcacaatgctcttcatgacttcgcaggtgcgcaaggataagaagatggagtactgcaacaaagacttgggtcgggacaaaagcttcgtagtccgacttccggaggaggagcgagtggcctggatctgggctctgctcatagcatatgcccttcccgagatcggagccttgatccgatccgcccgcatctgcttcttcaagacctttaaggtgccgaagacgggccacttcctcttcgtctggctgatggagagcttgagtgccgtgggcatggcgctgctgatgttcgtggttctgccccagatcgacgccatccagggcgccatgctaaccaactgcctgtgcgtcgtgccgggcatcttcggccttctatcgcgcacctccaaggagggcaagcgctttgtaaaggtgatcatcgatctggcggcggtggcggcccaggtgacgggcctggtgatctggccgctgctggagaaccgccgtgagctgtgggtcatcccggtggcctgtgtcatgatctcgtgcggctggtgggagaattacgtgtcgccacagtccccgctcggcctggttcgagccctgggtcgcatcaaggaggagatgaagtacactcgctacttctgccacatattcctatccatctggaagatcctgcttttcttcaccgtcacactgctcatctactgggcgcaaggcgaggaacccggcaatctgtttgccatgtacggagatgcctttggaccccacaagatcatagtctacgaactgccagcgggactgggcggtgtgcttccagataccctggaatcggccaacattgacaccgtggatgtggatgccgcctacaatacggtggtgtatgtactgcttctacagattttcggcgcctacttgtgctacatcttcggaaagttcgcctgcaagatcctcatccagggattcagctacgcgtttcccgtcagtctaactgttccgctctctgttacgttcctgatcgcagcctgtggaatccggatcgacgatccctgcttcttccatgacaccattccggactatctgttcttcacgagcccctcgaacttccggttcaacaactttgtcaccgagcaaatggcgtgggcctggatcctttggctcctcagtcagacctggatagcactgcacatctggactccgaagtgcgagcgtctggccaccaccgagaagttgtttgtccagcccatgtactcctctctactgatcgatcagtcgatggccctcaaccgaaggcgcgatgaccaggcagatgtgaaaacagaggatctctcggagatcgaaaaggaaaagggcgatgagtactacgagaccatttctgtgcacacggatcgctcctcggcacccaacaagccatcgattaagtcctccgacaacatcacacgaatctactcctgcgcgaccatgtggcatgagacgaaggacgagatgatagagttcttgaagagcatcatgcgaatggacgaggaccagtgtgctcgtcgcgtggctcaaaagtatctgagggttctcgatccggactattatgaatttgagacccacatcttcttcgatgacgccttcgaaatctccgatcacagcgacgatgatatccagtgcaatcgattcgtcaagctcttgatagccaccatggacgaggctgcctccgagatccatcagaccacgatcagactgcgtccgcccaagaagtatcccactccgtacggaggccgcctggtgtggacccttccagggaagaccaaattcattacgcacttaaaggacaaggaccgcattcgtcacaggaagcgttggtctcaggtcatgtacatgtattacctgctgggacatcgtctaatggagctgcccatttcggtggatcgcaaggatgcaattgcggagaacacctaccttttgaccctggacggagatattgacttcaagccgaatgcggtgactctactggtggatctgatgaagaagaacaagaacctgggtgctgcctgcggtcgcattcatcccgtgggatcgggacccatggtgtggtaccaacttttcgaatacgccatcggccattggctgcaaaaggccacggagcacatgattggctgcgtgctctgttcacctggatgcttctccctgttcaggggcaaggccctcatggatgacaatgtgatgaagaaatacacgacacggtcggatgaggctcgtcactacgtgcagtacgatcagggcgaggatcgttggctgtgcacattgctcctccagaggggataccgcgtggagtactcggctgccagtgatgcgtacacccactgccccgagggattcaatgagttctacaaccagcggcgcagatgggtgccctcgaccatagccaacatcatggatcttctggcggatgcgaagcgcacgatcaagatcaatgacaacatttcgcttctgtacatcttctaccagatgatgttgatgggcggcaccatcctgggacccggaaccattttccttatgttggtgggtgcattcgtggcagcctttcgcattgacaactggacctccttccactacaacatcgtgccgatcctggccttcatgtttatctgcttcacctgtaagtcgaacatccagttgttcgtggcccaagtcctttcgacggcatatgccctgatcatgatggcggtgattgtgggtacggccttgcagttgggagaggacggaataggctccccttcggccattttcctgatatccatggtgggctcattcttcatagccgcatgtttgcatccacaagagttctggtgcattacatgcggcctaatctatttgctgtccatcccgtccatgtacctgctgctcatcttgtactctatcatcaacctaaacgtcgtctcctggggcacccgcgaggtggtggctaagaagaccaagaaagaactggaggcggagaagaaggccgccgaggaggccaaaaagagggtgaagcagaagagcatgctgagcttccttcagagtggaatcggggacaatggcgacgaggagggctccgtggagttctctctcgctggactcttccgctgcatattctgcacccacggaaaaacatccgacgagaagcagcagctgacctccatcgccgaatcgctggacacgatcaaacatcgaatggacaccatcgagagtgctgtggatccccatggtcaccatgcctcccgacatggcaggaggagaaccacatccagtggctccaaggatcaccacctgctgacctcggtggcggagaagtctggcgatgaatcggacgagtcggactcagacacttcggcggaaccaaagcaggagcgagactttctaaccaatccctactggatcgaggaccccgatgtacgcaagggcgaggtcgattttctctccagcaccgagatccagttctggaaggatctcatcgaccagtatctctatcccatcgacaatgatcccgtggagcaggcccgcatagccaaagatctgaaggagctgcgcgactcgtcggtgttcgcgttcttcatgatcaatgcactgttcgtgctgatcgtgttcctgctgcagctgaacaaggacaacatccacgtgaagtggcccttcggagtgcggacgaacatcacctacgacgagtccacccaggaggcccgcattgcctccgacctgattgagctgcggaacaagtcggtctttgcgtttttcatggccaacgccctgttcgtgctgattgtcttcttgttgcaactgaacaaggacaagctacacattatttggccgttgggcgtcaaaaccaacattacctatatcgaagagacatccgaggtgcacatctccaaggagtaccttcagctggagcccatcggattggtgttcgtattcttctttgctcttattttgataatccagttcacggccatgctgttccatcgatttggaaccatttcgcacatcctggcctcgactgaactcaacttctgcaagaagaagtctgaggatctgacacaggaccaactaatagataagcatgctgtggagatcgtcaagaacttgcagaggctgcagggaatcgatggcgactacgacaatgactccggttccgggccagatcgcatagccaggcggaagaccattcaaaatctggagaaggcgcgacagccacgtcgccagatcggcaccctggatgtggcgttcaagaagcgcttcctgaaactcaccgccgatgcggagaacaatccggccacgcccattctcacccgccgcctgacaatgcgggcggagaccatccgggcactggaggtgcgtaagaattcggtgatggccgaaaggcggaagtccgcgatgcaaactctgggagcaaagaacgagtacggaatcacaactggagcaccgattaacaacaatggagctctgccgaatcagcgaagcggacgtgtctcgaatgcaggcatcagcatcaaggatgtattcaatgtgaacggtggtggtgccgagcagatttacggctcgaatgggggcggcactatcaaccagggttacgagcatgtgatcgacgaggacggcgacggcaactccctgcggctgaccaccaggaatccccatccccacccgcaccaccaggtctcctggggccagaacaccaacggcggcggcggtaatggcacaggtcgcctgtga

SEQ ID NO: 4686 - protein, 1666 aa, DROSOPHILA
MAPPGQGPGAGTAGEHVDSDDNNFTDDESSPLTHDIYGGSQRTIQETKGWDVFRDPPIKIETGSTANQECLELTVKILKIFAYVITFIIVLTGGVIAKGTMLFMTSQVRKDKKMEYCNKDLGRDKSFVVRLPEEERVAWIWALLIAYALPEIGALIRSARICFFKTFKVPKTGHFLFVWLMESLSAVGMALLMFVVLPQIDAIQGAMLTNCLCVVPGIFGLLSRTSKEGKRFVKVIIDLAAVAAQVTGLVIWPLLENRRELWVIPVACVMISCGWWENYVSPQSPLGLVRALGRIKEEMKYTRYFCHIFLSIWKILLFFTVTLLIYWAQGEEPGNLFAMYGDAFGPHKIIVYELPAGLGGVLPDTLESANIDTVDVDAAYNTVVYVLLLQIFGAYLCYIFGKFACKILIQGFSYAFPVSLTVPLSVTFLIAACGIRIDDPCFFHDTIPDYLFFTSPSNFRFNNFVTEQMAWAWILWLLSQTWIALHIWTPKCERLATTEKLFVQPMYSSLLIDQSMALNRRRDDQADVKTEDLSEIEKEKGDEYYETISVHTDRSSAPNKPSIKSSDNITRIYSCATMWHETKDEMIEFLKSIMRMDEDQCARRVAQKYLRVLDPDYYEFETHIFFDDAFEISDHSDDDIQCNRFVKLLIATMDEAASEIHQTTIRLRPPKKYPTPYGGRLVWTLPGKTKFITHLKDKDRIRHRKRWSQVMYMYYLLGHRLMELPISVDRKDAIAENTYLLTLDGDIDFKPNAVTLLVDLMKKNKNLGAACGRIHPVGSGPMVWYQLFEYAIGHWLQKATEHMIGCVLCSPGCFSLFRGKALMDDNVMKKYTTRSDEARHYVQYDQGEDRWLCTLLLQRGYRVEYSAASDAYTHCPEGFNEFYNQRRRWVPSTIANIMDLLADAKRTIKINDNISLLYIFYQMMLMGGTILGPGTIFLMLVGAFVAAFRIDNWTSFHYNIVPILAFMFICFTCKSNIQLFVAQVLSTAYALIMMAVIVGTALQLGEDGIGSPSAIFLISMVGSFFIAACLHPQEFWCITCGLIYLLSIPSMYLLLILYSIINLNVVSWGTREVVAKKTKKELEAEKKAAEEAKKRVKQKSMLSFLQSGIGDNGDEEGSVEFSLAGLFRCIFCTHGKTSDEKQQLTSIAESLDTIKHRMDTIESAVDPHGHHASRHGRRRTTSSGSKDHHLLTSVAEKSGDESDESDSDTSAEPKQERDFLTNPYWIEDPDVRKGEVDFLSSTEIQFWKDLIDQYLYPIDNDPVEQARIAKDLKELRDSSVFAFFMINALFVLIVFLLQLNKDNIHVKWPFGVRTNITYDESTQEARIASDLIELRNKSVFAFFMANALFVLIVFLLQLNKDKLHIIWPLGVKTNITYIEETSEVHISKEYLQLEPIGLVFVFFFALILIIQFTAMLFHRFGTISHILASTELNFCKKKSEDLTQDQLIDKHAVEIVKNLQRLQGIDGDYDNDSGSGPDRIARRKTIQNLEKARQPRRQIGTLDVAFKKRFLKLTADAENNPATPILTRRLTMRAETIRALEVRKNSVMAERRKSAMQTLGAKNEYGITTGAPINNNGALPNQRSGRVSNAGISIKDVFNVNGGGAEQIYGSNGGGTINQGYEHVIDEDGDGNSLRLTTRNPHPHPHHQVSWGQNTNGGGGNGTGRL

SEQ ID NO: 4687 - DNA, 4748 bp, DROSOPHILA
caaaagacttaggacacgaacttaggcagaggttattgaatgggcaagcaatagactaaggacaacccactaattaatcagcagattaggagtcagctgtttgggacttctttaccagtcttttctggcaatgcccagtgggaatattatctatatatgtatatctggccggtcggcagtggagcgtatatagaccgcgcccgctcattgaacctatcttgcgcaaatggccagccgacttcctttccgctagccccctccctctccctccgaggagccggcgcgtgcatttttctttttgaccgattttcatggcatgatctgttttacggctttcggttttctttcatcgcgtttaccgaagagcgatcgtcggtcttcggatctcttcgttttcggagtcggcgggtatttaagtggttcgaaacgtgtttgcagacattcagtttccgttatcgtcttgagcgcttcggttgtgtgctattaattatacgccgcgttgtccgttgcatacactgcataaaggattacctctgacctaatctaatcatctcattctaaccaaggtgagcattcccatccgatatgcacctctgcttcatgttgagctcacaattcgtgggacactgcccggaatttaaattagtgcgccgaaatattcacgataaagtgtgcaaatcatgtgttgcattccagacagacaaaagaagttgaggatttctgcgatccaacgaccagcaatcaatttgacaaggagacaataacttcacttgaaattgtgcgaataactcaatttgaatggcagcaaacaatgaagaaggccgtgtattcggcccaacaatgtttgatttaaataattttgaggtggattccttacgaaacagagttcattgatcgaagagtaattctggaataattaatgcagtttgcatagaatagattaaagtaaacagaatgacactaaagtgatagaagtgaatcaaattagaatttggttacgttcatttccttagcacggtgttttatattcttcatgagtgcacatacagttgcggtaacaataatattgtatttattaataataatgtataataatgtatttacctccttggtcacaaaatagacctgtaatgcctagtcatgatacttaattgtctcatatagtctaatgtcataatataatattttaacaatttgttttgagcacttagagctcatctctttttcttgtaagtgtcgcttgtttacaaaccatttctgaaattaaaaaaaaaaaaccattacaaagcaaacaggcaagcagaactattgtactgacagactttagaccgagatgaggagcagaagacaaaggccaacagaggaagaaaccgaaagcacttatgccctctgatgccaaacgacagaaagatacgtttataaaacccgtttttggcaatttttctggcgacttggtcgctggattttcgaatcactctatttcgtgctgttttgttttcctggagcttttcgcaatatttgcaataggtgcaaccagaagaaacatttgcaatagccgcagcggccattagcgcaacaaagcaacaaaaataagcaaaaaaaatctgaggaaaaccatacgagtgtgcgcacacacagcaatttgagtgtggtcgagtctcgtccaatccagcgctggtaattgcaattctaacaggttgcaggttgcaactgcagcagccgctgcggttgcatttccagctggttgcggcatgtgcagcacacggacgccaatcgaatccccgccagctctacgcgagcttttcctccgccagctgcaattgacctcaatgagctcggtgtgaagcggtgttgcaagttttgattcaaaatagccccatagcccacttgttgcagtgaaacattctgtacacttttccaaagtttcccgattcagacattcatccacactttaaatgtcagttatctcacgtttacgtatcactaagaaaggtttaaaaaagaagaaatggaatagtaaacaaacaagctaagcaaaaagctgtgtatgccccagtggacgcaaacaaggcagccgtgtttgggccaaaatatactgtataaccatttagagactaccacgactgcctccatgtcacttttctctatttgcataaacttacattttcattgctcattccgcgcggtattcacgaatatacatagtacaagtccccacaaaaggccaggcagatggctaaactcgaaattttgaggtcgatgtcagctgattttgttttggacattacgcaaacgtttaagttagccaagtactgcgagtatatgtctatttggggttaaggggcgggccccaagtaatgcatatttggccacagcccatgctaatgaatccccgggcactgatgtgtgaccgcaagacccacgaatatccgacgttttgaaagcgcgcaattaaaatgtcaaaaatatctgctcattgcgaatggcttattaaaaagtgtgtcgaaatggccagcgaagaattgggggttgctatttcattgtcattatctttttatattttcttaaagcactgggcattacccaatagacataaagggttaaattttcaatacatgctgacgaaacttggctatttagtcgaagattgaaacgtttttatgaacaagttttaagataaatttacattaaaagttgtactgaatatttgaatgtgagtatcatgtagaaatacctataacaccttacccttctccagatgatgatgctacaccccacacccgaccagcgcgtgagcatccgcgaggagctgcgtgagccggaggaccccgcagacattgagcgcgacatcaagctgattcgcgagtggctggagacacagccgcacctgcccaaggacatggacgacatgcgcctcacgaccttcctgcgcggctgcaagttcagcctggagaaggtgaagaaaaagctggacatgtactacaccatgcgcaacgcggtgccagagttcttctccaaccgggacatcaatcgggaggaactaaacatcgtactggactatgtgtaagtattccgcagacagcaattatcatcacattcgctggaaacaatgatatttgattacaggcactgcccgactctcccggggattacgcccaatggacgccgcatcacgttcatccggggtatcgattgcgacttccagccccaccacatcctggacgccatgaaggtggccctgatgatcggggacgtgcgcctggcggaggagagcgtcggcatcgccggcgacatcttcatcctggacgcgtcggtggccagcgccgcccacttcgccaagttctcgcccaccgtggtgaagaagttcctgatcgccgtgcaagaggcctatcccgtgaaggtgaaggaggtgcatgtgatcaacatctcgccgctggtggacactatcttcaactttgtgaagccgttcgtgaaggagaagatccgcagccgcataaccttccacaacgacgtggagagtctctacaaggtggtgccccgtgacctcctgcccaacgagtacggcggcaaggccggcggcgtcgtcgagctgaaccagtggtggaagcagaagctggtcgacaacacccagtggttcaaggaccaggaggacaagaaggcgaacgagtcccttcgccccggcgctcccaagaccagcgatgacctcttcggcatggagggcaccttccggcagctgaacatcgactaggcgtgaaaggagccgccaggattcgggattcagcatccaagatcctgatcctgcgaccttatcccagcttgtctaaccgttaatatcagccgctcatttgtttagtccaagctcgtgtgcatgacccttgcttagttgcttcattctttcgccagaacccattgctaatctatcgtatatcaccagtacattgcagtaattacaataataaagaaccagcgtattaaggaatgaataaataacttcgaattgcggttttattgtggtactttctgggcagtaataagctcacaagctctgaacgcaaagcaatactttctgattaagatttaaaacccctcaagaattaatatattattttagctattcgaaaacctaatctgaattaataatatatttttccatatgatgttaagttattgagtataaataaaggttcagtaaccatttaaaaacacttatattccctctcaaaaaaaaaaaaaaatagaatccatgaatcttaaattcccctattatttaagaaaacaggaagttcttgcttatatcctctttcataaacacatatttcgaacgccgcttaaaatacatataaaatgggcatgcatcaaattaaggaataaattaatcagggaaactgttccccatatgttcaccatgcaacgaagtagttgagcaatggatgccaaaggatgaaagccttgctccacgaacgtcccattaaaataatgaccgaggagctagggatgagggcaaggaccaggactcgatggcgatgcctgatggcgtgtggcacagtgcacaatgccacccatatatttcaatcgtcgcatgtcgccactttgtgcaacatgcacattgatcaacggaaaggaaagtatgtggcagtgttcagtgggaggatggagagccccgaacggattcctcccggctgacttattcctccgacatattggttccgtccgtccattgttgcatgcgcatttcggcgtacgaaatc

SEQ ID NO: 4688 - DNA, 1041 bp, DROSOPHILA
ttatcgtcttgagcgcttcggttgtgtgctattaattatacgccgcgttgtccgttgcatacactgcataaaggattacctctgacctaatctaatcatctcattctaaccaagatgatgatgctacaccccacacccgaccagcgcgtgagcatccgcgaggagctgcgtgagccggaggaccccgcagacattgagcgcgacatcaagctgattcgcgagtggctggagacacagccgcacctgcccaaggacatggacgacatgcgcctcacgaccttcctgcgcggctgcaagttcagcctggagaaggtgaagaaaaagctggacatgtactacaccatgcgcaacgcggtgccagagttcttctccaaccgggacatcaatcgggaggaactaaacatcgtactggactatgtgcactgcccgactctcccggggattacgcccaatggacgccgcatcacgttcatccggggtatcgattgcgacttccagccccaccacatcctggacgccatgaaggtggccctgatgatcggggacgtgcgcctggcggaggagagcgtcggcatcgccggcgacatcttcatcctggacgcgtcggtggccagcgccgcccacttcgccaagttctcgcccaccgtggtgaagaagttcctgatcgccgtgcaagaggcctatcccgtgaaggtgaaggaggtgcatgtgatcaacatctcgccgctggtggacactatcttcaactttgtgaagccgttcgtgaaggagaagatccgcagccgcataaccttccacaacgacgtggagagtctctacaaggtggtgccccgtgacctcctgcccaacgagtacggcggcaaggccggcggcgtcgtcgagctgaaccagtggtggaagcagaagctggtcgacaacacccagtggttcaaggaccaggaggacaagaaggcgaacgagtcccttcgccccggcgctcccaagaccagcgatgacctcttcggcatggagggcaccttccggcagctgaacatcgactag

SEQ ID NO: 4689 - protein, 308 aa, DROSOPHILA
MMMLHPTPDQRVSIREELREPEDPADIERDIKLIREWLETQPHLPKDMDDMRLTTFLRGCKFSLEKVKKKLDMYYTMRNAVPEFFSNRDINREELNIVLDYVHCPTLPGITPNGRRITFIRGIDCDFQPHHILDAMKVALMIGDVRLAEESVGIAGDIFILDASVASAAHFAKFSPTVVKKFLIAVQEAYPVKVKEVHVINISPLVDTIFNFVKPFVKEKIRSRITFHNDVESLYKVVPRDLLPNEYGGKAGGVVELNQWWKQKLVDNTQWFKDQEDKKANESLRPGAPKTSDDLFGMEGTFRQLNID

SEQ ID NO: 4690 - DNA, 4038 bp, DROSOPHILA
tttaataaatatactaaataattaaatatggcaattaaattaaaatgcaaaagtaatatcaaagacaatagaattattctagtgtctttgctttgttcatatcttgaggcacgaagtgcggacacaagcactcaacaatcattgccttattaatttttcacacgccgcaagatgaatactctaatgacaaatattcttatataaagtcatttttgaaatatatttttgtgataatatgtacatagatttgactatttctaatctattttcaaataataataacgttaaggcaatgcaaaacaagaatttttcgcatggtgccaattgatcaaaaataatatagatttaaagccaaagaacttctaaggtgaagggcatattttgtcaaatttacaatgcatgtgaatacgtgtgcacacatacagatgtctgctatcactttgtgcgttgaaaagagctgttcgctgtagcgctcttcgctctctcgctctctaacaaaaattcgagagagcctggagccacctctagagccacggccaaaaaatcgtgtgccaaaaaatcgtatggcgttacgcatcttgttattctagggtctttggtccaacagtctttgaatttaataatccctatgtacaaagcgtctcttttaaagtggcagttgcagatccttagcacatgcgtcagttcgcttttgagtagtgttgcaaagtaaccaataagttaaaaaactatctgaaccaaaaccataacgaaaacaacaaaaacacgtagctcctgcttaatacccaaccatctatgatttccattcttttgttcgtttacgtagtgtgctgtctcctatgctctgcctcactccgaatctcacttcgtatctctctctcgctctgtccctcgaaaagtacttaccaaccctgcgccctatttgcaagccacccaacactggcacactcacccacacaaatcacactcaatcacatccacatgtttctttgtatcgtagttagtgctgactttccggttgctctttgacacgtactcgacttttccggacttttggttttcgcaactaatcaaagcctctctcttgcagccgaacgaagcacttcccaatcttcagaccctaaaggggtccaagtcgagcttgtttatggggtccactttattcggtttcgatcacttggcttccgcagaaaaggacaaggaggaaaagagcggcaaagacaaggagaagacgcccaccgacgagaccaaccgcaagttgcccatcatcaatcctctagtgcgactgcccaactggccaagtaaggaccgtaataagcttttacaatactattgcgtttaatcattttatttattcacgatattttttctccagatcttgccaatggcggtggctttatatccaaatgtcttttggccaatgctgataccctctgcgccgccgtcagtcccctaatggacccggatgagacactgctggccggttaccatgagaagtgcgtgatgaacaactactttggcatcggcatcgatgccaagatctcgctggacttccacaacaagcgtgaggaacaccccgaaaagtgccgatcacgagcccggaactacatgtggtatggggttctgggatccaagcagcttctgcagaagacctgcaagaatctggagcagcgagtacagctcgagtgcgacggtcagaggattccgctgccggaactgcagggaattgtgatactgaacatacccagcttcatgggcggtaccaatttctggggcagtagcaagaaggatgacatattcctgccgcccagcttcgatgatcgggtgctagaagtggtggctgtcttcggatcggtgcagatggctgcctcgcgtctgattaatctacaacatcatcggatcgcccagtgccaaagcgtacagatcaatatcctgggagacgaggagatacccatccaggtggacggagaagcctggcttcagccacctggaatgattcgcattctgcacaagaaccgagtgcagatgctatgcaggaacagaagcttggagctctcgctgaagagctggcaggagaagcagcgccagcacagcatctccatccagagggatgcatcttctacagcttcagagcatgccaactccacggacgaggtaatctccgaacgtgaatgctacgtgctcctcaacttcatcgaagccgtcagctcgttggtgaagtgggtcaagttcctgattatctcgcatccggccctgcagcacgacctatacgaggtggcctgccgggccagtgaagccctggaatcgattcatccgcagggcaaactactcgaaggtccttcgttgcgcaccaagttggtggaagtcatagactcatcgcggcagctttacgatgatgcatgcaccctgctgcgcgaccgaggtcatagtttgattctccgtgaggatttggaaacaaagctcagcgcggcattggccaacatggaaatggagctgaaaaagtgctccgtgcagaagtgcattgatggaaagctgcgggcctactttaatgttctggcgcccaacgaagaggtgagtggggcaatacttcgaagcttcgacccaggcaaatacaaaacaaaaagtcaattttctcaagtactcaagtactcagaaactattagatatagtgcagtatatttattgaaaatgattccctaatttttcaaaatgattttgctcctccgcagtccgatggccgccgaaagtctcgacctttctgggtgagattgcgttccggttcgaccgccggtcagcaggcgtttaagccacctttgaccaacacccgcgaggcggccaacaactggagcgtcaacgaggtggtcacctggttggaaacgatgcagctgtcggagtacgtggacagcttcctgaagaacgacattcgcggcaaggaactgcttaccctgggcaggcgtgacctcaaggatcttggcgtggttaaggtgggacacgtcaagcgtatactgcaggcaataaaggatctcagcgagaactaggcttccgttgggtctacttaacggctagtacaaacaacaacaactcggatcgcgctcttagggctaaaggagtagaaaattaagttgtacgcgatcacaggaaaagttatgttattatgggacaaaatgcatacaacaatcactaatttataggctagcttagctaacatgccgaatgataggggaatggattcagcgaacatgcaagtaaaatcattcggtgaaacgacgatacttctatcgatactctttacatatttaggcttagctgattttctctcgaacaaattatctcgatataccacttttgattggcatggatatgtaaattttttaaggctatcagccactttaaatcgagacaaaacgaagagcacccaaaattgatttttgtttttcaaatacgtatgtcaaatttaagaaaacactagcagttaaaacgaatttaaacgtagtggcacatacgagaacaaaaacggtaactgcagttagattttaagtgtttaaccttcaacttacgcttatattaccaattttgagaacccgtttgagatctgttcaaaactgcaagtaacggaaacatgaaatcgattctaaatttaaaagcaatttatattttacaaaaatgaaacaataaacgtgcagacacaaaccaatctaaagtttatagaaataatacttatacatatacctacaaagagatattcgaaactgtacttaaatgtttcccccactattgttaaatcgaaatgatgctaacattatgttaatgcaaatacgagtccaactctcgttattgcagcaaagaaaagtctgttaaacgtgtcgtttttgtggtaaccaaaagcaactctaacttgattatttaaatgaatttagttgttaagtccgtgacgattttcaagataagtttaggttagatccttggggtcctagtgccgggtgctgggtcccaacaaatttatttggtactatatacaagcatatggtaaatcttagc

SEQ ID NO: 4691 - DNA, 1806 bp, DROSOPHILA
ttagtgctgactttccggttgctctttgacacgtactcgacttttccggacttttggttttcgcaactaatcaaagcctctctcttgcagccgaacgaagcacttcccaatcttcagaccctaaaggggtccaagtcgagcttgtttatggggtccactttattcggtttcgatcacttggcttccgcagaaaaggacaaggaggaaaagagcggcaaagacaaggagaagacgcccaccgacgagaccaaccgcaagttgcccatcatcaatcctctagtgcgactgcccaactggccaaatcttgccaatggcggtggctttatatccaaatgtcttttggccaatgctgataccctctgcgccgccgtcagtcccctaatggacccggatgagacactgctggccggttaccatgagaagtgcgtgatgaacaactactttggcatcggcatcgatgccaagatctcgctggacttccacaacaagcgtgaggaacaccccgaaaagtgccgatcacgagcccggaactacatgtggtatggggttctgggatccaagcagcttctgcagaagacctgcaagaatctggagcagcgagtacagctcgagtgcgacggtcagaggattccgctgccggaactgcagggaattgtgatactgaacatacccagcttcatgggcggtaccaatttctggggcagtagcaagaaggatgacatattcctgccgcccagcttcgatgatcgggtgctagaagtggtggctgtcttcggatcggtgcagatggctgcctcgcgtctgattaatctacaacatcatcggatcgcccagtgccaaagcgtacagatcaatatcctgggagacgaggagatacccatccaggtggacggagaagcctggcttcagccacctggaatgattcgcattctgcacaagaaccgagtgcagatgctatgcaggaacagaagcttggagctctcgctgaagagctggcaggagaagcagcgccagcacagcatctccatccagagggatgcatcttctacagcttcagagcatgccaactccacggacgaggtaatctccgaacgtgaatgctacgtgctcctcaacttcatcgaagccgtcagctcgttggtgaagtgggtcaagttcctgattatctcgcatccggccctgcagcacgacctatacgaggtggcctgccgggccagtgaagccctggaatcgattcatccgcagggcaaactactcgaaggtccttcgttgcgcaccaagttggtggaagtcatagactcatcgcggcagctttacgatgatgcatgcaccctgctgcgcgaccgaggtcatagtttgattctccgtgaggatttggaaacaaagctcagcgcggcattggccaacatggaaatggagctgaaaaagtgctccgtgcagaagtgcattgatggaaagctgcgggcctactttaatgttctggcgcccaacgaagagtccgatggccgccgaaagtctcgacctttctgggtgagattgcgttccggttcgaccgccggtcagcaggcgtttaagccacctttgaccaacacccgcgaggcggccaacaactggagcgtcaacgaggtggtcacctggttggaaacgatgcagctgtcggagtacgtggacagcttcctgaagaacgacattcgcggcaaggaactgcttaccctgggcaggcgtgacctcaaggatcttggcgtggttaaggtgggacacgtcaagcgtatactgcaggcaataaaggatctcagcgagaactag

SEQ ID NO: 4692 - protein, 552 aa, DROSOPHILA
MGSTLFGFDHLASAEKDKEEKSGKDKEKTPTDETNRKLPIINPLVRLPNWPNLANGGGFISKCLLANADTLCAAVSPLMDPDETLLAGYHEKCVMNNYFGIGIDAKISLDFHNKREEHPEKCRSRARNYMWYGVLGSKQLLQKTCKNLEQRVQLECDGQRIPLPELQGIVILNIPSFMGGTNFWGSSKKDDIFLPPSFDDRVLEVVAVFGSVQMAASRLINLQHHRIAQCQSVQINILGDEEIPIQVDGEAWLQPPGMIRILHKNRVQMLCRNRSLELSLKSWQEKQRQHSISIQRDASSTASEHANSTDEVISERECYVLLNFIEAVSSLVKWVKFLIISHPALQHDLYEVACRASEALESIHPQGKLLEGPSLRTKLVEVIDSSRQLYDDACTLLRDRGHSLILREDLETKLSAALANMEMELKKCSVQKCIDGKLRAYFNVLAPNEESDGRRKSRPFWVRLRSGSTAGQQAFKPPLTNTREAANNWSVNEVVTWLETMQLSEYVDSFLKNDIRGKELLTLGRRDLKDLGVVKVGHVKRILQAIKDLSEN

SEQ ID NO: 4693 - DNA, 8387 bp, DROSOPHILA
cgtacatacatatgtacatatttaagtgagacaactatatagcattggtttcaggacgtatagtttgtcttaaagctcacaactttgagttcccgtggaacatggctaatgtatgtttgtttgaatttaaatcaaaataggaaacgtatgtataattgtaacgttcaaaccgtaacaagaggaggagcaggtcagatgacagaaacggagttgcaatcaattacgcgacgatttaattatgcatccggggaacatacaggacacaggatacatgtacgagacacacggcgcattgaactttgatttgggccaggaccgcagccccattaaaagtcagttggccaaatgggatttgagttcattgataattgaaatcatttatacacaattatttaccgaggtataaagagtagtatcttataacatataaaaagagggttcgcaatgtgtttctccatatcttcggttacatattcaggagaaaacgccaggttcctcaactgttagatatccgttatgcgtcttttcggagagcgagggagaattttaaagatgttggcaagacgtggacaaagtgtagtgggcaccgctacttttctcggttcctctcaacacaattaaagttgtttagaatgcacagagcaaaacaaactgcatgggtcgctctcttgggatctctgaatctcgcacgcctttaaatatagcatagctctgcttccgttctggtttctatgtcggctattactcattgcacttgcattgcaggcctcgaacatcacagttgcaaagtgggcacaattttgtcgttttcggctttacatcatcagcacagaaaccttttggccagtttaattccatggatatctagaagctatatgtaatgtattctctattcctcactcactttcttctgatcgcgttgccagtcctcgcagacatagacagaagtcagtttatggtgggtaagtgcttccaactagttcacagtcccgacctcttgggatccggatcgctacagtttgcctattctgtaggtagcatcttcacatcagacaaagatgagtcggaaatcgcattccgaacagcggtagaccgtgcaaacatattggagcggaacgtagagttggttccaattgtggtgtatgctaacaccgatgatagtttcatcatggaaaaaatgggtaagtcttgaggactgttagacggtactcatcattgccgtttaattaaagctatatgcttgtgattttcaaaaaacggctaactagttttcgctcttttataataatgacaaactgttgattctattaatacatcacacatttttagtttgcaatttgatttcccaaggagtaatcgccatttttggacccagcacaggcagcagttcaggtgagtattaagcaattaaaaatattgaaattaatgtaatgcgccttccctaatgcagacataattgcctcaatatgcgacacactcgatattccgcacatagtatatgactggatacccaatgaatctatcccagatcgggaacactctacaatgactcttaatgttcatcccgataacctcttgttgtcccaggggctggcggagattgtgcagagctttgcctggcgtagctttacagttgtctatgagactgacaagggtaacttctaagcgaggatcggcggaagaaattctaatttttctgaccacttagagcttcaacaacttcaggatattttgcaagtcggtgagcccatcagcaatccaaccacagtaaaacaactggggccgggtgacgaccaccggccttttttaaaggaaatcaaactctctaccgataactgcctcatcctacattgtgcccccgacaatttattaaaaatattgcaacaggcaaatgagctaaaaatgttgggcgagtatcaggttcgtattctacaaatgagcaaaagtgttaatacttaacgacgttttataccttaagagcgttttcataccactcctggacacccattccatcgattttggtgaactttccggggtcgaggccaacataactacggttcgactaatggatccatccgattttcacgtgaaaaatgtagtgcacgactgggaagaacgcgaaaaacgggagggacgctactttaaagtcgacccaaatagagtcaaatcccaaatgattctgctcaatgacgccgtttggctcttttctaagggacttaccgaactcggaattttcgaggagctcaccgctcccgatctagaatgtaggcgaaaaaaaccgtggccatttggtaaacgcattattgagttcataaaggcggtaagatcttttgaaaatttatatttttcttaaagacaaaaaccaaaccaaaattattcaaactatccaggtgaactagcgacctagtcatttctttggtacccgaccatgtttaagatacaaaaccaagatacatagatcaatgccttggaagcattataaaccggtacttgtaagatgaaagtatattctagatactatgaaaagtatgttagaggtttaagggagcgtttccgagcctgtaaagtatatattgtatattctttatcaggatcgatctggccatgtccgtctgtccgtatgaacgtcgagatctcaggtagttcaggtagtaaagctagttaagataaagcatccagattttagagacgtagacgcagagaaagttttttactgatgttcccatgccaacacaaacgctcagaagctgccacgcccacacttatgagaaatgttttaattttttcgttttatttttttttcttgccaaattctatcagtatcagcatgtttgctcaccaattagtttgtgcccacgtccagtttttgagatatgaaatttcgaaaaagttggaaaaaaactaagtttaactatgacgaaaaaacatgggcaaaaaatgggcaaacgattccagctttcaagtttaaaaaattggatttttcagaacccagcttctttgagctaatttttatcgtggcatatcgatgttggaatttttcgttcgcctccactagcttccagctgagtaacgggtatctgatagtcggacaactcgactatagcttactttcttgttttcttagcttgcgaagctttatatcataatttattatcaagagattttcatagcggtccgaggagacttcgacgggacgaattgactttaatgagaatggacaaagaagttttttcaccctgcgttttatggaattaaactctgatggctttttggatttagccacttgggatccagtgaacggattggatgtgcttaatgacgacgaagagagcgagaagagagttggccagaagctgtcgaacaaaacatttattgtatcctcacgcctgggagccccattccttacactccgagagccccaggaaggtgaaatcctgacggggaattcccgttacgagggatactctatagacttaatcaacgaaattgccaaaatgctgaactttaagttcgaattccgaatgtcccccgacggaaagtacggtgctctaaataaggtgacccagacctgggatggcatagtgaggcaactgattgatggggtatgttaaataatagtgtagtaatagggattatataaatatatagatcagtaacacaaaccgagtcgatctggacatgtccgtatgaacggcgagatcaattaaagctggaaaagtgatgtcaagcatgaagattttagtgaagcccacgctgtgcactcttatgcccacaacgtccaaaacggtttactcactttttggttttcttttttttatcatttgatttcgacacatccactgtaatcgctgtcctaagaacaaaatttttacatgttttgattttgttttttgccagtgtctcttgttatctctttttttccttttagaatgctgaccttggaatctgcgatttgacaatgacgtcatcccgacgtcaggcagttgactttacacctccattcatgaccctaggaatcagcatactgttttcgaagcctcccacaccacccactgacttgttttcgtttttatctccattctccttggatgtgtggatctacatgggctccgcatatctctttatttcccttcttttgttcgcattggctcggatggcgcccgacgactgggaaaaccctcatccctgcaaggaacccgaagaagtggagaacatatggtcgattatgaacactacatggctctcgataggctcattgatggggcaaggctgtgacattctgccgaagtaagagggtattatataggtattattttgtgttacagatcaattattttccagagctgcctcaactcggttggtcactggaatgtggtggttcttcgctctaatgatgctgaattcctacacggctaatctggctgcctttctaaccaattctcggcaggcgaactccatcaacagtgccgaggatctggctgcacaaagtaaaattaaatacggtgctatggctggtggttccacaatggggttctttcgggactcgaactttagcacttaccagaagatgtggaccgccatggaaagcgccagtccttcagttttcacaaaaaccaacgacgagggcgtcgagagggtacaaaaaggcaagaatttatacgcctttttaatggagtccaccacattggagtacaatgtggaacgaaagtgcgacctggtgcagatcggtggctggctagactacaagagctatggcatagcaatgcccttcagtaagtgtagacgatgccctaatatggttttaagataaattaatattccatctatataaatttctcactcacttacttgggatcttggcacaaagcagctccactgcttgccaggttacacaagtccaatggcctgatggcactttgccctttttaggcattgatgcgtccctaaagattgcaagttcggtccgtagctgtaccgagctgctgttccaatcctcaaatcttttattcaaaatattgcccaagacttaatagtttctttcagattctccgtatcgcaaacagatcagtgcggcagtgctgaagttgggcgaacttggacagctggcggaactaaagcgaaagtggtggaaggagatgcacggcggcgggaactgcgaaaagagcgacgaagatgggggagacacgccagagcttggattggaaaacgtgggtggagtcttcctggtgcttggtctcggcttgctttcagcaatggttttgggatgcacggaatttctatggaacgtgaaatcggtagcaattgaagaaaaggtagttgatataacaattcttatacccgtttttaattctactatgctgaaaggattcattttgactttgggacaaattcaatagaactcttttatttatgtgtagatctcgcttaaggaggcttttaaatcagaggctttgtttgcggctagaatatggataaccactaaacctgtacatacaagttctgagtctggaagctcaaattcgtctagttcctcgtcaagccgctccaagcattctttcaagtcgcagggattgtcaatgaaaagccttaaaagctcaggatatcaggacgtagaagcttcagtccacagcaaactaaaaaaaatcggttccatgttctcactaaagtcacagaagacagtcactccacctccagagataggctggaaactggacaagtcaacacaaatcgatgtagttccaacatctgatgtagatcaagaattgataccggaggtagaaccacatctaccacatcggcaccatcatcaccatcatcatcgccatcatcatcaccatcatcaacccgatcaggaacatgataggaatccctcgcctcctgagtaataattttgtaaaagaattttaccctcggatcaagaattgtttcagagcgtactttttttttaaattcttagctacttgatgtataaattccaattcctcaattaagaaattcttttgtgtcgccacccaatattgacaaaataaataaaaccaattaaaagcggaagctattcaccatgttatgctttaaaatactctgcctgaaatgcgatcacaaagtacaacataaataaaataaattatttggcccgaatatgcgtggaagcaatagttatatagtatagtatagtatgtagtaaactatatatttttttatggcagtcgcattcggcaccgcacgctaaaatttcaatatcaaagttggacagaattttctgcttttggatgattcagtaaaatctgggtgtctaatctttgcttttcagcttttgtagttcccgaaatattctcgtccatacggacggacagacagccagacatgactagattaacttggctagtgatcctgatcatatctaaacacagttcaaaattaaactattttaataaggcgacccaaagctttccatgtcccaattctatatttgagttcgctaagttctaaaaatatttataccgataagttctttcctatatacctaaaaaaatcaatgtgcttaaaaacattaaaggtgagacttttattattcgtttgattttaaacatttttaggtttttttaatttttaaaatcttttttggctttcattaatttttttgtttattttatttacgtaaatgaataattccattacactgataagtattttcgtaatgtttcggattgcaaatttcatttaaagttgttgttgtcctatttaaattatatttaatttttaaattaaatacataggatgtttacctaaataattatgtaagatattatttgcttattaattaataactataatataatatttttgcacacctctgttaatttattgcaaagctagttgaatatgtttttaaggtacatcatttgcttttttgttccgtttttgagcttctaccgcacaattttattatgtaattttatacacttatacctacgtttctaaaggatacagagtttgatttagtgcctaaggtttagggcaaaaataaactaacacaagaatatctagatttttatgtgaaattcttttaggtacatttctatatacatacatacatccatagatgtacattttaagggatgcttcatataaaataaaatacttttcaaacgagtattttcgcttaatatagaaagtttcggtagatataaataacgattgtttggggcgtcttggctaaggtgaattaactaatgttgcttaaaaattctgctgtctattatctcgaaccatatccttgatgttacggttacgtagtcaatccttagcggtaattgccactggaggaaattgtcgctcatcgtagagctttgttggagtgtcgatggcatcgcaaagcttgcgaaacttggcagaatctacggataaggcctagttagaaaaacttattcaacaaatataaatgtttgctcaccagacattgcatctgcctggtcacctttcaggatgcttgcatagctgttgtcttgcatcggatccggattctcgatgagcacactagccgcacagctctttagcatcgtaagcgaaggctgcgtcacagttgacggattcgaaggcttagtctgcgacctttgcacgctttcgctcagctcaagctctattacatcctccagggctccgcgcaagtcgtggacagacatcagtttacagggaccaccccgttccgcaggaaactcgtgcacgtacaggaatccgtcctcgcacgcaatcagcagacgtggctccttctgaacacgggtcagggcacagatgtgctttaggccgccctgagccagctgcaccgtagcaaaggatcggtcctgagctaatacttcgctgacttgcgtgggcagcagcaaagatgacacagccttggaaaacattccgccccaggaagcgacaggtctacagctctcctctgctgctgtggatgccactgcttccttggcagaattttcggacttggcagctacatcggctacaataaaaaagcatcattgtattatatgaaaataataataataaataatattgcttcactacccacagacgttcagaaagttcaagaaagtactcaagataatacattaaggtaagcaaagccaaagcttggccaacatactcacctatcgctttcagctcaaccgtctccactgcccgcgtatcgatcttgaaaacgtggacggtctccgtgttggaggaggcgcagaggaagtctccactggccgagaagaccagtgaggcaatgcggacacagctgacgcccctccggaattcctgcacccgctggccattttttacacaaaagacccggatgacggtcccgcgctcggaggcggtggccagcagagctccgctgggcgaga

SEQ ID NO: 4694 - DNA, 3919 bp, DROSOPHILA
ggatccggatcgctacagtttgcctattctgtaggtagcatcttcacatcagacaaagatgagtcggaaatcgcattccgaacagcggtagaccgtgcaaacatattggagcggaacgtagagttggttccaattgtggtgtatgctaacaccgatgatagtttcatcatggaaaaaatggtttgcaatttgatttcccaaggagtaatcgccatttttggacccagcacaggcagcagttcagacataattgcctcaatatgcgacacactcgatattccgcacatagtatatgactggatacccaatgaatctatcccagatcgggaacactctacaatgactcttaatgttcatcccgataacctcttgttgtcccaggggctggcggagattgtgcagagctttgcctggcgtagctttacagttgtctatgagactgacaaggagcttcaacaacttcaggatattttgcaagtcggtgagcccatcagcaatccaaccacagtaaaacaactggggccgggtgacgaccaccggccttttttaaaggaaatcaaactctctaccgataactgcctcatcctacattgtgcccccgacaatttattaaaaatattgcaacaggcaaatgagctaaaaatgttgggcgagtatcagagcgttttcataccactcctggacacccattccatcgattttggtgaactttccggggtcgaggccaacataactacggttcgactaatggatccatccgattttcacgtgaaaaatgtagtgcacgactgggaagaacgcgaaaaacgggagggacgctactttaaagtcgacccaaatagagtcaaatcccaaatgattctgctcaatgacgccgtttggctcttttctaagggacttaccgaactcggaattttcgaggagctcaccgctcccgatctagaatgtaggcgaaaaaaaccgtggccatttggtaaacgcattattgagttcataaaggcgcggtccgaggagacttcgacgggacgaattgactttaatgagaatggacaaagaagttttttcaccctgcgttttatggaattaaactctgatggctttttggatttagccacttgggatccagtgaacggattggatgtgcttaatgacgacgaagagagcgagaagagagttggccagaagctgtcgaacaaaacatttattgtatcctcacgcctgggagccccattccttacactccgagagccccaggaaggtgaaatcctgacggggaattcccgttacgagggatactctatagacttaatcaacgaaattgccaaaatgctgaactttaagttcgaattccgaatgtcccccgacggaaagtacggtgctctaaataaggtgacccagacctgggatggcatagtgaggcaactgattgatgggaatgctgaccttggaatctgcgatttgacaatgacgtcatcccgacgtcaggcagttgactttacacctccattcatgaccctaggaatcagcatactgttttcgaagcctcccacaccacccactgacttgttttcgtttttatctccattctccttggatgtgtggatctacatgggctccgcatatctctttatttcccttcttttgttcgcattggctcggatggcgcccgacgactgggaaaaccctcatccctgcaaggaacccgaagaagtggagaacatatggtcgattatgaacactacatggctctcgataggctcattgatggggcaaggctgtgacattctgccgaaagctgcctcaactcggttggtcactggaatgtggtggttcttcgctctaatgatgctgaattcctacacggctaatctggctgcctttctaaccaattctcggcaggcgaactccatcaacagtgccgaggatctggctgcacaaagtaaaattaaatacggtgctatggctggtggttccacaatggggttctttcgggactcgaactttagcacttaccagaagatgtggaccgccatggaaagcgccagtccttcagttttcacaaaaaccaacgacgagggcgtcgagagggtacaaaaaggcaagaatttatacgcctttttaatggagtccaccacattggagtacaatgtggaacgaaagtgcgacctggtgcagatcggtggctggctagactacaagagctatggcatagcaatgcccttcaattctccgtatcgcaaacagatcagtgcggcagtgctgaagttgggcgaacttggacagctggcggaactaaagcgaaagtggtggaaggagatgcacggcggcgggaactgcgaaaagagcgacgaagatgggggagacacgccagagcttggattggaaaacgtgggtggagtcttcctggtgcttggtctcggcttgctttcagcaatggttttgggatgcacggaatttctatggaacgtgaaatcggtagcaattgaagaaaagatctcgcttaaggaggcttttaaatcagaggctttgtttgcggctagaatatggataaccactaaacctgtacatacaagttctgagtctggaagctcaaattcgtctagttcctcgtcaagccgctccaagcattctttcaatacaacataaataaaataaattatttggcccgaatatgcgtggaagcaatagttatatagtatagtatagtatgtagtaaactatatatttttttatggcagtcgcattcggcaccgcacgctaaaatttcaatatcaaagttggacagaattttctgcttttggatgattcagtaaaatctgggtgtctaatctttgcttttcagcttttgtagttcccgaaatattctcgtccatacggacggacagacagccagacatgactagattaacttggctagtgatcctgatcatatctaaacacagttcaaaattaaactattttaataaggcgacccaaagctttccatgtcccaattctatatttgagttcgctaagttctaaaaatatttataccgataagttctttcctatatacctaaaaaaatcaatgtgcttaaaaacattaaaggtgagacttttattattcgtttgattttaaacatttttaggtttttttaatttttaaaatcttttttggctttcattaatttttttgtttattttatttacgtaaatgaataattccattacactgataagtattttcgtaatgtttcggattgcaaatttcatttaaagttgttgttgtcctatttaaattatatttaatttttaaattaaatacataggatgtttacctaaataattatgtaagatattatttgcttattaattaataactataatataatatttttgcacacctctgttaatttattgcaaagctagttgaatatgtttttaaggtacatcatttgcttttttgttccgtttttgagcttctaccgcacaattttattatgtaattttatacacttatacctacgtttctaaaggatacagagtttgatttagtgcctaaggtttagggcaaaaataaactaacacaagaatatctagatttttatgtgaaattcttttaggtacatttctatatacatacatacatccatagatgtacattttaagggatgcttcatataaaataaaatacttttcaaacgagtattttcgcttaatatagaaagtttcggtagatataaataacgattgtttggggcgtcttggctaaggtgaattaactaatgttgcttaaaaattctgctgtctattatctcgaaccatatccttgatgttacggttacgtagtcaatccttagcggtaattgccactggaggaaattgtcgctcatcgtagagctttgttggagtgtcgatggcatcgcaaagcttgcgaaac

SEQ ID NO: 4695 - protein, 825 aa, DROSOPHILA
MEKMVCNLISQGVIAIFGPSTGSSSDIIASICDTLDIPHIVYDWIPNESIPDREHSTMTLNVHPDNLLLSQGLAEIVQSFAWRSFTVVYETDKELQQLQDILQVGEPISNPTTVKQLGPGDDHRPFLKEIKLSTDNCLILHCAPDNLLKILQQANELKMLGEYQSVFIPLLDTHSIDFGELSGVEANITTVRLMDPSDFHVKNVVHDWEEREKREGRYFKVDPNRVKSQMILLNDAVWLFSKGLTELGIFEELTAPDLECRRKKPWPFGKRIIEFIKARSEETSTGRIDFNENGQRSFFTLRFMELNSDGFLDLATWDPVNGLDVLNDDEESEKRVGQKLSNKTFIVSSRLGAPFLTLREPQEGEILTGNSRYEGYSIDLINEIAKMLNFKFEFRMSPDGKYGALNKVTQTWDGIVRQLIDGNADLGICDLTMTSSRRQAVDFTPPFMTLGISILFSKPPTPPTDLFSFLSPFSLDVWIYMGSAYLFISLLLFALARMAPDDWENPHPCKEPEEVENIWSIMNTTWLSIGSLMGQGCDILPKAASTRLVTGMWWFFALMMLNSYTANLAAFLTNSRQANSINSAEDLAAQSKIKYGAMAGGSTMGFFRDSNFSTYQKMWTAMESASPSVFTKTNDEGVERVQKGKNLYAFLMESTTLEYNVERKCDLVQIGGWLDYKSYGIAMPFNSPYRKQISAAVLKLGELGQLAELKRKWWKEMHGGGNCEKSDEDGGDTPELGLENVGGVFLVLGLGLLSAMVLGCTEFLWNVKSVAIEEKISLKEAFKSEALFAARIWITTKPVHTSSESGSSNSSSSSSSRSKHSFNTT

SEQ ID NO: 4696 - DNA, 3354 bp, DROSOPHILA
attcgattttactgaatgcattcatttcattaaccataaattgacaataattttttgaggtggtttagtatgttattgtgaactttataatattgtattatcttaactatatatcgccactatccatatgatatggatatccatatccactatccaaacgagtagatcgatttggcaagacatgagaagcaacttctaggtagataagtagtctctcacaaaccaatttaagaacaagggaaaactttcacataccttttactcagttaatgggaatgcgatgaagacatttaagtgaggaagcgactttttcctagatttgccacgagtgccagagtaatgacgaacagtcgggcgcacagagggatatggccaaatcaactcgcctagtgattacactcaagaatacatgtgcattaatccataatacaaaaatcttatagcaagaaattacgaatttagtagaaatcaaaagacaaaggtttagttgagatccttgactatcatatacccgttactaagatggtggtaatttgagagaactaaaaattcctctgccatatcgatagatagtaacattactagaatctgcatgcttaatctcaaatttttatcttatacagcttcgcatatcactgagattaatcgaatacacagacgggaatgggcagatcaactaggttaggtataggtaatcagctatcccgaggccataagttccaaataaaacaaacgtaagcttgtttattaaaagctcgaatgcattgtttatataccctaaaatactcctttatctttgtcttttaaaaatcgataaaatttatgatagtcccggcgaattttatgaatatttgtatagtactattgataaatacacctttctttgaataccattttttctgttttcttatattcaaacaaaatattttacaccattttttcgggatgacacaatgtataaaattgttcctaattcagtttaaaggatttaaaattggaatgctgcttacttttattagtgggttttaaatttacaaagcttggcctggacaaatgtttatttaaccccgacacttgtcgtttcttaatactaaatgttaaaactaagcgttaagcaaccaggttcattgtttattgcaggactcgattcctcgatactatcccagaaatccgaggaaaggatgcaaaagttgtcctaatatgccttttaccgatggcactgtgccgccaacatccaaggtgatagacccctgcaatccgcgacctaaaggaccaaatttcccaccaaagattggaataatttgactaggtgaactaaatccgaataagtttcctagtgatccaaagaaatttccgattggagtaaaaatgccaaaggggtctaacgaaggtccactaagaaatccagttccgaaaagtccatgttgtccgaaaattcccgtaccgaacagtccaccgtttccaaagattccgccagcaacatttagcacactatttggaactaccgaaccgtctaaatgaccaggaaggataccaccagggaaaggtcttcctggacggttcggccgaggaccacctagtatccatggaaattgccatggtccaagtggtccgcctggtgaaggtggagatccaccagggaaaggtccaccaggggaaggtccaccaggggaaggtccaccaggggatggcccaccaggggaaggtccaccaggggaaggtccaccaggggaaggtccaccaggtgaaggttcaccaggtgaaggttcaccaggggaaggtccaccaggggaaggtccaccagggaaaagtccacctggacgtatcggtggagaattaattggtagccatggtggtcgattaggccaataaggacctaatggataacgaaggggccatccaagtggataattatagccaggaatacctggtggaataaggtacggatcgtaggatcgagtgttcttaataatagtgattaggtcgcttcccttgccaacgccagctgaaattttactatatccggaactggcgatatcacctcttgccaatatatttgctactttagctgcttgtaaggttgataaagatgctgaatttccaccgtctagaccccgaagtcctccgggatttccaccaaagagaacatctaagtaacgtagaggcgccatctttatgtctgccaaaccctggatggcagactcgctctgacgggccaattcactgacaacagcatgtgagctgccgcagaagagaatcagagaaaggacgagtatctgcaataggtcagtaagactaagaattgttcgtgactaagtattttatataggcctttaccaattgtcgcaccatagcaaatgctttttacaactgatgttgtgcctttcaagatctgctttatatagtgatttaaggtgataattataatgtaaattagaaattttatgcaaaagtagacttgtgagttcaaaggcactataaatgtcagtttatactaccgtagggaattgtcaagataaatcgaaattaagagaggtgacactatatctttggacgctaagcaaatttagagaatcggaagcaaaacaccttaaattgtttaaaataaaaccaatgtagatttatgtaaataacaaaaatcaggactaagctatgtctatgctatggtatgatataaaaatctatacgtacttacgtgtgctagtcaaaatcggaatgtagtttgcttaatgataacgttaccctcgcactttcaacatttcttagcaataagcaacaaaacgaaacagaaaacttaaaacaccaaatggttgtaaacgaatgcaaaaaggtggcttctatttgactgagcgctctgtgtttgaagaaaagaatggcatggtaaaaacttcttcaagatgcaaaaaattgaaaagggacatacaaagtttgcagttaaagtgattgattttttatactgatgtttttctgtatccagtaaaaatgttgtgttagtttaaagaaaatatgtcatctaaaaatcaattggatagtagtggtaattcgatgtcaagccatttccttggcaggatggtgatcaaagcgagagaatgcgtgtcgtatgtaaattattacagatagaggcaaggtaagttttatcaagtgaaccaaacatgcaaaagacatgaaaagggcacacgcaatacatatagttcgagtcttcaagtgctaatagactgcatgcacaaaagtctacataatttatgagcgctaatagaccaaaagattaacatcatatacatggaatacatatcctgttggtctacctatctgaatatcaatctcctatagcttctgtttaaagagttgcaaggg

SEQ ID NO: 4697 - DNA, 1293 bp, DROSOPHILA
ctatggtgcgacaattgatactcgtcctttctctgattctcttctgcggcagctcacatgctgttgtcagtgaattggcccgtcagagcgagtctgccatccagggtttggcagacataaagatggcgcctctacgttacttagatgttctctttggtggaaatcccggaggacttcggggtctagacggtggaaattcagcatctttatcaaccttacaagcagctaaagtagcaaatatattggcaagaggtgatatcgccagttccggatatagtaaaatttcagctggcgttggcaagggaagcgacctaatcactattattaagaacactcgatcctacgatccgtaccttattccaccaggtattcctggctataattatccacttggatggccccttcgttatccattaggtccttattggcctaatcgaccaccatggctaccaattaattctccaccgatacgtccaggtggacttttccctggtggaccttcccctggtggaccttcccctggtgaaccttcacctggtgaaccttcacctggtggaccttcccctggtggaccttcccctggtggaccttcccctggtgggccatcccctggtggaccttcccctggtggaccttcccctggtggacctttccctggtggatctccaccttcaccaggcggaccacttggaccatggcaatttccatggatactaggtggtcctcggccgaaccgtccaggaagacctttccctggtggtatccttcctggtcatttagacggttcggtagttccaaatagtgtgctaaatgttgctggcggaatctttggaaacggtggactgttcggtacgggaattttcggacaacatggacttttcggaactggatttcttagtggaccttcgttagacccctttggcatttttactccaatcggaaatttctttggatcactaggaaacttattcggatttagttcacctagtcaaattattccaatctttggtgggaaatttggtcctttaggtcgcggattgcaggggtctatcaccttggatgttggcggcacagtgccatcggtaaaaggcatattaggacaacttttgcatcctttcctcggatttctgggatagtatcgaggaatcgagtcctgcaataaacaatgaacctggttgcttaacgcttagttttaacatttagtattaagaaacgacaagtgtcggggttaaataaacatttgtccaggccaagctttgtaaatttaaaacccactaataaaagtaagcagca

SEQ ID NO: 4698 - protein, 337 aa, DROSOPHILA
MAPLRYLDVLFGGNPGGLRGLDGGNSASLSTLQAAKVANILARGDIASSGYSKISAGVGKGSDLITIIKNTRSYDPYLIPPGIPGYNYPLGWPLRYPLGPYWPNRPPWLPINSPPIRPGGLFPGGPSPGGPSPGEPSPGEPSPGGPSPGGPSPGGPSPGGPSPGGPSPGGPSPGGPFPGGSPPSPGGPLGPWQFPWILGGPRPNRPGRPFPGGILPGHLDGSVVPNSVLNVAGGIFGNGGLFGTGIFGQHGLFGTGFLSGPSLDPFGIFTPIGNFFGSLGNLFGFSSPSQIIPIFGGKFGPLGRGLQGSITLDVGGTVPSVKGILGQLLHPFLGFLG

SEQ ID NO: 4699 - DNA, 3237 bp, DROSOPHILA
aggggcctagcagggagtaagcgtctagcaagtatactgtggtgtcgtcttagtctatcactatatctgctggtgtgcctggagatctgctcttccactgtatgaagattcagatcacggtgaagggtagtgcaacgtacatagtatgggcagtctgtaattgcacgcatggcacgattttgcaatacctgaatgcggtaacccttttactctacgagtaaaataacgggtataataatccgtttgaaatatattataagacagctatatagaaacttttgtattgtagcaaatagaaacgtgcaatggcaaatgttgatatcaatagataaaaacgagtcaccaataatcaaagaaaatgattttggccatttgttttttatcgaaaattgacggattgatgaagcataatagcgtaatcaacaactgtgagtgtgtataagtttaatacgagtattcataaaatatcaacattttttttctttcccactttcggaataatttttttctgcgtctgatcaattcggagggcaatgaagaatttaaaaaattagcaagagagaatggtaagttcgagttccccgactatcagatatctgttactcagctagtggtaatgcgaacgcgaaatttgtttatttttctaggatatcgatctatagatattggggaataaaatgagaaataatgtaacaattgttcaaaactatggatgggcggggtataccgacagaaattggcaagacaaacaataaaacgaatcaaaattccgtaaaggcatttcttttctccggctgctttttcgacttaaagcaaatgtcacccaggatttgtaggctttacatgtttatttgtgcagatagcatgttctaactgtcagcttgctgccgtattaaaatactcttcttggagttatatattatataattaattattggtaatgtgttttgtatttcatagtcgacgatttttgttcagccatcggaaggcttcaacaatcatggatgccacacagctaacggaactaatgggcagccatgattttatgcaattacaacatcaattgcatcacaataacaacaattacaacacagacggacacaatggactgtcttcagaatcagcggagggaagttctcgacccgtccgtcgtgccaccagacgaacttcacaggtagatcgtaagaaggccaaacaaatgggcctattataatgccttccatttttgctacttccagctaagcaataatacttatgacctggagatgacagattccagttcgcaaagcgatgacacaagcggcggaggcggcagcagcaacgggggtggtagcaccacaaacactggacatccgtccggctgctctctgggcggtcaggggccatcaggccgcggacgggtccagcaagctagctcaggagcctgtccatctaccattgccccgaacagtaccagctccaactcctccaatgcaaacggcaacgccagtaggcggcggaaaggcgccctgaacgctaaggagcggaatatgcgtcgcttggagtcaaatgaacgagagcgaatgcggatgcacagcctaaacgatgcatttcaatcgcttcgagaggtcataccgcacgtggagatggagcgacggctgtccaagattgaaacactcacactggccaaaaactatatcataaatctgacgcacataatactctccaagcgcaacgaggaggcggcggccttggagctgaactcgggggccgttggtggggtgctgctctcaaatctttcctccgaaagtggaggaccggtagcgagtggtattcctgcaaattccaatgccgcgacgatatgctttgaggataccctggccagcggaggtgcctttgactgcgccattttggcagccaccgacggcagcctactgaacgctgccacagtgacaaccagccccgcgatgcagagcatccaatcacaagccatacacttgcagacaccgatggagcagcagcaacagcaagccagccatcttccgcaccatcagcaggcgatgcatggccatggccatctaggggccagcattcaatcgcagcagcagcctagccttgtactaaatggcactacatcggtgggcctgggaattggaataggggttggtgtcggagtgggagttggggtgtgcaacaatgcgccaagctttgctgatatcaatgataatttcgacgagccctttcgagagtttctgtaagccatccataacgcggtggttccgcgaacgtaaaaaccgcaattggaaaatggttgcacacatgtatagcgctcaaaaacgatatttatgaaccccagtgcggtcgattcaccggcttgagtgttcgaaaccttgttagttattatgctttcataaaatggtcatttatggaagatttctgcaataaacttaaccagaaaatatttaatttaattagttttataattttggtcatataattgtaaacttgtaaaagagcatgttcgatcctatgaaatctatattgatatagatttactgggcgaatataggaagaacacatgactttggtttcgggagaaactcaaaacatgacagaagtaaagaatgagcttcacttttcaaaatgattcttctaaatttgttgcaagtacgccatacttgagtgccgcgacataaataaacgtagttctagagaaaaggacatttgcaagcagtaaattgactgatgtaggaagcaccaaggaaatcgactgctttagcaagcaggactgccttagattgcacacgtgggtccttttcttgttcattacatgccatgaaatatgaataacttattggtctaattatacaaattggtattagcaagctaaataaaatactttaaaacataaacagatagattaacgaagtggattacaaatattttgatgagcttagtatatgttttaatgatcttctgaaagtttaggcacatttttgataattaaaatgaaaaaaaccggctactaaaaatatatctgttaaatatcaagaaatacgtatactttagataagacctacaactatttataagttacggaagcctataattagcgaaacttagtcgtaagcttaatttcacgtgcacttttttccgaaagagaaccatgaagaaggctaacattcgattgtacttaaagttatggttcaagttttgtatatatgtatgtataaacttatatccagatcgatcttagat

SEQ ID NO: 4700 - DNA, 1173 bp, DROSOPHILA
atggatgccacacagctaacggaactaatgggcagccatgattttatgcaattacaacatcaattgcatcacaataacaacaattacaacacagacggacacaatggactgtcttcagaatcagcggagggaagttctcgacccgtccgtcgtgccaccagacgaacttcacagctaagcaataatacttatgacctggagatgacagattccagttcgcaaagcgatgacacaagcggcggaggcggcagcagcaacgggggtggtagcaccacaaacactggacatccgtccggctgctctctgggcggtcaggggccatcaggccgcggacgggtccagcaagctagctcaggagcctgtccatctaccattgccccgaacagtaccagctccaactcctccaatgcaaacggcaacgccagtaggcggcggaaaggcgccctgaacgctaaggagcggaatatgcgtcgcttggagtcaaatgaacgagagcgaatgcggatgcacagcctaaacgatgcatttcaatcgcttcgagaggtcataccgcacgtggagatggagcgacggctgtccaagattgaaacactcacactggccaaaaactatatcataaatctgacgcacataatactctccaagcgcaacgaggaggcggcggccttggagctgaactcgggggccgttggtggggtgctgctctcaaatctttcctccgaaagtggaggaccggtagcgagtggtattcctgcaaattccaatgccgcgacgatatgctttgaggataccctggccagcggaggtgcctttgactgcgccattttggcagccaccgacggcagcctactgaacgctgccacagtgacaaccagccccgcgatgcagagcatccaatcacaagccatacacttgcagacaccgatggagcagcagcaacagcaagccagccatcttccgcaccatcagcaggcgatgcatggccatggccatctaggggccagcattcaatcgcagcagcagcctagccttgtactaaatggcactacatcggtgggcctgggaattggaataggggttggtgtcggagtgggagttggggtgtgcaacaatgcgccaagctttgctgatatcaatgataatttcgacgagccctttcgagagtttctgtaa

SEQ ID NO: 4701 - protein, 390 aa, DROSOPHILA
MDATQLTELMGSHDFMQLQHQLHHNNNNYNTDGHNGLSSESAEGSSRPVRRATRRTSQLSNNTYDLEMTDSSSQSDDTSGGGGSSNGGGSTTNTGHPSGCSLGGQGPSGRGRVQQASSGACPSTIAPNSTSSNSSNANGNASRRRKGALNAKERNMRRLESNERERMRMHSLNDAFQSLREVIPHVEMERRLSKIETLTLAKNYIINLTHIILSKRNEEAAALELNSGAVGGVLLSNLSSESGGPVASGIPANSNAATICFEDTLASGGAFDCAILAATDGSLLNAATVTTSPAMQSIQSQAIHLQTPMEQQQQQASHLPHHQQAMHGHGHLGASIQSQQQPSLVLNGTTSVGLGIGIGVGVGVGVGVCNNAPSFADINDNFDEPFREFL

SEQ ID NO: 4702 - DNA, 2746 bp, DROSOPHILA
ttatttttaatactaccaatatatcgatttgtacgtatatatttattatagactgatagttgttactccattttttaaatgtcaaataatgttacgtttaaaactaggacacagaacaacactgccacctaaaagggcagtcgatgtatgtcagaaccggcggtccgcggtgcttttgctttctgatttcgtggttgtcatagtcagagcattggttagaattttgagtaactcgtaatttggaaccaaaagtgtgtgggccaaacattttattgattagttgtcgccgttgtcctgggcaatcgattttaaattttgctaaactcctttttgccaacagttcaaataaagcagccagcgagtaacgaagcaatacttttactcattgaagtataatggcatccggcggcttaacatgtgtaaaatacttgacattcttttgcaatcttctttttgcggtaagtcaatatcactgactatttaatatagttgattgcaatttcagcttaagtggagctttaatttatatttaaaaatcctaatttgtttttttttatagttaagacacggggacctctgtgtacttatcttattttatatcccttgtatgataaagagtgacgattttgaaatttttctcatctaaatcggcagtttttatcctttttaataatgtaatattttggtgctacatagtgttaccttcgattacaaaaacttcaaagctttaatttagatcacattacttgccatttattcttttcattaagaggacctcttaaaaaaggtttctaaaataaaaaaattgaattttagaaagaatacttttacgataattttattttatattgtaatgttttatctcatataaaaaaaatatttagtttaaatattttaacatttataaatatgttaataaacaatttatgtgtgttatctaacattatatttctcttatctaacaaagctcactgggcttcttatttttctggtgggaggcatggtccaactaaactatgcacattattcgaacttcgttagcgatcacgtctggaccgctcctatcatacttatgattgtcggtgccgctgtggcagtcatttgcttcttgggatgttgtggagccttaaaagagagcagctgtatgatacttagctttgcccttcttgccgtcgtgatatttttgttcgagatcggactgggccttgctggctatgtgaagcataccggtcttcatcagatcatggagagtcagtttaactcgaccatgcagcactacaaggaacgggccgactatcgcgatgcttggactttgctgcaaaccgagctagattgttgcggcatcaatgggcccaacgactgggaaaccgtttaccgtaatagtaccctacctgcagcctgctgctctgtaattaatttaagcgaggccaaggaatgtacaaatactcacgcaactcagcatggctgcttgcagaagctcttagagattttggattcaaagaccttaattttggcctccgttgttttgggagtggcgggtatacaggtgcgaagataactaatatgtacttaaaaattatattaacaaaaaatgtttccatagatgctcactatactgttcgcttgctgcctctatcgttcgtttcgcaggagctacgatcatgtttaaaatgcgaagtagccgattttgaaaggaaacaacagtttttggcataccatgcttcacaagaactattacaaaaatgaaatcacaaaatattctattttacatgcccattgaaggctgattatcttatttataactagatatattatattaatttaatttattatattaattcttcaaattattgtagttcttcaaaaaatatgggcgcatccgatcctactacagtttctttgttctttgtaatctgaatacctcagaatcatctgatggttaatgggtttaatgaagaaacctttgttgtactttttaattaataattttttaatgtttgcttgaatttgtatgccatatacaaatttaagtacgttttattaaggctgtcactttggttcgatttccattcattcgtacttcaatatttcatattataataaagtgaccttgtagcgtttatctatgtactacctttattcacataaagaatgttcgaaggtatgtagagtgacgatgtgcatctctttacagtaaaaaaaaaacaattgtttgataatcatactaccgattgaccaacaaaatatgtgttcagtcagttccaggtgtaaaagaaaaaatacaaacttctctttttacgtttgttctttaagttttaaaacatttctttagaattcgagactgaatgacatatttagtgttattcgaaatgtattcaaaaatgtgacgagaggatacagaaaattaaatttgatttacggaaccaaaacattatcaaataaaactaatgatctgtaaaaatatttgtattttttcggtgtttttcggaaatgttgttattattaagctcggttgtggaatttcctgttagaatatccccaaaagaatgtcaattgcatttcaattaatttttgccacatatttgttgtacgatattgggacaatccagatagtttggttctgccagtaaaaataattattcaagtgaggaatgaaatgaattaacgattgcaaggaaactgctaaaagtctgagaactgtatatcatgatgaaaaattgatattctgtgaacatttacatatgta

SEQ ID NO: 4703 - DNA, 642 bp, DROSOPHILA
atggtccaactaaactatgcacattattcgaacttcgttagcgatcacgtctggaccgctcctatcatacttatgattgtcggtgccgctgtggcagtcatttgcttcttgggatgttgtggagccttaaaagagagcagctgtatgatacttagctttgcccttcttgccgtcgtgatatttttgttcgagatcggactgggccttgctggctatgtgaagcataccggtcttcatcagatcatggagagtcagtttaactcgaccatgcagcactacaaggaacgggccgactatcgcgatgcttggactttgctgcaaaccgagctagattgttgcggcatcaatgggcccaacgactgggaaaccgtttaccgtaatagtaccctacctgcagcctgctgctctgtaattaatttaagcgaggccaaggaatgtacaaatactcacgcaactcagcatggctgcttgcagaagctcttagagattttggattcaaagaccttaattttggcctccgttgttttgggagtggcgggtatacaggagctacgatcatgtttaaaatgcgaagtagccgattttgaaaggaaacaacagtttttggcataccatgcttcacaagaactattacaaaaatga

SEQ ID NO: 4704 - protein, 213 aa, DROSOPHILA
MVQLNYAHYSNFVSDHVWTAPIILMIVGAAVAVICFLGCCGALKESSCMILSFALLAVVIFLFEIGLGLAGYVKHTGLHQIMESQFNSTMQHYKERADYRDAWTLLQTELDCCGINGPNDWETVYRNSTLPAACCSVINLSEAKECTNTHATQHGCLQKLLEILDSKTLILASVVLGVAGIQELRSCLKCEVADFERKQQFLAYHASQELLQK

SEQ ID NO: 4705 - DNA, 3517 bp, DROSOPHILA
cgccgtcacctcgaggtggctccgccaggcaggcagcacgtgatatagcacggatttgctgtagatccacatggcgtcctgggcccgctccgtgttcatgggcatgatggaccactcccactcaagggcacccatattggtgttccagccgcgcaccaaagcaggagcgtgtccctgaacggtgagcatgtcgaagcccatgttgctgcccatcggagcggcggccgtgtcgctgctgtcatcggcgaatccgctcacctggagcagcttgacgtcgccgcgcggcttctgctcgagcacctgccgccacaccaattcgccggtctttacgcacagactggccaccactccctcataggtggtgaccagaatccgcggctgaaaatggttgaggtcgacgcgagactgcttcagtgctcccacattgacgcctcgcctgcaaaagccgcacatatccgccgtattagcgccgggtcaatggtcagatatcgtaccacactcaccagtcgaactttttgatctggtcttcgtagagcgccgagcaggtgcccaataggagcgccagcgaaagtgcgggcagtaaccacttctcctgcatgtcgtccgccttgcttgctgaccttcgactagctcgatctctgattgttcaacttttgacgtatttttatgttataaattagtagaaatccacatcaattcgtgttttccgtcatggcaaaagggatgagaagacgaaattggagcagggttggctgacgattgccttatcgatagttcagcggactcacatccgatattcaaagcagtgcggctcatcccctttcaacgtacggcaaacccattcggtcttcacctttatgattaaatttgttggtaaaaagattaaaaaataaaatgccttgccattttgcggtatacagggcttatatttctgcagatgcggctgcagtgtgaaccattttaaatattcgtcgtgctcgcagcgataactgtgacgtgaatgccatcactagcggtgccccatctaactcccatctctaatgagcatttagtgtcttcaaaagaagttgtatttttctggaaaaatcgcattgaaatgtttgaaaagaagagcgacaaggttaagcaagcggagcacaaggcccgggatgatggcgtagagctggagagccagtttatcatgcgcgtgccgaaggtaagccatacatagcacaaacaaacatcacaacaagccgtgcaaattgacggattctccgcaggaactggcggacacggtccatgaggcaataaatgctggcaccattaaggaccggctgaccatccaactggatccggatctgaggtacggtgaagtgcgaatagatgatcagatactgtacacgaaactcgtggatttgcccaccgtcgtcgagagctacaagaccattgacaacaagagcttctacaagtcggcagacatctgccaaatactcatttgcaaggaggagcgggaggacgagacggaaaaggagtcgcccaacaagaacaaaaagaaggaccccaacaaggtggacaaaaaatacctctttccgcacggcatcacaccgccgtgcaagaatgtgagaaaacgacgattccgcaaaactctgaagaaaaagaatgtcgaagctcccgagattgagaaggaagtgaaacatctgctgcgcattgacaacgaggctgtcagagttgactatgaaatcataaacgaagaggacaagccaatggatgaactggagcaatcggacatcaaaccctacaacgatgcggatgacgatttgcaggacgaaagcaccatgcatgccagcgaaaagacgatcatggaaatgagctcccagcggcacctccaagtggagtccgatgatgacgaagccagcaactttccctcacaccgggcgccgaacatgggagttgctgtccacgacatcttcggcgaggaagtgtccagcacggatgacgaggatgagcccgatcggggcaataacaccatgcagcggcgggtgatggaggaatcctcacgactctcggctgatgattcacgaatgtcggacttctttggcgctagtggcagtaatactggagcgggcgtagtgaaaatggagcagaacgtgttcagcaagtctatgtttgggcatgaagccagcagtcctaagctcagcgccgccggatcaagctccaaccttgctgctcccagtggcttctacgatagccaaatgctagccaagcgcgaggagttcgagaacatggaattcatagacgaaccgcagccgcagtacacgcagcaacaggtccagcagaagatcaatcaactgacgcgccagattcgtgaactgaaagcgcagcaggtgcaaaagtcaacggaaattgcttccattcagaatgccacactcaaacaacgaatgcaggaaacgcttgataatctctacacacaggttattgaaagggaattggagctgaaggacttcgagaatatgctggagtcttaagatacagatataatacaaatggtggactagcataagttataataaaaactatgtacatacatattcggatgttacttcaaactatttacgacttcaacgccagtttctgttgttaaagtaaaccttagacaagaaattttgccatatcattggtcaactcattatttgtgtaaaattaaagtgtttcctcagtattgataagaatgattatttgcaaagcaacagagcacgacaattgaatctgtttttaagtatttattgcagtggacttatcaccaattaatcatctaaaattcaaaagaatcatatccgaatgcctccagtgcttgtggaacccatgacctccttaggaaatggtgcattgccgcacagagcaactggccttcggaccttggagcatactgctcgatatcatgcacgtaatttcatatcttcgatagctagagagagaaaatagagtctgtttaatcaatagtctaagtgtctttattattggcatttgcaaacaacaaattttagtgatattcaagatgggcaacaaagagttatgtattttgtactatgagtaaagttccagaggcaaaaccagacataaatcggtgtcttttagcttggggaagcacgtgggctgcttacttaagatctaataaggtagagtgtaaataggaatgggtgggctgtaatgctagataaactaaatgcaaaatttgtgacagtaattccgagccctctatggctatttatactgcaatttttgttatttcgtagtgggcaattgcgtgcaaaactggtttccaaaagcctttttcgtcttttggcacttatgagcttcaatcggtatcaccagctcaactcatcgggcagcccaccgggatattcaccagtgagacaggcggtgcagtggcccgttcccttggatttactatcgcctgcatcgcggtgctttagttggacagcctccactagtccctccacactaagataagccagactgtcggcgcccacatgcctag

SEQ ID NO: 4706 - DNA, 1453 bp, DROSOPHILA
atgccatcactagcggtgccccatctaactcccatctctaatgagcatttagtgtcttcaaaagaagttgtatttttctggaaaaatcgcattgaaatgtttgaaaagaagagcgacaaggttaagcaagcggagcacaaggcccgggatgatggcgtagagctggagagccagtttatcatgcgcgtgccgaaggaactggcggacacggtccatgaggcaataaatgctggcaccattaaggaccggctgaccatccaactggatccggatctgaggtacggtgaagtgcgaatagatgatcagatactgtacacgaaactcgtggatttgcccaccgtcgtcgagagctacaagaccattgacaacaagagcttctacaagtcggcagacatctgccaaatactcatttgcaaggaggagcgggaggacgagacggaaaaggagtcgcccaacaagaacaaaaagaaggaccccaacaaggtggacaaaaaatacctctttccgcacggcatcacaccgccgtgcaagaatgtgagaaaacgacgattccgcaaaactctgaagaaaaagaatgtcgaagctcccgagattgagaaggaagtgaaacatctgctgcgcattgacaacgaggctgtcagagttgactatgaaatcataaacgaagaggacaagccaatggatgaactggagcaatcggacatcaaaccctacaacgatgcggatgacgatttgcaggacgaaagcaccatgcatgccagcgaaaagacgatcatggaaatgagctcccagcggcacctccaagtggagtccgatgatgacgaagccagcaactttccctcacaccgggcgccgaacatgggagttgctgtccacgacatcttcggcgaggaagtgtccagcacggatgacgaggatgagcccgatcggggcaataacaccatgcagcggcgggtgatggaggaatcctcacgactctcggctgatgattcacgaatgtcggacttctttggcgctagtggcagtaatactggagcgggcgtagtgaaaatggagcagaacgtgttcagcaagtctatgtttgggcatgaagccagcagtcctaagctcagcgccgccggatcaagctccaaccttgctgctcccagtggcttctacgatagccaaatgctagccaagcgcgaggagttcgagaacatggaattcatagacgaaccgcagccgcagtacacgcagcaacaggtccagcagaagatcaatcaactgacgcgccagattcgtgaactgaaagcgcagcaggtgcaaaagtcaacggaaattgcttccattcagaatgccacactcaaacaacgaatgcaggaaacgcttgataatctctacacacaggttattgaaagggaattggagctgaaggacttcgagaatatgctggagtcttaagatacagatataa

SEQ ID NO: 4707 - protein, 479 aa, DROSOPHILA
MPSLAVPHLTPISNEHLVSSKEVVFFWKNRIEMFEKKSDKVKQAEHKARDDGVELESQFIMRVPKELADTVHEAINAGTIKDRLTIQLDPDLRYGEVRIDDQILYTKLVDLPTVVESYKTIDNKSFYKSADICQILICKEEREDETEKESPNKNKKKDPNKVDKKYLFPHGITPPCKNVRKRRFRKTLKKKNVEAPEIEKEVKHLLRIDNEAVRVDYEIINEEDKPMDELEQSDIKPYNDADDDLQDESTMHASEKTIMEMSSQRHLQVESDDDEASNFPSHRAPNMGVAVHDIFGEEVSSTDDEDEPDRGNNTMQRRVMEESSRLSADDSRMSDFFGASGSNTGAGVVKMEQNVFSKSMFGHEASSPKLSAAGSSSNLAAPSGFYDSQMLAKREEFENMEFIDEPQPQYTQQQVQQKINQLTRQIRELKAQQVQKSTEIASIQNATLKQRMQETLDNLYTQVIERELELKDFENMLES

SEQ ID NO: 4708 - DNA, 3898 bp, DROSOPHILA
ggtcgtcatccagctcgatttcctctaggtcttggtgttcctctttcgtgccttgataacaaacgtactggtcgtcatcgtagtgcgtctccaattgatccgcatcgatcagttgctcgtccagcggctcggaactaagctcaacgtgaacagtgctttgatcactggtcttctttatgatatccagcaggtacttttgcgagaagatgcaccgctcgcggaacttggtggccaggtccagctcggagaagcagcgctcgcaaacaatctccggcagcccctggtttcttgtcagctgaacaaattccaggtaataacaattgttggcgcggtcggaagctgacataacgacctacctccactcccgtgattagcttcagttgacccaaatattttccccgcatgtgaatgaatatgttgcgatctcgctggtggcccataattttgttggcgcaaatacggcaaacgtcggcgaggttcattgtttatcaagttaatgtgtttacttttagcataaaacgcagcgacggaaagtgttaccagatcataaaacagttggaaaaacgacagtgcttaatcgatttgttatcggtgaatccgatagtcagatacatttttatagcgcaaaaagattttttattcatttgattttattaatagttaaaacgatacaacatgcgcttgtttaatttaggttagaagcttgtaaatccaaaaagaaccattaaaattaaaaaatcaaattcgatgcccaacaatgccattgttaaccaacatagcccctgcagccagtgatatacaatttaagttagtttcgttttgtaaactactccatctattataataaataattagttaaattgtgagattcgttttatttgccgactaacgatatttttgggaattgaacatgggcgaaaatagcgaataacgagctaatcaatcgaaagatttcacacccctagttgcgcgccataattttttgtgatatttgcaaacgttttgaagatatttgcagttcacaaagtacttaaataatccgtgaaggtcctgtgcgcgaaccaagacattgaacatgtccaccgaagcgagtgtggcttccaaatggacgcgcccagatgacgtgggtaaggactcggaggagcacctgcccgccactaatgttgttgtttcgttttccagttcatcaaactgcagcggctcaagcagaagaagaacaaattggcagcccgcgtgagcaacaacaacaataggcggccaagacaccaagtggatgagacggataaaagcaagctactggaggctaagctcgcccagaagcgaaaaaatccgtttgcgaagtgagtttccctctctctcgctctccccaaaatccaattactgactccctgcctcagatccacagctgatgccaagaaactgcgcgttgatccgcaactggcggacctcgaaccagtggtcactgcctcctcctgctttgtgcgggaaacgcccacgcgcccggcgcccgccaaattcgtgctccagaagtacgacccgcaggcctttgccaagctcttccagcatccccaaatcaacgctgaggacgaggacgatgcggagttggccgcccggcagaagcacaccgcccacctacctgtggactggtccctgaagacgcgagcccgtttcttctgtcccacggaactgcctgccatccaactgaagacctcgcagctggccagcggactcaccagcttcgtgcgctgcatggacccgcagcgaacggagagcacgctggatatctcggacgcaacgcggttcaaccaatgcaattactactggcagcacccgcacctgccctggctgacgctctacccgcgcaccgccaaggagaacgtgggcgtggtggtgggtgagcgggagcgcaaggccctggccgaggagtgggacttcagcttccggggcctatttcagctgctgcgtgcccgccagtgcccgtacttctacctgtgtgccaacacttttacggtgctgttccgagctgccggagttggcggtcggccggagagccacgccttggtcacgccgtcgactcggggaatgcggcaagctctgcgacaggaggggatcgagttcagcatgcctcttaagagcgataacagtggaaacgcgcacgacaacagttttaacgaggagagcactaccacctcgctaggtccagaagcgggcgaagatgctcctccgccggcacaggaagatgaagacgacgacgaggactggctggagagcttgggcgtggatgagcgtgagctgcgacgtatccagtcctcccatgccaggaagcaacaagctgccgaaatgcgagaggactttagcgacaactccttgctgctggtcgatggcgtggagtgccagggattctttagctatctgctaaatgccaagagtgccatcagcacagtgggccgtctggccggagtgcctcccactctgctgtcgccagtggccttccccaaggccaccatgcagcacttggttccgcggtccaagaaagtgcgtctggatggcgtcgactactttagcatagacattaagggcctaatcctacctacattcctgcccagtgtggcggagctgctgtccgagacgcgccagatgtttagctccacgctggccagcagcatcaatacgctggcctttagcaaggccacccaaaagctgcttgaaactccggagacgccacagtcagatgcggaaggagaagatgccgccgggcaggtctttggcgagcagaatctttcggagtgtggtctgctgccggcagtagttggctccatctgccgcacgggccaacatgccgtaggtcttttagagcgcgtttgctatcaaagagatgagggatatgcttggagctagacaccaagtgctcctcacactagagcagctttgttttcctaatctgtacgtctgttatgtgaaataaaatattgtagtagaatagcaagcccgtggtgtcattgtttttcgtactaatcgcatggtagcaagtatctgtggctacttcagattatagcggtattaagagataatattaaagcaaagggattgcttacaagataactatcgtgtagcaattagcgcttgcagttcgtcattacattaagtccccgggaattcagcagccaaattgattgtgcttaatcttaggcggtatgatttattatggataaaggggttgagtactagctagttgtccaccatgatgagctcgtcgatgctccagtcctcgtaggagtgatccggcaggtatcggcggatgatgatgggaattttcttttgtttcagctctttcatggcgatctgcagggggtccgtttccccgtccagctccaccatgatgggtgcgcacatggcgatctgaagcgctcgtgtgcccagaactctggcgcgctcgtatttcgtcatgtactttgtggtaatgcgcttggacttgggcacaccgcctccgcccgcaccaccgggagctatgatctcgatgttgtccgcctcctcctcctggttaatgtcctcgtccacgtcctcgtcgacgtcgtcgaagtcatcgccgccaacgctgcaattgttaagtaggtgattaatgggcacagctattgattgtgttacgcctgcacttactcgtcgttgtcgtagtccgcatcatccatcactgcttttctattgttttaatcgaaattaaatagtaaagtgcggcgtgttttgcacgcgtcgcagtcttcttcttctttcacactgctgcatgcggttttcagcactggagcacagtgcgcagaacttccagtgcttctcaaactttcagggctgcatttctggcaaatggaaaagtgattacttatcgaatagccgtctgtgtcgcgag

SEQ ID NO: 4709 - DNA, 1782 bp, DROSOPHILA
ttttgaagatatttgcagttcacaaagtacttaaataatccgtgaaggtcctgtgcgcgaaccaagacattgaacatgtccaccgaagcgagtgtggcttccaaatggacgcgcccagatgacttcatcaaactgcagcggctcaagcagaagaagaacaaattggcagcccgcgtgagcaacaacaacaataggcggccaagacaccaagtggatgagacggataaaagcaagctactggaggctaagctcgcccagaagcgaaaaaatccgtttgcgaaatccacagctgatgccaagaaactgcgcgttgatccgcaactggcggacctcgaaccagtggtcactgcctcctcctgctttgtgcgggaaacgcccacgcgcccggcgcccgccaaattcgtgctccagaagtacgacccgcaggcctttgccaagctcttccagcatccccaaatcaacgctgaggacgaggacgatgcggagttggccgcccggcagaagcacaccgcccacctacctgtggactggtccctgaagacgcgagcccgtttcttctgtcccacggaactgcctgccatccaactgaagacctcgcagctggccagcggactcaccagcttcgtgcgctgcatggacccgcagcgaacggagagcacgctggatatctcggacgcaacgcggttcaaccaatgcaattactactggcagcacccgcacctgccctggctgacgctctacccgcgcaccgccaaggagaacgtgggcgtggtggtgggtgagcgggagcgcaaggccctggccgaggagtgggacttcagcttccggggcctatttcagctgctgcgtgcccgccagtgcccgtacttctacctgtgtgccaacacttttacggtgctgttccgagctgccggagttggcggtcggccggagagccacgccttggtcacgccgtcgactcggggaatgcggcaagctctgcgacaggaggggatcgagttcagcatgcctcttaagagcgataacagtggaaacgcgcacgacaacagttttaacgaggagagcactaccacctcgctaggtccagaagcgggcgaagatgctcctccgccggcacaggaagatgaagacgacgacgaggactggctggagagcttgggcgtggatgagcgtgagctgcgacgtatccagtcctcccatgccaggaagcaacaagctgccgaaatgcgagaggactttagcgacaactccttgctgctggtcgatggcgtggagtgccagggattctttagctatctgctaaatgccaagagtgccatcagcacagtgggccgtctggccggagtgcctcccactctgctgtcgccagtggccttccccaaggccaccatgcagcacttggttccgcggtccaagaaagtgcgtctggatggcgtcgactactttagcatagacattaagggcctaatcctacctacattcctgcccagtgtggcggagctgctgtccgagacgcgccagatgtttagctccacgctggccagcagcatcaatacgctggcctttagcaaggccacccaaaagctgcttgaaactccggagacgccacagtcagatgcggaaggagaagatgccgccgggcaggtctttggcgagcagaatctttcggagtgtggtctgctgccggcagtagttggctccatctgccgcacgggccaacatgccgtaggtcttttagagcgcgtttgctatcaaagagatgagggatatgcttggagctag

SEQ ID NO: 4710 - protein, 568 aa, DROSOPHILA
MSTEASVASKWTRPDDFIKLQRLKQKKNKLAARVSNNNNRRPRHQVDETDKSKLLEAKLAQKRKNPFAKSTADAKKLRVDPQLADLEPVVTASSCFVRETPTRPAPAKFVLQKYDPQAFAKLFQHPQINAEDEDDAELAARQKHTAHLPVDWSLKTRARFFCPTELPAIQLKTSQLASGLTSFVRCMDPQRTESTLDISDATRFNQCNYYWQHPHLPWLTLYPRTAKENVGVVVGERERKALAEEWDFSFRGLFQLLRARQCPYFYLCANTFTVLFRAAGVGGRPESHALVTPSTRGMRQALRQEGIEFSMPLKSDNSGNAHDNSFNEESTTTSLGPEAGEDAPPPAQEDEDDDEDWLESLGVDERELRRIQSSHARKQQAAEMREDFSDNSLLLVDGVECQGFFSYLLNAKSAISTVGRLAGVPPTLLSPVAFPKATMQHLVPRSKKVRLDGVDYFSIDIKGLILPTFLPSVAELLSETRQMFSSTLASSINTLAFSKATQKLLETPETPQSDAEGEDAAGQVFGEQNLSECGLLPAVVGSICRTGQHAVGLLERVCYQRDEGYAWS

SEQ ID NO: 4711 - DNA, 14897 bp, DROSOPHILA
taagatatatatatctatatatatattccttatatatatatataataagtaatatatataaatataataataaaattaatataataaatatattaattaaatggctgattattccgaggagagtcctcgagacgttagacgtccaatgtcaaatgtcctgtcctagtgtacaaatgtacccttataactggatacggggaaatctagttcctccactttattatgctcctttcagcgcgccagctaacaatgataagcagtaacttttaaatgtgttacctattgatgcaagaaaaagttgagtgcgccatcttttgcttgactttaataaacgagtacgacacggtgcaccatctattggtggtataatatacacaggtaaaaaagctcatgtaaaatttaaagtgtaaaaagacaagtagggtaatttttttttaaatgtcactacaaagtttagaaattacaaataaaatccacttctttgacccattcaaaatgttgctttagttttcctatgaaaactattcataaaagaaaaacgttttatttaataacttgtactatttattttaatgtatacgttttaattttatttcacttacatacgtttctgttgaaatattaaatattaaaatatgttgagcttacaaagtattaacactatgcgtgggaaggtctcacttttatgcctctttataggttggtttaggtttggttgcttactatacaaatgagattacgaacgggtaaatctgcagggttccattatttgctgagatttacaaagctgcatttaggaataactacgaacttgcctgttatgtaaggggaacgtgcacaactatgaatgaggaatatttgtgcaaatgttttctatacaaatacgaattgcctacgagaacacttaattatactaaaaattttttcaatttgatttgttagataacataaaaattttggtacagtcatcggctttgtatccttcgatacttataattgcattgggttttccctcaacttgcttccaaactttttgttagtttggctattatcatatatacacttgttcttctttatagcttccttcattttgattataatcctttcgaaactaaaattatatattaatatattgcctcaaatgctttgtaagctttgtcatattcgtttatttaactaaaatcatttgaaaaatataaataaatgattggaaataggaactaaaagcaccagtaaattatttacttaaagaaaaaaacacctagtcctcacaaaatgtattcctttggggctacttaattaaaagaaattatcaactaatagtagacatattgcattagagtttcctttaagtccttagcggtggcaacgcgttgcttacgggacaaggagcgggaacggctgctgtcggcgtctcgatctgcgcttggagctgacgcttgtcccgaaagcgtttcagctttcttctggccatgaacaggtctggcttaaagctgagctcacggcaagccagttggtgaagggcgggtcgcgaaggcagggacggcggggtagggttcatttcctggtccagctcaaaagcagggaagtacattggattggcgttggcagccccggctgcccaatcccgccacaagtttcaatcatgcccggtcccaccgttggatggcgtaagtggtgggcccgtcgcgcttatctcccgacggtgctccagcgagagcggtattccaggacctgagtagtcttcgtccacggaagaggactgcttcgatccaacagacttgcagtcctcatccatgctcacgccaagatggtgcatagccgcagctgcatgatggcgttctgccggcggcaaaaggtttaacatgctcagagggaggccgggaaagccgcccgaaaaatcagggtagaaaccctgtgggttgaagggattgaacagggcatttggggcactcagtaaatcgggctcggaactgttactacggggtcctcctgggggtcccaggggaagtcccagatccaggtctaactgtcccataggccccagttcaccggaatgctgcattggtccactgccggaggtcggtgctccgccttgggaattagcagacccccccgaaccgttgctgctcatggagttcttgtccttttccttctccttgcgctccttgctcttctcattcttcgtggaaccaccgctacctccgccgatgcccatttgcagcatttctatcggtggtccactgatgcagtccttccgcagctgctccagttttaaactctttccgtattttccccggacgtacatcagtagagaattgtaggggataccgaaaatccgcgacgcctgcgacgtggtcatctttttgttccaaacgtgctgcagtgcctccgtcagttctgtgttagtccatgagcgtggaggaccgccgcgtggggctgagtgctgtccctttggtcgcggcactgcaaaaaaggatcatttgcatatagtaaatgcttctcaaagccaaaaacccaacctatcgcttagcgataatgtttcaatctcttgtctcatatactgcctagaacatttttctgaaaagtcacccattgtctgggatctacagggcgaagcagcttgctttgagctcgtacacaccctgaaacatgtctttgtgtggcacctattcttgaggcgagctatcattcggcacatccaaagaaataagaacgctgtggaggttcctggccttccccgtaatgattggcttctctctgtatgcaaatttgaagtaagcaaggtctgcgggggtcatatgcgccgcaaaaactcaatttagatcctgagatatcagcttgcacccggcaataagtcccacaaatgcacaggtactttcccttaaggccctcaaagcgggagtgggtatatgtaccatgtggggaagtaaatatgtaaccctaattcactggttgctttggcttgagcatataggctgaatatttgcctagctcgtctgctgccgctagatcataagcaaggtaatgagcttttgattgtggtaacatcgaaaataccgaaagccaaaccccaactagcaagttaatgaagccggcctaataaagtttcactagacaaaaaggtttgaatttggtacaaatcggaaatcacgtttcacagaccggctcaaaacaaccgacgaataaacaaatgaatgtgaacaaatcagttaatcacacccacacgattgagggccacagaccacgagtgaattgcatcgaagttgtaagtgtatagctccacggctcccgattggtatcattcgagaaacaggttttgcagacttgcaatatataatagaatatcgtgctatacgctaaatttggttttttttgccggcttacattgctaaaatcgagtttgtaaattgacgtcattcagcacgcctgaagatgtagattagataagaaataacaaatctgctctggatgttcttcaacctgacgtggctaacatatgatcacgactctttcattccttattccttcacttaatgttcttgaagaccagaaaattaagaaattagattggcggttttgttttttttgctatcttcgcatctaactcatcaattccttcacgtcttatttgtcaatcagttggcggttagtccataattgatgtgagaactagagagaatgctatagtcgagtttcccgactatcagatatccgggaatatatagtaactcagataatggaaatgcgaacacgaaatcattttctgggatatcgatagatgttggtaaataaaatttaaaaattgtttaaaattgggggcgtgaccgttatgggcgttttgtaggtgtctgaaggaaaagtgtttttgtataccgatataaattggtaagacacaccataaaacgaagaaaaatcaaaacatttttcaaatgtgtgggcgtggcagtttttggcggttagtgggtgtggcaaaaagttattgtgcaaatcggtagaagcttaaaaggctaagaaatacatgaaaaaatatcgagtcatttaaaaaaagtttgggcgttacagtttttgggcggtttttgggcgttatagtgggcgtgacaacatttgaaaacaaactaaacggagcctatgtttttggaagttgcttgcttaatctcaacattgtaacaatacaactatattgtaactatatagtaactattttcactataaatgcaatagttgccgctatcgagacagatagtttcgtacggacagaaggctcgaccggctactgtcctgatcacaaatatatatattttatatggtcggaaacgcttctttttacgtgttacatactttttaacgaatctagtatctagtactagtaacgggtttaaaaatagagaattatattgatttcctggcttacaaacacatttagagtgctcaaaaaaatatttacccttttgaggtctcgtaacaccattccctgagctaaataaaaagcgatagaaatatggtatatcgaatttactttctcgcctcttccatttgtcaatcaaaaaatcgacgcgtacattttacgttttgcctaggtgcacatacagctgtgttcagaaaaatagcagtgcgaaggaagctaagtaatacaaaggtatttttccatgtcccttttcggaatcgactttttgttccacttatttttggtaaatggaatgtgtagataaggaaaaaaagaaaatccggttagtttttcatgttatcctctttttatttacattcttgagcaaaatcgcaatttttaggctgttcataagaatagcagtgtctggttttgaccaacgtaaagttccgaaatgatcattattttctaaaaagtgagtttggttaagttaattcgtatatttaaaagggcaataatttaaaaaaaaaaattttaaaattatattttagtgggtggaggacagcactgctcccaggagaaaagaatgttaaattttaagcttagaaaagaaggaaaaacataaaaggacattaaaaaaactcttgaatgtgctgccaaaatggtatccaataccattaaatatgaatggaagcccgaaaaccgtggtaccacagagatagagaatcgacgcatagttcgttagagcaaagcctatccttttgcatcctctagggacataaagtctgagctgaacttgggaatcagtgacgactactgaatcaaaatttcagtgcgaggagtccacgaaaggtttccccacttagcccaaggcttattcaggcaaggtttaccttcgctaaaacctaccgaaactggccagtctgcgaatggcgtaatatcctttggactgattggtcaaaaatagtgctatttggtggaactggttcactacagtatatctgacgacctccaaacacggagtaccactgcctattatgttgttttaatctatattttcgaaactattgaagaaataaaagtgaaacatttgttaaattgtttgaaattaaatacctaatgatattataaaaaaaaatttcctattaaaactgtaaatcataggaatttttttatcttaatctctcaagtccaaagcactgctatttttctgaacatagctgtattgccccattcaagaaaaagaaaaagaaacaaacaaaccatttgtcgaccgatttaacaattgcttcggcgcacaggaaaaccgcagaaacaaatttgccgcctcacatgatcgcttgagtgatcgctgatcgcatctggaacggtccgagaaatgggaggcatagaatgtggctttttgtgccttcgtagcggtcttataaggggtaactgttcgaaaggaagtgcgcaagcaattcaatacaaatccagagttagttgcattcgtaaaaaatagggataatataatcagctaaacttttgttttgcccttcacaaaactgcttatgactccttctattaccctcaatcgatacctaaccgaagtgttttcttcgttcctagagcgcaactacgtgatcaaaagtgcagcatatcaaatgcaagaggtacaaaggtagaagactgggcatgaactctgctaccccagtgcgagatcaatcagtcaggtgtgaagtattgcagccagacacggaacagatcggcctacaagcttgactggctcaacgtgatcgacgccaatcatgccgaaatgattttaaacatttccagctgtagagacctctcttggccgttgactggggtccgggctgcctttcgggttaattagttgtttgctgggcttggcgaaagtttgttcagtgcacttattttgtagggtgtttgtacttacttttctttttaaggaatggaggcggcccgccaggcatgtcccttggatcgctcatttccattaacgggttataaagcttgccaggatcgattccgggtggaaagagtccaagtggtgagtcgagaccaaacactgtcgacaaaaaaattattattaaatattgatttttcactgtgacaataataataactgtataaatagcaaactgcactcgtcttatacaacagtcactgcattgggtaatttaagcataagcgacatattttccagctcactgaagctgattagccgccaagacaatggacgcaaacacacttcgacaaactgtacatacggattgtaaacaatggcacatcgttattctattaatattttacgcttggagtgcatgagtgaaacaattggtaagctgatgagccaagaaggtggatgaggataacttaggaatgattccgcaaagactctttacctagctgggaggtaacgcataatattgacattgtgctgactgattttataagtcgcgccgcggatttcaagatgcgaagaagcgccacataacagacgagctaacgtacagacagaagggggcgaaaacaatgctcaagcatatgaataaggagacgtatccgtttctgtttctgaggatgtgttgtatctgcagcataatgacacaaataacgagcgctcattgtttgactctgttttctgaagtagacattacaacacgcggcgtatgcgtaatgtggtttttttactttaaacttttttgaaggtgcgcaaaatttgtggatttccctttgaaatcctggcggatctcaagctttagctttgactttacagcccatcccacatgtcagaagctattagttgaatgattttcacgccagatatgataaaaaaatcacattattcgtacgaaaggcataaggtggtttatctcttgcacgaccgtctggcaaacgagatatatgtaaagttaatatatatactcgtaaataaattttagccatgttgagtagaacaaaatttgtaaaggtaagtggaaaaatgtattaaacaaaaatatcaaccgttcccataaacagataccgattttgcaagaaccacttaaatatcctttaaatgtttgccactaatatgtttttgatatgttttaaaatttaaattatactcgacaaaaaaaatatttcacactacagggtattatataggcgaccactggtttgctaaaaaaacactggagttctgcggcttagcgtatctttcgttttctcattgcctgcagcctgtttatgcagtagttagcgatttgcttgaatacggcgcgactttggtgcgctttagtcacccgtactcgttctcgtattcgcttttctgatatgttggctgaaatttttgtcgcattaaaaggtattgcgcttcctgcctgacttccacttcgcgttttcgtacaatttttcatatttttgtgccttaatttattttatatcctgtgtgcgcgcgtctcgcctgcattcaggcgccctctgtctccccaggtgaaggtcctggtctttggcttggcatgggcctccccaaacggatattattaatatgaatatcgcgcgacttatatgcaaaagtcgtgtggaaggactagaccaaggtaaggaaagcccaaccacgagacgtcgccccgtatttttatttatgctggcgacgatgccaaagttgtttgccaaaaggtttaagttgtgcgcgctttggcatactttaaacacaacacattaccggaaagggcataaagcagacagcgaatatcccgatgtggagaagtgctgtcctctgctcggcagccaagtaacgtaaaagtcatttgactaaatgttggctgacagtttaaactcaacccgctccgaaaatcacatgttgaagagacacaacataaattgtttgcactttctgcacgcaacggcggaagctaacccaacccgtcgatatttttaacctttgcgcctccgcttgtgttggtttcgcttgactccaagtcacatgaatgtaaaaatcatataaaacgcaattgaatttacttcggctgcagttcctcccgggacttaaccgcaacggcattcccattgccccttccctagctcccagacgttgttgtcagtatagaacggagtgggagtcggtaaactgtcaaattattaggaacttatacgattgcttttccatatttcttataagctgtcaacagcggaaacattttgtgacttaattactaaaaaataaaacatcagagtgataggactcctttttttagaaactcttaaagcattgcaccctttaaacggtgttatgctcgctatggagttcttcacgggtcatactagcagcaaaaggagcctgagaagccataatgtgcttaggggcttttgcaacagtcttgcgtggcaatgaaagagcacttctccaaggatacttgtcacttggcgacactttgatgttgcgctaagaccacatgttgcatttcagagtggcgaaaagtgtagacatgtcgaagggactctccgtgagagtttattatttttgcacgtgaccagattgaagaaaatttctgttattaaagctgtagctgggcatatgcatatgcttttaacccagtgacctctgggcccaattggcttaagttacaaaaagatactcactatgtggcggagtcagcgtcatcgcagaggacatgccaggaaagggcaatggtgatggcggatgcgggggtccatccggtgcattgaagggaccttgcagactcattggcgatgccggaccaaactcctttccaaactcctttccaaactcctttccaaactccttaccaagctccttactcagtcgattcatactctcctcaagtctttcgtgcgcagcttgtccaggacatccgtttcctggaccactgttgcccggatggcctccgttatgtcctccgaacgggggcatccccattggccccagcaaattgctcgcaaatgcgttgtggtcgcgcccatcacggggatcccgtggctcacgctgatgcatcgcagcagctgccgctgcagccgccaaagacatctccatctggtgctccatatgatggaagggatgctccccagatccagcagccgccacggcagcagcagcagctgcgtgcatctgtgcctctagcgcttccatgtggcagggcgggctgtctggtagaccaggaggccgaagtccgggcggagggaaagtaagtagtccgttgttgcccccagaacagctagtaggcgtgtggatggccgtagggttcggattagcgtttagttggcggatgtcctttagagacagcattatgcgctggttgttgtcctgcagcttgctgctgttgttgttattggactcacagtctgccgaactagaggggccagaaattagttccttgcctttcttagtggtgcagaggtcctcgggcccgtcactgaggcagggagaagggttgggagacatggcggctgcatttgcagcagctgctgcagcctgacgcctcagctcgttggtcgtatgaataagctcttcaatgtcttgctcctcttcctcttcatgatcctgatcgtcgtcgtcctcatcgtcaagctcgagttgatggtgattctcgtttagactgcgtggttgatcggatccttcttctttcatggacttttgctccttagcccgttcaaccaacgtttttgctggcgacgaactaattttttcagcttccccttggctgttatcttgatcaggagcctcttcctgatctctttccgctcgctctagaagctcgtgcttgatcacagtttgcaaggattctgcatcggttttgtttaaggtaaagtcgtgcggcacatcgccggagcggcgccgcggtcgcgcttgcttacgtcgtggcataggtgaactgcctcccagctcctgatcactctccaagtcgcggtcggactcctgctctcgttttcgtcgcaaacctagagcagcaatggcgcttgaagcgttgccaaacagtcgggcggacggcatcaaaagctttccacccttagagggtcggaccatcgtcggacactcgtcctcaaaggtagaggacagcatagaggtgtccaacatcccgaaatcatcgggggaagcggccggtgtgggagtgtgttctgggacagagctctccaccaagcctcggacttgaagcgactctccggcctggatgagtgtctggagtctctgctggggcacgctgatctctccgcggtacataaagtctacaatggcctgcactacccaaccccggaaatccttgagcactataactgggtgcttgcagggagtttccgcaaagacgcgctggaagaagggcgaacaggcggagagcaccattttgtgagcccggatcgaagtctccgcgcagaccagggtcacgtccaccagcgttttggtcttcagcagtgcatcgaatgcccgcaggatgtggttctggtggttgttccagcgtaggctgtagtgatcctgtggggccgatggtacagctagtgcaccttctgagggtggtgtggcaggcagactgttttctggagtagcagcttccgttaccgccgatgccgattgactcatgttcaagggcagaggaggtggcgtaggcggggtcgtcggaggcgtagagtgcattggggcgtgatcactggtcggagtctttgctaaaagctgtagctgcactgacaaaggcagcggcaattctagcggcaggggctgctttacaggcgccgcctgacaagcgaagtcggtcatggagagcttcgtcgattggcgatgtttaatcaacttctggtgggcgtcctttaacatgccccgttccagtcacgtgcagcgtgcttcaattctctgggaaaagaacatgcggaagaaggaaagagagaacggtttaggcgagagacgagtaagcaaagcttaagaataataccaggcataatgtattcgtattcatgacatatgctgtaaggcacatttgaagtgtgtacagtgtgataatatgttaatgagtcgcggcatatatcatttttccagctgtggagacagtgaatggcaaaaaagagcatgaagctgtagcaatcacagttgctacgtgttgtgtcgtgtatcctctaggatatcacatgcagatgtgtgataatggctcattccccctgctcgaatttggttttgctttgtttaactgtgctcccggcacttcacagtggaatgaatttggcaaaatgggaactcaatcagaatactttccttttagaaaatcacaatttttaaaactagtttaaagttttgctatttctttttgggctctaaaaagtgtttagtatatcaatccacggaaaaactctacttgtttgcgtggatctgccaccgttttattcgtgggcgattgccgcatccagtgcgatgcatctaattaattcagcaactgtctggcttggattcgcacttcatcttctcaaaagcgttgaacactgcgtgtgtgaatttttaaaacagtcaccagctgcctgactacctctcacctcacactaacttccttagacaaaattaaaaaactttggtaggagcgcaagcaaaataaacatttttatttgccgtagttgctgcatcctttgctcatccgtctaccttttgggagtggctgttgagttgaagaggtgggtggacggagcttgaaaccgcatattaacacatgcttctccacgccagatctttctgctgggagcgagccagagccaaaggataaccacgctcgactgcaacaatgtgcaattagcagcgagctgctaggcgtttacatcggttcatgctcggttttggtttgctccttttttcagctcgtaactcatttgcggtttgtggcagctgagacaacatttttatttatttattttgctttagagtggcgacaggtaaaagcaagttagtggaacgcagagaagagaaatcaacttttaaattaatggcaaagtaagtcagttaaaagagactaaggatcccccaacactcatttgaaaatcttaattttttattttttgtcttttcctatcattttctttcgtataccagattatcgctgtcacatttttgaaaaatttcaactttttttcaatttactatttttgttgaaatttcttgtttgctgactcgctgagtaatggggtatttgataagcgggttactcgactacagtgtcatctcttgtttgatttgtcttctatttttaatttcgattcatttattatcttccattaaaaaaattgcacatctcactattattaaatacgatttgtggtaagaaaaaagtttttcttataacctagtgcgttaaatataattgtcaaaaatgaattgacattaaaatgtagaatgccttaaaaaacaaccttcacatggctttagaaaccgtatctttacaatattaaatttttaaacccaaccattaccattttaactgactcttgcgatacttctgattgatttgtactttcactttttaataaaatccactaaaattatatactttgcacaatatagttctgttcaagacatgtgttgtcactccttattaattataacaagatcggacgctcgcgactttagagttacacgttctggtcgagggtttgtaacaaactgagctatatctatgcaaataaatgcacagcaagttggtaacggtgttcacctatgagcgaacctcaacacacaccccgcacacatgcaaccctcagtcaacgaacaccacacacaatacaaaaactatgcgtgcatgtgtgagtcgtggtgggcaggatcggctacaattcgctctcactttgctcttactctgcggtacaaaggatttccctttggtcaacagagcaggtgataatcaggtgcgtgatcgtgtatgttgacacacacacaaagcaaataaataaagtgcagaccagccgaacaggtagatcacaaatgggtgggtactcaaatttgcttctcaaatggctgctgacaggtcaatttgtggcctattactaagtttatattgtcatacccgtccttttaattttagggcaattttcaaagaactgattttgggtttcatttgaaatgtttaaaacacaatgatttttttgaaggacacatgaaacgtactttttacaatacctataaattgtaactttttatgtctaaaggaaatacaagacttcaaatcaagaaaacctatgtatttacaaccatttgataggtttttgaattgccgtttgattgcttctttggaaacaagttggagagattttaaaatatataataaatattatgcaatatactttaaaagtcttttttaagcacgcgatacccgccgatatatttaatttcacgtaagagtatgtaattttttaacatacttatcaatcgaactaatacggtaaattattggcggcggcgttgtaaaaggccgctgaccatcgtatcggttaacgggtagcgggtaacgaatgagcgtatgtgggggttgcgtgtatgttttgaaccgttcaaacgtcacgaagcgactaattcaaatgatgtcggccgggcctgaaaaaacacagcaaccacgtcgcagctaacagagcgccagcagaggcggcggcagcgacggcacacacgcgctgcccaccacagccacccacttgccacgccccctgctagcgtggccacggccgcccacgtacacgcacacgtatgagcagtgggccacaaacggtcggactctgccaaacaggaatcacatgaggatgcggcgctccgtttggcaggacgaagctcggtcggctgaggcagcagcgccggcagcgaagcgacttacttactccttcatcacataaaatatatagtttcccttatcacaacagaagctaagcggagtgatgggggagtttgagaatgtcctcgcacgtcacgtacaccgaaaaaaatgtattatgtatatgtgtacacgaaataaatttgcatactcatgcgtagccgaagccgaacatgagccgaatcagacgatacgagccatgaggacacgaagggagcaaaaagagcacacgcacgccgagttcccttcgtgtacatacatatacacataaaggcactcgtgttaatgtggaggctccgaatacccgtaaagagtaagagctaccaccagacaacacgggtatcgcaacaagaagagctggaaggacacccaccccacaaggatttcactcattcacggcccacagttgtcacacattggagccaccgactgcgcgggagtgtaacattttttaatataacccccaccaaaaaaaggccgacgccgcagctggcgttggcgtcggcgtcggcgtcggcggcaacatatccctttttttgccagcttatggaaatttgaaaagctgcgagttgagttttcccgccgctgccgtcggaatcgaacaaatggaggagagtggctcagtgagtaagagtgagaaagcttcgagcgagacggacgacagttctggcagagagcgcaggaga

SEQ ID NO: 4712 - DNA, 4431 bp, DROSOPHILA
gttcaaaacatacacgcaacccccacatacgctcattcgttacccgctacccgttaaccgatacgatggtcagcggccttttacaacgccgccgccaataatttaccgtattagttcgattgataaagaattgaagcacgctgcacgtgactggaacggggcatgttaaaggacgcccaccagaagttgattaaacatcgccaatcgacgaagctctccatgaccgacttcgcttgtcaggcggcgcctgtaaagcagcccctgccgctagaattgccgctgcctttgtcagtgcagctacagcttttagcaaagactccgaccagtgatcacgccccaatgcactctacgcctccgacgaccccgcctacgccacctcctctgcccttgaacatgagtcaatcggcatcggcggtaacggaagctgctactccagaaaacagtctgcctgccacaccaccctcagaaggtgcactagctgtaccatcggccccacaggatcactacagcctacgctggaacaaccaccagaaccacatcctgcgggcattcgatgcactgctgaagaccaaaacgctggtggacgtgaccctggtctgcgcggagacttcgatccgggctcacaaaatggtgctctccgcctgttcgcccttcttccagcgcgtctttgcggaaactccctgcaagcacccagttatagtgctcaaggatttccggggttgggtagtgcaggccattgtagactttatgtaccgcggagagatcagcgtgccccagcagagactccagacactcatccaggccggagagtcgcttcaagtccgaggcttggtggagagctctgtcccagaacacactcccacaccggccgcttcccccgatgatttcgggatgttggacacctctatgctgtcctctacctttgaggacgagtgtccgacgatggtccgaccctctaagggtggaaagcttttgatgccgtccgcccgactgtttggcaacgcttcaagcgccattgctgctctaggtttgcgacgaaaacgagagcaggagtccgaccgcgacttggagagtgatcaggagctgggaggcagttcacctatgccacgacgtaagcaagcgcgaccgcggcgccgctccggcgatgtgccgcacgactttaccttaaacaaaaccgatgcagaatccttgcaaactgtgatcaagcacgagcttctagagcgagcggaaagagatcaggaagaggctcctgatcaagataacagccaaggggaagctgaaaaaattagttcgtcgccagcaaaaacgttggttgaacgggctaaggagcaaaagtccatgaaagaagaaggatccgatcaaccacgcagtctaaacgagaatcaccatcaactcgagcttgacgatgaggacgacgacgatcaggatcatgaagaggaagaggagcaagacattgaagagcttattcatacgaccaacgagctgaggcgtcaggctgcagcagctgctgcaaatgcagccgccatgtctcccaacccttctccctgcctcagtgacgggcccgaggacctctgcaccactaagaaaggcaaggaactaatttctggcccctctagttcggcagactgtgagtccaataacaacaacagcagcaagctgcaggacaacaaccagcgcataatgctgtctctaaaggacatccgccaactaaacgctaatccgaaccctacggccatccacacgcctactagctgttctgggggcaacaacggactacttactttccctccgcccggacttcggcctcctggtctaccagacagcccgccctgccacatggaagcgctagaggcacagatgcacgcagctgctgctgctgccgtggcggctgctggatctggggagcatcccttccatcatatggagcaccagatggagatgtctttggcggctgcagcggcagctgctgcgatgcatcagcgtgagccacgggatccccgtgatgggcgcgaccacaacgcatttgcgagcaatttgctggggccaatggggatgcccccgttcggaggacataacggaggccatccgggcaacagtggtccaggaaacggatgtcctggacaagctgcgcacgaaagacttgaggagagtatgaatcgactgagtaaggagcttggtaaggagtttggaaaggagtttggaaaggagtttggaaaggagtttggtccggcatcgccaatgagtctgcaaggtcccttcaatgcaccggatggacccccgcatccgccatcaccattgccctttcctggcatgtcctctgcgatgacgctgactccgccacatatgtttggtctcgactcaccacttggactctttccacccggaatcgatcctggcaagctttataacccgttaatggaaatgagcgatccaagggacatgcctggcgggccgcctccattccttaaaaagaaaatgccgcgaccaaagggacagcactcagccccacgcggcggtcctccacgctcatggactaacacagaactgacggaggcactgcagcacgtttggaacaaaaagatgaccacgtcgcaggcgtcgcggattttcggtatcccctacaattctctactgatgtacgtccggggaaaatacggaaagagtttaaaactggagcagctgcggaaggactgcatcagtggaccaccgatagaaatgctgcaaatgggcatcggcggaggtagcggtggttccacgaagaatgagaagagcaaggagcgcaaggagaaggaaaaggacaagaactccatgagcagcaacggttcgggggggtctgctaattcccaaggcggagcaccgacctccggcagtggaccaatgcagcattccggtgaactggggcctatgggacagttagacctggatctgggacttcccctgggacccccaggaggaccccgtagtaacagttccgagcccgatttactgagtgccccaaatgccctgttcaatcccttcaacccacagggtttctaccctgatttttcgggcggctttcccggcctccctctgagcatgttaaaccttttgccgccggcagaacgccatcatgcagctgcggctatgcaccatcttggcgtgagcatggatgaggactgcaagtctgttggatcgaagcagtcctcttccgtggacgaagactactcaggtcctggaataccgctctcgctggagcaccgtcgggagataagcgcgacgggcccaccacttacgccatccaacggtgggaccgggcatgattgaaacttgtggcgggattgggcagccggggctgccaacgccaatccaatgtacttccctgcttttgagctggaccaggaaatgaaccctaccccgccgtccctgccttcgcgacccgcccttcaccaactggcttgccgtgagctcagctttaagccagacctgttcatggccagaagaaagctgaaacgctttcgggacaagcgtcagctccaagcgcagatcgagacgccgacagcagccgttcccgctccttgtcccgtaagcaacgcgttgccaccgctaaggacttaaaggaaactctaatgcaatatgtctactattagttgataatttcttttaattaagtagccccaaaggaatacattttgtgaggactaggtgtttttttctttaagtaaataatttactggtgcttttagttcctatttccaatcatttatttatatttttcaaatgattttagttaaataaacgaatatgacaaagcttacaaagcatttgaggcaatatattaatatataattttagtttcgaaaggattataatcaaaatgaaggaagctataaagaagaacaagtgtatatatgataatagccaaactaacaaaaagtttggaagcaagttgagggaaaacccaatgcaattataagtatcgaaggatacaaagccgatgactgtaccaaaatttttatgttatctaacaaatcaaattgaaaaaatttttagtataattaagtgttctcgtaggcaattcgtatttgtatagaaaacatttgcacaaatattcctcattcatagttgtgcacgttccccttacataacaggcaagttcgtagttattcctaaatgcagctttgtaaatctcagcaaataatggaaccctgcagatttacccgttcgtaatctcatttgtatagtaagcaaccaaacctaaaccaacctataaagaggcataaaagtgagaccttcccacgcatagtgttaatactttgtaagctcaacatattttaatatttaatatttcaacagaaacgtatgtaagtgaaataaaattaaaacgtatacattaaaataaatagtacaagttattaaataaaacgtttttcttttatgaatagttttcatagg

SEQ ID NO: 4713 - protein, 1046 aa, DROSOPHILA
MLKDAHQKLIKHRQSTKLSMTDFACQAAPVKQPLPLELPLPLSVQLQLLAKTPTSDHAPMHSTPPTTPPTPPPLPLNMSQSASAVTEAATPENSLPATPPSEGALAVPSAPQDHYSLRWNNHQNHILRAFDALLKTKTLVDVTLVCAETSIRAHKMVLSACSPFFQRVFAETPCKHPVIVLKDFRGWVVQAIVDFMYRGEISVPQQRLQTLIQAGESLQVRGLVESSVPEHTPTPAASPDDFGMLDTSMLSSTFEDECPTMVRPSKGGKLLMPSARLFGNASSAIAALGLRRKREQESDRDLESDQELGGSSPMPRRKQARPRRRSGDVPHDFTLNKTDAESLQTVIKHELLERAERDQEEAPDQDNSQGEAEKISSSPAKTLVERAKEQKSMKEEGSDQPRSLNENHHQLELDDEDDDDQDHEEEEEQDIEELIHTTNELRRQAAAAAANAAAMSPNPSPCLSDGPEDLCTTKKGKELISGPSSSADCESNNNNSSKLQDNNQRIMLSLKDIRQLNANPNPTAIHTPTSCSGGNNGLLTFPPPGLRPPGLPDSPPCHMEALEAQMHAAAAAAVAAAGSGEHPFHHMEHQMEMSLAAAAAAAAMHQREPRDPRDGRDHNAFASNLLGPMGMPPFGGHNGGHPGNSGPGNGCPGQAAHERLEESMNRLSKELGKEFGKEFGKEFGKEFGPASPMSLQGPFNAPDGPPHPPSPLPFPGMSSAMTLTPPHMFGLDSPLGLFPPGIDPGKLYNPLMEMSDPRDMPGGPPPFLKKKMPRPKGQHSAPRGGPPRSWTNTELTEALQHVWNKKMTTSQASRIFGIPYNSLLMYVRGKYGKSLKLEQLRKDCISGPPIEMLQMGIGGGSGGSTKNEKSKERKEKEKDKNSMSSNGSGGSANSQGGAPTSGSGPMQHSGELGPMGQLDLDLGLPLGPPGGPRSNSSEPDLLSAPNALFNPFNPQGFYPDFSGGFPGLPLSMLNLLPPAERHHAAAAMHHLGVSMDEDCKSVGSKQSSSVDEDYSGPGIPLSLEHRREISATGPPLTPSNGGTGHD

SEQ ID NO: 4714 - DNA, 2358 bp, DROSOPHILA
gcaaggatagtgatcagattaaatgttaaaactaattcgagagttaaaaagttcaccttggttttttggtttgaatggaatgcattcgttgttttttggttattctaaacacggattaattcctgtgtgcaacttgtatcgtacctataaaattgcattccaacaaaaacaaaaacccatgagcagaacgcaagagtatatatataaatatatcctatatgtaaatgtaaagtcattacaaaaatgaacaacttttctgaaaaataaaatgtatattcaaatatcaactttctgtgcacttttgaagatatccccgttggatacacttctcattcatttccctattacagtttttatttttatagcttattttgatgaactctcctaaagggattcaattattcaagtacgtttggtaagtatataagggtttgaatattttggaatgtgtacgtaagcagccaggaccaagtgcatgtgtacataactcctaagaagaaaccttcttgatttcgagaggaaaacgatgtcattattgatttttttttcttttagacggaagcagtatcaggattaagaaaaagaaaaagtcaaaagaaaaccaagtcatttgcaatctaagaatgattcgaccatgatctaagtatgctgagcatcatgcgatcttggctagattttgagatctaaattctgaaatcgagatcgttaagaacggtgtttttttgctctgaatgtaatatatagtctagcgttcccacgtgctgaccaaaaggaggaccacttctgctcccaattagttgaagggtctaaattccacaaaccatctctctattcaactgacttcaaatacatttattatattattgtagatgctggaacttctatttggtctacttccacaggacaatggaaacagtttcctgtttcgcctcacaaacatatttaaataggcctttgtcgttgttgcagggtcgatcaatcaactggatgtcccttgagtctcatttcctccggcattgtcaggttgtttgggtgcccagcgattgatgtttacaggcgtggcatcggtaaaccaattgtgggtgcctagttttcccagatcattcccagacgacgctccgagcgatctcccttgttttttaggtagtcagccacagcgtcgaactcctcggccgtttcgaaggtcaccagttcggatcccaactggcgtcagtttccatagccaacgtaccagtttactttgaactgaccgaagttgtagtagccgtcattaatcctaataaacggggtcgagttaacagcaaagttatgtggatttccttagaaaagagatcagagagaatatattacggatgagtaaaataataaaataataaataattaatgataactggttgtatactatttataacctaccagaaatgacaaaggttgagtatttctctttggccctcccaaggctcaaataagtcagaaattaattaataaaattaatttgacgaagatcttctgcatggtggagcaaactgatttcataggcaaaacccccgcttatttatcccaaattgcaataagccatacagaattgcgacttttcaaaacccaaccgagtcacttaatcaagaattaaaatatattccttgatgaaaataccagacgaattaacgtaagcgtatctttttaaattctagcatacctacaggcaaaaaatataacaaaatatttaaaagacgtcttttcggcggtgtatgtatatacatttcctcaaagcgagcatgataatattaaatgcgatatattttggatagataaaaatagtttaataaccttaaaatattagtatctttaagctctgtaccaaatagaaccacttataaaatccatctctctacaaccacgtagacaaatgtaggccacacgtggttcatcagctcaggcttttgtttaatataaaaaatatacatacaatatgtagatatgtcataaatatacatacttcatgatttacagataacaagagaacgtatttggacaaacatttatttccgtttgttattagatgtaaacgatatgaaaaagatgtctaacaagatgcatgagagtcgacagattgagtgttagccagtgaccgcgtttgtccacgatttactggcttgttaaataattttgagataagatgcaatgagcgtcgcgacagttgcttatgttattgaatctagttaacttctctttaggtataatactttggcagccaaaaactaagaatgagctaggcaaaaggtcctgacaaagatgcaacaaactaaaattaataaacaaccaactcggacgctgacatggcagtaagctaatggttaa

SEQ ID NO: 4715 - DNA, 358 bp, DROSOPHILA
actcatccgtaatatattctctctgatctcttttctaaggaaatccacataactttgctgttaactcgaccccgtttattaggattaatgacggctactacaacttcggtcagttcaaagtaaactggtacgttggctatggaaactgacgccagttgggatccgaactggtgaccttcgaaacggccgaggagttcgacgctgtggctgactacctaaaaaacaagggagatcgctcggagcgtcgtctgggaatgatctgggaaaactaggcacccacaattggtttaccgatgccacgcctgtaaacatcaatcgctgggcacccaaacaacctgacaatgccggaggaaatgag

SEQ ID NO: 4716 - protein, 11 aa, DROSOPHILA
MTATTTSVSSK

SEQ ID NO: 4717 - DNA, 4914 bp, DROSOPHILA
cgcgggctccatacgattcgtattagcccgcaattgtataaaggttagttagtttcttagctagttagttggacatttagaagtaggactttttctgtgcgaaaatcagcagaagttgaaggaaaaccctcagtaattccgccaaagttcgttgctggaaaaggactcttttaaggtaatttcatgatattgactcgtttcagttaagtccctaaagctaatggcacactgaatacaattaggcattacggctacgattgcaattgcgtttttttttttcgattgttaagtacacttgtttcggcatcgggagaagacagcaaagttggaaacctagtttctggttcccatttttatttttttgtttttgaagacatgaacatgcgtatcacagtatttggttgctgcgcgtttctctctctctctaactcaaaaaaaaagaatttatataaaaatgctaaatatatatatgtatatatgtgttatgtacgcaaaggcgacacacattaagtcctaatgtctaaaaggcaagagcgattattgaatttggttacaccaaaatggtaaaaaggcaacgcaaggggcaactaattaggagcaacattaagtacacacaggaaaataggatatgaagcccatctagggcaattacaaatacattgtagatgacctatgacctcgcgataaaggcccaaactaaagcactaagagcacatttccggggttatatacacagtacatagatcggtttaccccattgtgttctatggacaggcaaagcaactaaaatcgaaataacgatatcgttatctcacgatcgttttatgacaaacaaattggaccgtttccccacccatttaagttgctttgcctctttcgatacccgaaaccgcattaagttatagtagaggattgactttggcacagcagctgctgcaggaacattgactggaagcaggaagcatttcctgccctgaaatggtacctaatccaattccgtctagagtagcgtctcattgccatactgctgcaagtggggatagtagctgccgtgctggctgtacttttgcgaggcatagctacctggcggataatacagccgatgcgaggatgtggagtgatgctggtgattgtggtggggatggaactgatgatgctgctgctgctggtgatgatgatgatgcggcgaatggcgctgctggtgatgcacgctcctgcccagcgaatagttggacatctgattcagcgatatagagccggtaccaggcgaagtcttcagtttgtacggacttggcggcaacggaacactggccatagaagttcgcaccgaatggtaggagaccaccgtgctattgcaagccgcatgcgatccacgcgagctactatgcccgtccaggtgtccagttgctgctccggcagacgtatgcttcaccattttgccattgctgacttgcctcttgtagagagtggaaatgcttggtccaagtacccaggcaaaacagcaaatgcccagcatcagttccatgaaggcgcgcaacaaaaatggccaaagtggcgtattggtatcacccgatcccagccagacatcgatgttggcaaactcgtaaatgacagccaacagaagcatggcacatgcaagtccatagatgaaaaggaatatgccaatgccggaactactgtgtgcgcttagctgttgcagttgctgttgcacgctgagtgcattgctattcctcaggatctccttggtgcgacagtgtaccaaatagccggagatcagattcatcgagccaaagatccagtagcaaaaaacgggcgtagccaccaatatctgtagcgccttatccgactgattgcctacgaaacaggcgcctagaagagcgtatggttgggttactctccgaattctccggcggatctatagcatatctcaccaagcaactcgtcagcatccacgaaacgggcaacgatcactgctgacgtttgaaaggccggcaatccccaggccacgaagcacacaaagttgttttgcgttagatcctgctgagccgtcttggcactgttcctcttcgccggactgcctccaaagttcgagggaatgaccacatggcccttggagtccggactgtgccgacgaatgtcgcggtgccagcccaaacagagcacagcccacctacaaataggatatgggaatatagtttctataatattaagtatatattataatctaataccaagcgcaggcggccattccaaaatagtagcgcataaggaagacactagcgcaggaggcattggacagtccgtccacggtgagtagggattcattgggcgcctggggatccgtgccgcacgcagttcccgttcttcccaccataaagcgcactgcccagcccaaggtgaccatgttgtggcaccaaatcagcggcgacaacaatctggaccacttggcgctggccaaacgactgccatcgctggccaaaagacacacggtggctaccagggccaaacccaaagcggcataggcccatgtggagacccagatctctgccagatgcttctccgccggtgtgaacagtatgtccgcctcgcagagtggtgcacagcgtccagatctgggtagccttacgtacagatgcgatttggccagtcccgagcaatccatgggcagtttaccgcccaatccaccgggtattccttggcccggtagcccatacaaatcctgctcctgctgcggctgatgcaattcaccgggaccttccatacacatcgtctcgtggttgttctctcgcggaaatttatcgcagtcgagagccggtggccatggaaatccgaatccctgcaaaactggatgacaacgtattcgcacggactcacagagactccggcacggaccgatggcatggactggagctttgggcgtgcacatgggcacgtaggcggcgcacaggaacagcttcaactgggaactgcagtcgtattcgatcagtggtgcaaaggtttgcagtgtgtactccacgtccgtttgcatttcgttacccaccagatttggcatggaggtctcattgtagccgatcttgcggcacatctcaatgcgaatggtttcgcattgccggaaggcggggatttctggcggagaactggaactggaactggcactggggttgccgctcgttgaggattttgagatgcgcggatgcaggaggatcaccaccaggagacacaatatgcaggttggcttcattgcggctgatttgttgttctttcgttccgaagaatacgaattcgatacgtttcttcgcttggtgttccgatttccgtttctctaaaggaatcgaaatgtggaaaagatcagatttcggggttttcttcgcgctgggttccctcttttctttccaaagaatccgaactatatgcagattcttcgttcttcggtggaacgaacgctggaaggggtaacctgttccaggtgcgttcgccctctctcgctcgcaccctctcactcgttccaacaacttccagctctccttctttccagcttgttattgttgcttttggcttgtcaactcgttaactacctcttttttttcggcgtcgttcttgttatcgcttctcctccttcccccactcgttcttcagccccaaccactcccctttctccaccgcacgccgcccaacccgctgatcgacgtcgataaacgggtttttcctcagggattaacccgaaaacgatctagcaaaccatcgaatctttcacacatctcagtgaacgaatagtgtatttgtttcgatgtgcttaaacgaatggcgcagtcagtttgtagccttagcgaatgtattctaatctaattggtattaacatcgaacgtttatatattttattttgttttcgtggtaaaattcaacgcatactggtcactctgagctagagatggctctgcgtcacgtcacctcgcatcgattgcaattgctcaacggatctgctatcgatatcaacaagtgtgttggttactaaatgcttttagatcaaaaggcgccccctggcggagttatgcgtaatcaaagaacattgagaagggcgcgcttttcaaaaacaaatttgtccaaataataagaaacatttaagcataataagaacataaatgttcaataaattctataggtgcagtaaaatacgtgttttgctagcacagctattttaagctgagaacttacaatattttagtacattgtgcttaaggtttaaagatacatatattgaaaaagttctggaaatgcttttgaagaacaaagctttaagaggcgcgctttccgagtatgtgagcttttttcaaatggcacactttctgcggaatataaaataaaaaaacctaataatatgccgcaagaccacttaagataaaatattaaaaatattaaaattgattatattttgtgcaccaaaagtggcggtagcttaatatcgcaaaaccaaattaatagcaattctgagccaaaccgcgattgccatttctgcatgttggtcctccgtccgtttcgccatctccctttggccaccgcttggcctctctttcgcacacacatggcaaacacaagccacgcccatgtatttcaacccccttgacaaaaatacgtaacatgccacttttatgtatgaaacgtgacaaatacgcacatgtgtgagaaagagatccaccgagctggcgagaaagagagagagagacgctggacgtttatgtgtttggcaggactcgcgtatgcagtgtgtgtgtgcgtgtgtgtgtgagtgtgtgtgagtgtttgttgttggttaacgcacacgcgcagacgtagcaacacatacacatatgtggaaaggatatgtacatacatacatacatacatacatatgcccgctgactttttcgccactgccaa

SEQ ID NO: 4718 - DNA, 2523 bp, DROSOPHILA
gaccagtatgcgttgaattttaccacgaaaacaaaataaaatatataaacgttcgatgttaataccaattagattagaatacattcgctaaggctacaaactgactgcgccattcgtttaagcacatcgaaacaaatacactattcgttcactgagatgtgtgaaagattcgatggtttgctagatcgttttcgggttaatccctgaggaaaaacccgtttatcgacgtcgatcagcgggttgggcggcgtgcggtggagaaaggggagtggttggggctgaagaacgagtgggggaaggaggagaagcgataacaagaacgacgccgaaaaaaaagagagaaacggaaatcggaacaccaagcgaagaaacgtatcgaattcgtattcttcggaacgaaagaacaacaaatcagccgcaatgaagccaacctgcatattgtgtctcctggtggtgatcctcctgcatccgcgcatctcaaaatcctcaacgagcggcaaccccagtgccagttccagttccagttctccgccagaaatccccgccttccggcaatgcgaaaccattcgcattgagatgtgccgcaagatcggctacaatgagacctccatgccaaatctggtgggtaacgaaatgcaaacggacgtggagtacacactgcaaacctttgcaccactgatcgaatacgactgcagttcccagttgaagctgttcctgtgcgccgcctacgtgcccatgtgcacgcccaaagctccagtccatgccatcggtccgtgccggagtctctgtgagtccgtgcgaatacgttgtcatccagttttgcagggattcggatttccatggccaccggctctcgactgcgataaatttccgcgagagaacaaccacgagacgatgtgtatggaaggtcccggtgaattgcatcagccgcagcaggagcaggatttgtatgggctaccgggccaaggaatacccggtggattgggcggtaaactgcccatggattgctcgggactggccaaatcgcatctgtacgtaaggctacccagatctggacgctgtgcaccactctgcgaggcggacatactgttcacaccggcggagaagcatctggcagagatctgggtctccacatgggcctatgccgctttgggtttggccctggtagccaccgtgtgtcttttggccagcgatggcagtcgtttggccagcgccaagtggtccagattgttgtcgccgctgatttggtgccacaacatggtcaccttgggctgggcagtgcgctttatggtgggaagaacgggaactgcgtgcggcacggatccccaggcgcccaatgaatccctactcaccgtggacggactgtccaatgcctcctgcgctagtgtcttccttatgcgctactattttggaatggccgcctgcgcttggtgggctgtgctctgtttgggctggcaccgcgacattcgtcggcacagtccggactccaagggccatgtggtcattccctcgaactttggaggcagtccggcgaagaggaacagtgccaagacggctcagcaggatctaacgcaaaacaactttgtgtgcttcgtggcctggggattgccggcctttcaaacgtcagcagtgatcgttgcccgtttcgtggatgctgacgagttgcttggcaatcagtcggataaggcgctacagatattggtggctacgcccgttttttgctactggatctttggctcgatgaatctgatctccggctatttggtacactgtcgcaccaaggagatcctgaggaatagcaatgcactcagcgtgcaacagcaactgcaacagctaagcgcacacagtagttccggcattggcatattccttttcatctatggacttgcatgtgccatgcttctgttggctgtcatttacgagtttgccaacatcgatgtctggctgggatcgggtgataccaatacgccactttggccatttttgttgcgcgccttcatggaactgatgctgggcatttgctgttttgcctgggtacttggaccaagcatttccactctctacaagaggcaagtcagcaatggcaaaatggtgaagcatacgtctgccggagcagcaactggacacctggacgggcatagtagctcgcgtggatcgcatgcggcttgcaatagcacggtggtctcctaccattcggtgcgaacttctatggccagtgttccgttgccgccaagtccgtacaaactgaagacttcgcctggtaccggctctatatcgctgaatcagatgtccaactattcgctgggcaggagcgtgcatcaccagcagcgccattcgccgcatcatcatcatcaccagcagcagcagcatcatcagttccatccccaccacaatcaccagcatcactccacatcctcgcatcggctgtattatccgccaggtagctatgcctcgcaaaagtacagccagcacggcagctactatccccacttgcagcagtatggcaatgagacgctactctag

SEQ ID NO: 4719 - protein, 700 aa, DROSOPHILA
MKPTCILCLLVVILLHPRISKSSTSGNPSASSSSSSPPEIPAFRQCETIRIEMCRKIGYNETSMPNLVGNEMQTDVEYTLQTFAPLIEYDCSSQLKLFLCAAYVPMCTPKAPVHAIGPCRSLCESVRIRCHPVLQGFGFPWPPALDCDKFPRENNHETMCMEGPGELHQPQQEQDLYGLPGQGIPGGLGGKLPMDCSGLAKSHLYVRLPRSGRCAPLCEADILFTPAEKHLAEIWVSTWAYAALGLALVATVCLLASDGSRLASAKWSRLLSPLIWCHNMVTLGWAVRFMVGRTGTACGTDPQAPNESLLTVDGLSNASCASVFLMRYYFGMAACAWWAVLCLGWHRDIRRHSPDSKGHVVIPSNFGGSPAKRNSAKTAQQDLTQNNFVCFVAWGLPAFQTSAVIVARFVDADELLGNQSDKALQILVATPVFCYWIFGSMNLISGYLVHCRTKEILRNSNALSVQQQLQQLSAHSSSGIGIFLFIYGLACAMLLLAVIYEFANIDVWLGSGDTNTPLWPFLLRAFMELMLGICCFAWVLGPSISTLYKRQVSNGKMVKHTSAGAATGHLDGHSSSRGSHAACNSTVVSYHSVRTSMASVPLPPSPYKLKTSPGTGSISLNQMSNYSLGRSVHHQQRHSPHHHHHQQQQHHQFHPHHNHQHHSTSSHRLYYPPGSYASQKYSQHGSYYPHLQQYGNETLL

SEQ ID NO: 4720 - DNA, 13525 bp, DROSOPHILA
ccctggtatccgagatcgtcggtgggattaccaacaagtgccgccaaataatcaagcgctcccgcaagtcggccgcctcctcttggtcgtcggcgtcaagtgggtcaatgcttcgcactaatgccgagcaactttcccatgataagcgaaaggccaatagacgcgaggctgctgaggttgctcaaaaaatgagttttggaatgcgcgagttaaatcttacccgcgcaacgcttcgggaaatatacggaagctacggggcacctgaaacagatcatggtcagctagacatcgtccacactgagtttccaaacagttctgcaaaattaaataatattgaagacgaagaatctcgggaagctcttgaatctctgcagcgtttagacgaatttatggaccagatggataacgacggcaatccttcctcacatacattccgtattgacaattaatcacagaaatttttaaatgcaaatacaaaataatcactttagtgcacatgaaattatatgtattgaaataaaaagtttgatgcaacaacaaattttacagttgtttggtattttgtatgggaaagtttgtggcaatatatggttttacttgaaagcggattggacatggtcacactgcccacaaatcacaacattgcgttataaatgaagcacatctagttttgtgttaagaaagtggttcacaatttatatagcaggttatggtaaaacatcgatcgttccgaaaaattccgctcgttggcacattttctaaatttttcgtgcgacagcggtgattattatatgatattattatgattatatatacaaaaattattataattatataaaagttggcgaccatatcaaaaaggttgctataaaaacaaatggcaatttatagcggagtttcactcccaaagcgatgttctccacccattccagtcagtcatggtaaatataccttctaaaaaatatatgattttttcgatagagatacacgggcacactagacccaccgatcgcgactttgtgtgtgttaaaatgacgcgcatatcgttttgggctaataatattgttcacgttttataaaacagatacacggttaagctctgaccggtcgtattattatctgtgtgttcttggttgacacgtttatttcatttattctcatttaaagcaacgatgtgaagaacagtgcgggcgtttctcaacataagaatacatacaaacttatgcgtgatggtgagcaaataaaatagttcaaaaaattactcggccaccgccttaaccgtacaaacggaaatacataaaggtaaagggctcaacaacagtattactgattaggcaattgatttatatttcaaacttcttaaataaagtgtccacaaatatgtatgttcttagcatagaggcgtagtcggtgagtcagccacgccaacagttaacagtcgtcattttgctgtctgtctaacacgcaatttgtgtgtgtatatgtgaataaacagataccggtatgcaatcgcaaagctggtcaactgtaaagatcggtatgtactcaaaattaggtcatcaccttgttatgcagatacatttgggaaacagttgacttacttggtattggttatcagccgaaaagcaaatggtgatacggttttgcacctcagcttactcacggatacatacctacgtacataaatgtatgtatacggtatacagtcttagaaaaaatattagtaccgaccagctagcgtttgcctaaaacgcttttacaaaaataaacgtatatgttttaagttgttttttgtcataattaatacatttattattatttatttatgaatttcagagctttaatagtaactaaattgtttaaacaaacttaaaaaaagatttacaaataaaaaaatatttcgtgtgcgtgacggaattgctagttcattaaagggaggtcatatgtacatacatacacattgcaaagagtacagatcgctcatcatttcatttttcctaatgtacatatacatatgtacaaacatgtttattaaactgcctacatgcaaatctttgaagttttaagaaaataagcacaactagtttggaaaatcttgggagccaagatctatctgtccactgattttcctatgacttcaagaatgtaaaaccctttttgttaaacaaattttgattaaagtataccagaataatattaaacgtatcgtccgtatctataaaaggtattaatagtattacctaaatttaaattctcggttttattcataagagtgaaaaaatatacaagttcctttttaattttttacttattgaaaatttgattaatttttattattattttcagtttagaataaattcggccacaattaatatacttatttattcatcaaaaccaaaccaccacaagagcataaccaatcatgttaaagtttatcagaggaaaagggcagcagcccagtgctgacagacaacgctacatcgtaaggtaaaacaaacaattttctctttccgttctatttttttttttttaagtatttgtagccgattggtatattttgtggggtcatttattttgatcttgggtggtaaatacatttttatggaagttagaagaaagcttataatttatgaggaataaataaatacctccttttgaatcttttgttatgtcttctcctatgtgcatacttttgggcattaacatttaggtaaattttttccaccgcaactacaagtaaaccgcatacacacacagtattttgtagactcgcgccacaaagcaccgcataaaaaaggttacggtgcttttttgctcgtttcttttgtgcactccttctatgcggtgccaaatatgaggaggtacctgaagcttggttgattttgtgagtgtctttttccacagcatatttttgtgtattggctactttaaaaattctattatatcgttgtgctcgtaatgttgtccattccttttaaatattttcgaattaaatataccatagatgtttccctattaccataatagtttaataaatatacgtatatgaaattttttttatcctatgttagtataaacatgttattcaacaaataaaagtaggtcagaggtaatcgccatccagctccagaaagaggggggagctgataagattgcgtttatgtacctaatgggttgggtaagtggcttggtttcacaaacacccttatttcaggtacaaaataagtatgtcatagacggcgtaaaattgataagattttaaagtcaaaagaaaatgagtttattcgcctgtaactgcgttagaaatccaaatacacccgcaatattatatgtatagaaagaaaaagtttgatgcaacaacaaatttaaagttgtttggtattttgtaatggaaagtttgtgtcactaaatatggttttacttgaacgcagattggacatggtcacactgcccacaaaatcacgacattgcgttataaatgaagcacatctagttttgtgttgaaaatgtggttcacaatttatatagcaggttatggtaaaacatcgatcgttccgaaaaattccgctcgttggcacatttcctaaatttttcgtgcgacagcggtgattaattacaaaaattattattataattatataaaagttggcgaccatatcaaaaaggttgctataaaaacaaatgacaatttatagcggagtttcactcccaaagcgatgttctccacccattccagtcagtcatggaaaatataccttctaaaaaatatatgattttttcgatagagatacacgggcacactagacccaccgatcgcgactttgtgtgtgttaaaatgacgcgcatatcgttttgggctaataatattgttcacgttttataaaacagatacacggttaagctctgaccggtcgtattattatctgtgtgttcttggttgacacgtttatttcatttattctcatttaaagcaacgatgtgaagaacagtgcgggcgtttctcaacataagaatacatacaaacttatgcgtgatggtgagcaaataaaatagttcaaaaaattactcggccaccgccttaaccgtacaaacggaaatacataaaggtaaagggctcaacaacagtattactgattaggcaattgatttatatttcaaacttcttaaataaagtgtccacaaatatgtatgttcttagcatagaggcgtagtcggtgagtcagccacgccaacagttaacagtcgtcattttgctgtctgtctaacacgcaatttgtgtgtgtatatgtgaataaacagataccggtatgcaatcgcaaagctggtcaactgtaaagatcggtatgtactcaaaattaggtcatcaccttgttatgcagatacatttgggaaacagttgacttacttggtattggttatcagccgaaaagcaaatggtgatacggttttgcacctcagcttactcacggatacatacctacgtacataaatgtatgtatacggtatacagtcttagaaaaaatattagtaccgaccagctagcgtttgcctaaaacgcttttacaaaaataaacgtatatgttttaagttgttttttgtcataattaatacatttattattatttatttatgaatttcagagctttaatagtaactaaattgtttaaacaaacttaaaaaaagatttccaaataaaaaaatatttcgtgtgcgtgacggaattgctagttcattaaagggaggtacatatgtacatacatacacattgcaaagagtacagatcgctcatcttgcatctcatttttcctaatgtacatatacatatgtacaaacatgtttattaaactgcctacatgcaaatctttgaagttttaagaaaataagcacaactagtttggaaaatcttgggagccaagatctatctgtccactgaatttcctatgaccaagaatgtaaaaccctttttgttaaacaaattttgattaaagtataccagaataatattaaacgtatcgtccgtatctataaaaggtattaatagtattacctaaatttaatttctcggttttattcataagagtgaaaaaatatacaagttcctttttaattttttacttattgaaaatgtgattaatttttatttattattttcagtttagaataaatacggccacaattagtatacatatttattcatcgaaaccaacccaccacaagagcataaccaattatgttaaagtttatcagaggaaaagggcagcagcccagtgctgacagacaccgcctacagaaggacctttttgcttatcgtaaggtacaacaaacaattttctctttccattctattttattttttttttttcgtatatgtagccgattggtatattttgtggggtgtcatttattttgatcctgggtggtaaatacatttttatggaagttagaagaaagcttataatttattaagaataaataaatacctccttttcaatcttttgttatgtcttctcctatgtgcatacttttgggcattaacatttaggtaaattttttccaccgcaactacaagtaaaccgcatacacacacagtattttgtagactcgcgccacaaagcaccgcataaaaaaggttacggtgcttttttgctcgtttcttttgtgcactccttctatgcggtgccaaatatgaggaggtacctgaagctttgttgattttgtgagtgtctttttccaccgcctgtttttggctactttaaaaattctattatatcgttgtgctcgtaatgttgtccattccttttaaatattttcgaattaaatataccatagatgtttccctattaccataatagtttaataaatatacgtatatgaaattttataagaattttttttatcccatgttagtataaacatgttattaaacaaataaaagtaggtcagaggtaatcgccatccagctccagaaagaggggggagctgataagattgcttttatgtgcttaatgggttgggtaaatggcttggtttcacaaacacccttatttcaggcacaaaataagtatgtcatagacggcgtaaaattgataagattttaaagtcaaaagaaaaagaatttattcgcctgtaactgcgttagaaatccaaatacacctgcaatatgaatcaaacaaaatcaactcataacgagatctgatagcaacttcttaaaactttttttgtataaaaatacaatttatacaattagataagatttaccaaaccttttttcgatcaatgtaaatatagtatgatagtagggactgctgtctacagtgatgtttataagagacatacttaagagcagcatttaaagctttgggcgctttttgaacttaatttaaattcaaacctcaatatttattgaggtttttattcccgttaattgtaaagaaaaatgctgtattagattcggtaaaagtatgtaaatggtttaagaaagcgttcccgactctataaagtggcaagtaatctgacgatttaccagatcttgggaactgaaaaaactagaatgttttggaaaacccttttacaattaagaaatgaaccaaacaattttgaattattaagaatctgtaattgctttttgaaactttttaatatttttttcttttagacggcacagcatggctttcctcataagccttcggctcttgcgtatgatccagttttgaaacttatggcaatagggacgcaaacaggggctttaaaagttttcggtcaacccggagttgaattgtacggtcagcatactttgttaaacaattcagcatcggagcttaatgtacaattacttgaatgggtgtatggaactggtcgcatactttcgttgacggcagcgaatcaattaattctatgggagccagttggagcaacgttgctgccaatcaaaacactaccgtttgacggcaaacttaaaaaagtttcatcgctgtgctgttctctcagtaaggatctgctatggattggaacagaaggtggaaacatctatcaactggatttacatacatttaccattaaggagcctgtaatttaccatgacgttgtgctagagcaggtgccaccagcctacaagctaaatcctggtgcaattgagtcaatccgccaacttccaaactcccctagcaaacttctagttgcatacaatcgcggcctttgtgttttgtgggattttgaaagcgcatctgtccagcgagcatacatagcccctggacatggacagagcgttggtcttacagtgaacttcgaaggatctgaatttacctggtaccacgctgatggttcatacgccacttggagcatagataacccagaaccgccgtcgaatgttaattatgtgccttatggacctgatccatgcaaaagcataaatcgactgtacaaaggcaagcgaaggttaatataacttaaacacaaagttttttagatgtgtactaatttctcgttcttttagatccaacgatgtaattgttttttccggcggcatgccacggtcagcatatggtgatcacaattgtgtgtccgttcacgccagcgatggacacaaagtgtgtcttgactttacgtctaaagtgattgacttttttgtgacctttgaaaataatagagatgtcgctgaagttcttgttgtactacttgaagaggaactctgcgcttacgatcttactgaccctaatatttgtgctatcaaagcgccatatcttcactctgtccatgcatcagctgtcacttgcaattaccttgcttctgaagtcgtacagtcggtatatgaaagtattttaagagctggagatgaacaagacattgactatagcaatattagctggcctatcactggcggtactctcccggataacttagaagaatctgtagaagaggacgcgactaagctttatgagattttgttaactggtcacgaagatggttctgttaaattttgggactgcactggagtgttgcttaaaccaatttataattttaaaactagcagcatttttggaagtgagtcagacttccgagatgacgcagctgcagatatgagtgcggaacaagtcgatgaaggagaaccgccatttcggaaatcaggactttttgatccttattcagatgaccctcgtttagcagtgaagaaaatagcattctgcccaaaaaccggacaacttattgttggtggcacagcgggccaaatagttatagccgacttcatagacttacccgaaaaagtgtctttaaaatacatttcaatgaatttggtcagcgatcgtgatggatttgtgtggaagggtcacgatcagttaaacgtgcgatcgaacttattagacggagaagcaattcctacgacggaacgtggtgtaaatatatcgggagtactgcaagttttgccgccagccagcataacatgcatggcactcgaagcaagctggggcctagtatctggtgggactgcgcacggcttagttctctttgacttcaaaaactttgttccagtatttcatcgctgcactttaaacccaaatgatcttactggagcaggagagcagctgtctcgtcgaaagtcttttaagaaatcattgagggagtcatttagaaagcttcgcaagggtcgatcgaccaggaccaaccagagcaatcaagtaccaacaacggttagtaagataatatatactcaactagtcttttatattaaattcacaatcctacagctggaagcaagacccgtcgagaggcaaatagaggctcgttgtgcagatgacgggctaggatccatggtgcgatgtttactatttgccaaaacttatgttactaatggtaatcaacattttgtactgttattagttttgatgtaacgataaaaaaaaaaaaaggtaacggaaatagtctctgaaccacggcctcgcgagaattgaacccaaaagctaaaaacatacagtgcttttcattttgggacgcccagagctttaattatatttttgtgcaacaaatttttatgcattggatatattgatcaaagttttaaaggtatatgtatttatgatcagtttaaacagccgactacatttgactatgtccgtccttagaaagaaattcagtcattacaatattccttgctagtctatcgatatgctataagtgttaaaagtgcttttgcatttactctggtttgacaatatattttattgatattgatttcgtttcatttactagttggaaaacagttcttaaactaattaaatcatagtctttttgttttcgcgatttcgatctatatggcaaattttgtttttaaaatttcacctatcctcctactatttctgtaatgggtaactcgactgtagcgtctattcttttggtgttctgtatatgtacatctaatttgttgtataatttttacattttcagtcaacataacgtcgccaactttgtggtcagcaacaaatgccagtacagtctcggttttccttctgcatttgccaccagcgcagaccgcggcaactgccgtcccgtcggcaagtggcaatgcaccaccacacatgccccgccgaatttctgcgcagcttgctaaagaaatacaattaaaacatcgtgctcctgtggtgggtatttctatttttgatcaggcgggtagccctgtcgatcagctgaacgccggtgaaaacgggagtccaccgcatcgtgtacttattgcttccgaggaacagttcaaggtgttttcacttccgcaactaaagccgattaacaaatataagcttaccgctaacgaaggtgctcggattcgccgcatccattttggttcgtttagttgtcgcatatccccggaaacactgcagagtatgcacggttgtagcccaactaagtccacgcgttcacatggcgatggagaggcggatcctaatatcagtggaagcttggctgtaagtcgtggagatgtatataacgaaacagcattgatatgtttaacgaatatgggcgatatcatggttttatcagtacctgaattaaaaagacagctgaatgccgcagcagtgcgacgggaagacattaagtaagtcacgcatagtgctattattttaattttttggacctaatactgtattttaacttttcagtggagtttcgtcactttgctttacaaactctggagaagcactgtatatgatgtcttcttctgaactgcagcgtattgctttagccacgtccagagtcgtgcaacccactggcgttgttccagtagaaccattagaaaatgaagagtctgtgttggaagaaaatgatgcagagaataataaggaaacctacgcatgtgatgaagttgtgaatacatatgaaattaaaaatccatcaggcatttcaatatgcacaaggcctgcagaggaaaacgttggaagaaatagtgttcagcaagttaatggagtcaacatttcaaattcacctaatcaagctaacgagactatcagcagctctattggcgatattaccgttgactcggtgcgcgaccatttaaatatgacgaccaccactttgtgttctattaatacagaggaaaccattggtgagtaatcatttatttactaacattattccacctattttaatttgctgttttgtacgtatctacatttaaatgttttcgtttcgacattagttactttcggcaacataattcttataaaaatttactttttaaaaacttgattttaagtatacgcaccaaacaactttaaatatatacttttatcttattttaaaagcacgggcccacattatatctgtacataactttttttttctgtcatctctatgaaaatgtaggtcgcctatctgtacttagcacgcaaaccaacaaagccagtactaccgtaaacatgagtgaaattccaaatattaatatttctaatttagaggacttggaatcgaaaaggtgtgcttctacaagaaacattgacataagctttaacctactaattttttttttttacctaacagaaatacgacggaaacgagtactagttctgttgtaattaaatctataattacaaacatttctcatgaaaaaacgaacggagacaacaaaataggaacgccaaaaacagcgcctgaagaaagccaattttaacattgacagaagccgtaacctactaattattttatacctttacagaaatacgacgcaaacgagtactagtcctgatgtaatttaatctataattacaaacatgtctcactaaaaatcgaacggggacagcaaaataggaacgcaaaaaaattaaattaaattaaacgcgatttacatacaaacagaaatgacagaatgataatataaaatattcattttttatttggcttaagcgatgttgttgttccaaaaccatataattatttatgattttatgtaatgttttcatgtattttcgcgtagtgactttataccctttacccgtatgatgaaacgaaacatgatatttgtagaaaggtacaaaggataaaagttgacatttaaggccgattgtaaaatattaaaacgcaacctggataacatgccgattaattacttctgttcgtccgtataaacacaaataccgataaattggtccgtccccatttaataaattgtatattaaaatggtctttattttggataaataattcaaattatataggaacatttgggttttaagggatagaaacagcgctggtgtctttcatttccgttcgtatgaccgttcaaagattataaaaaaattgtcgtgcccacattttttaaatttcttttattttcggttaaaatattgtgatacaaaaaaatgcccttacaaaattaggacaacaacaatttgctttattatgatgaacaaattaggagtacaaaaaatagcctgatgcaaggatggggagaaaaaagaccttgaagttcaaaagaatttgttgtatcaaatcctcaataagaaaactacttaaaattaaaagcgtgtttcaaattaattgtagaatatttcgtaaaatgaaattgcaaacttttttagcacgaaattacatgtatttaattctttggctaatacgtcagttaaaaaaggctacattttgatgatactcacaaatgtaatttttgcattctacacaggtgcaattaaaaaattatggtttttatgagttttagagggaagaaaatatgtcaatatgagaagtaagttaatgagccttcaagtactttagtacataatgtaatttaattttagaaatcctacggctttatattcaattgtaaagtattttaaaattcctgacgatttgtagtaattgttttgttcttagcttttttgcattctcctccgttactccgttactcgtatagtaaaaggtatagtatatacaatagtattgtagattcgttgagaagtatgttacaggcagaaggaagcttttccgaccatataaagtatataattgagtatttagcttaggattattaataaaacatgtattttatttaacaaactggctttacaatattttgtggaagaacaccgatctatttagttgtaggtctcaaactgaaaactcctaattttgacttatttaaagatcatacctcggttttgagccttagaggtttgtatgagtgattttctagaatgatctttgtacttcgttacaataaattgttttcttctactctaatatagttggaatcgagtaatccctagataagagttaggcttaaaatagtaaattacaaatattgaattggacattacaattgcatattctcagcttgctgtattgtaaaaattaattattaactcgaagagattcggcaattaatacgtccctattcgcattgtttttacttggggaaattttattgaaaaactagattctctgttacaatcagatatgagaacaagttattgcaccagcacatctctcggccagctcaattcaattaaatagctaagcacttgttgcgaattcatgcttggagtgtttacgtaagatttgtaaaaataactaaactggattctccacattcttgcgtagctgtgtgattctactgtcacaactctccgtcgacgatttctagagccatcttcttgcggaagtacaacatttccgactgggtaaaggtaattggcacatcacacgttatatactcggcgaacatgcagctgaagataccgcaatcgctgccatctaactgtcgtggtatattctgcacgctctcaataacaaaatcgctggtatcaaactgctttttgggcttgaatattgactcttcgcgtagatatttctctagagcgtccagcactggtcggtttggctttccctttgagtcataataccggattgtcttgttccgcaagtgtatgatggccatgcaccagtggacgccgttgcagtgcactggtaccgggattatgtccttgctgaacaagtccactttgcgagtccagcgcttaatgcctgcatgcccagcttgcaggaggcgggg

SEQ ID NO: 4721 - DNA, 5237 bp, DROSOPHILA
acccaccgatcgcgactttgtgtgtgttaaaatgacgcgcatatcgttttgggctaataatattgttcacgttttataaaacagatacacggttaagctctgaccggtcgtattattatctgtgtgttcttggttgacacgtttatttcatttattctcatttaaagcaacgatgtgaagaacagtgcgggcgtttctcaacataagaatacatacaaacttatgcgtgatggtgagcaaataaaatagttcaaaaaattactcggccaccgccttaaccgtacaaacggaaatacataaagtttagaataaatacggccacaattagtatacatatttattcatcgaaaccaacccaccacaagagcataaccaattatgttaaagtttatcagaggaaaagggcagcagcccagtgctgacagacaccgcctacagaaggacctttttgcttatcgtaagacggcacagcatggctttcctcataagccttcggctcttgcgtatgatccagttttgaaacttatggcaatagggacgcaaacaggggctttaaaagttttcggtcaacccggagttgaattgtacggtcagcatactttgttaaacaattcagcatcggagcttaatgtacaattacttgaatgggtgtatggaactggtcgcatactttcgttgacggcagcgaatcaattaattctatgggagccagttggagcaacgttgctgccaatcaaaacactaccgtttgacggcaaacttaaaaaagtttcatcgctgtgctgttctctcagtaaggatctgctatggattggaacagaaggtggaaacatctatcaactggatttacatacatttaccattaaggagcctgtaatttaccatgacgttgtgctagagcaggtgccaccagcctacaagctaaatcctggtgcaattgagtcaatccgccaacttccaaactcccctagcaaacttctagttgcatacaatcgcggcctttgtgttttgtgggattttgaaagcgcatctgtccagcgagcatacatagcccctggacatggacagagcgttggtcttacagtgaacttcgaaggatctgaatttacctggtaccacgctgatggttcatacgccacttggagcatagataacccagaaccgccgtcgaatgttaattatgtgccttatggacctgatccatgcaaaagcataaatcgactgtacaaaggcaagcgaagatccaacgatgtaattgttttttccggcggcatgccacggtcagcatatggtgatcacaattgtgtgtccgttcacgccagcgatggacacaaagtgtgtcttgactttacgtctaaagtgattgacttttttgtgacctttgaaaataatagagatgtcgctgaagttcttgttgtactacttgaagaggaactctgcgcttacgatcttactgaccctaatatttgtgctatcaaagcgccatatcttcactctgtccatgcatcagctgtcacttgcaattaccttgcttctgaagtcgtacagtcggtatatgaaagtattttaagagctggagatgaacaagacattgactatagcaatattagctggcctatcactggcggtactctcccggataacttagaagaatctgtagaagaggacgcgactaagctttatgagattttgttaactggtcacgaagatggttctgttaaattttgggactgcactggagtgttgcttaaaccaatttataattttaaaactagcagcatttttggaagtgagtcagacttccgagatgacgcagctgcagatatgagtgcggaacaagtcgatgaaggagaaccgccatttcggaaatcaggactttttgatccttattcagatgaccctcgtttagcagtgaagaaaatagcattctgcccaaaaaccggacaacttattgttggtggcacagcgggccaaatagttatagccgacttcatagacttacccgaaaaagtgtctttaaaatacatttcaatgaatttggtcagcgatcgtgatggatttgtgtggaagggtcacgatcagttaaacgtgcgatcgaacttattagacggagaagcaattcctacgacggaacgtggtgtaaatatatcgggagtactgcaagttttgccgccagccagcataacatgcatggcactcgaagcaagctggggcctagtatctggtgggactgcgcacggcttagttctctttgacttcaaaaactttgttccagtatttcatcgctgcactttaaacccaaatgatcttactggagcaggagagcagctgtctcgtcgaaagtcttttaagaaatcattgagggagtcatttagaaagcttcgcaagggtcgatcgaccaggaccaaccagagcaatcaagtaccaacaacgctggaagcaagacccgtcgagaggcaaatagaggctcgttgtgcagatgacgggctaggatccatggtgcgatgtttactatttgccaaaacttatgttactaatgtcaacataacgtcgccaactttgtggtcagcaacaaatgccagtacagtctcggttttccttctgcatttgccaccagcgcagaccgcggcaactgccgtcccgtcggcaagtggcaatgcaccaccacacatgccccgccgaatttctgcgcagcttgctaaagaaatacaattaaaacatcgtgctcctgtggtgggtatttctatttttgatcaggcgggtagccctgtcgatcagctgaacgccggtgaaaacgggagtccaccgcatcgtgtacttattgcttccgaggaacagttcaaggtgttttcacttccgcaactaaagccgattaacaaatataagcttaccgctaacgaaggtgctcggattcgccgcatccattttggttcgtttagttgtcgcatatccccggaaacactgcagagtatgcacggttgtagcccaactaagtccacgcgttcacatggcgatggagaggcggatcctaatatcagtggaagcttggctgtaagtcgtggagatgtatataacgaaacagcattgatatgtttaacgaatatgggcgatatcatggttttatcagtacctgaattaaaaagacagctgaatgccgcagcagtgcgacgggaagacattaatggagtttcgtcactttgctttacaaactctggagaagcactgtatatgatgtcttcttctgaactgcagcgtattgctttagccacgtccagagtcgtgcaacccactggcgttgttccagtagaaccattagaaaatgaagagtctgtgttggaagaaaatgatgcagagaataataaggaaacctacgcatgtgatgaagttgtgaatacatatgaaattaaaaatccatcaggcatttcaatatgcacaaggcctgcagaggaaaacgttggaagaaatagtgttcagcaagttaatggagtcaacatttcaaattcacctaatcaagctaacgagactatcagcagctctattggcgatattaccgttgactcggtgcgcgaccatttaaatatgacgaccaccactttgtgttctattaatacagaggaaaccattggtcgcctatctgtacttagcacgcaaaccaacaaagccagtactaccgtaaacatgagtgaaattccaaatattaatatttctaatttagaggacttggaatcgaaaagaaatacgacggaaacgagtactagttctgttgtaattaaatctataattacaaacatttctcatgaaaaaacgaacggagacaacaaaataggaacgccaaaaacagcgcctgaagaaagccaattttaacattgacagaagccgtaacctactaattattttatacctttacagaaatacgacgcaaacgagtactagtcctgatgtaatttaatctataattacaaacatgtctcactaaaaatcgaacggggacagcaaaataggaacgcaaaaaaattaaattaaattaaacgcgatttacatacaaacagaaatgacagaatgataatataaaatattcattttttatttggcttaagcgatgttgttgttccaaaaccatataattatttatgattttatgtaatgttttcatgtattttcgcgtagtgactttataccctttacccgtatgatgaaacgaaacatgatatttgtagaaaggtacaaaggataaaagttgacatttaaggccgattgtaaaatattaaaacgcaacctggataacatgccgattaattacttctgttcgtccgtataaacacaaataccgataaattggtccgtccccatttaataaattgtatattaaaatggtctttattttggataaataattcaaattatataggaacatttgggttttaagggatagaaacagcgctggtgtctttcatttccgttcgtatgaccgttcaaagattataaaaaaattgtcgtgcccacattttttaaatttcttttattttcggttaaaatattgtgatacaaaaaaatgcccttacaaaattaggacaacaacaatttgctttattatgatgaacaaattaggagtacaaaaaatagcctgatgcaaggatggggagaaaaaagaccttgaagttcaaaagaatttgttgtatcaaatcctcaataagaaaactacttaaaattaaaagcgtgtttcaaattaattgtagaatatttcgtaaaatgaaattgcaaacttttttagcacgaaattacatgtatttaattctttggctaatacgtcagttaaaaaaggctacattttgatgatactcacaaatgtaatttttgcattctacacaggtgcaattaaaaaattatggtttttatgagttttagagggaagaaaatatgtcaatatgagaagtaagttaatgagccttcaagtactttagtacataatgtaatttaattttagaaatcctacggctttatattcaattgtaaagtattttaaaattcctgacgatttgtagtaattgttttgttcttagcttttttgcattctcctccgttactccgttactcgtatagtaaaaggtatagtatatacaatagtattgtagattcgttgagaagtatgttacaggcagaaggaagcttttccgaccatataaagtatataattgagtatttagcttaggattattaataaaacatgtattttattt

SEQ ID NO: 4722 - protein, 1161 aa, DROSOPHILA
MLKFIRGKGQQPSADRHRLQKDLFAYRKTAQHGFPHKPSALAYDPVLKLMAIGTQTGALKVFGQPGVELYGQHTLLNNSASELNVQLLEWVYGTGRILSLTAANQLILWEPVGATLLPIKTLPFDGKLKKVSSLCCSLSKDLLWIGTEGGNIYQLDLHTFTIKEPVIYHDVVLEQVPPAYKLNPGAIESIRQLPNSPSKLLVAYNRGLCVLWDFESASVQRAYIAPGHGQSVGLTVNFEGSEFTWYHADGSYATWSIDNPEPPSNVNYVPYGPDPCKSINRLYKGKRRSNDVIVFSGGMPRSAYGDHNCVSVHASDGHKVCLDFTSKVIDFFVTFENNRDVAEVLVVLLEEELCAYDLTDPNICAIKAPYLHSVHASAVTCNYLASEVVQSVYESILRAGDEQDIDYSNISWPITGGTLPDNLEESVEEDATKLYEILLTGHEDGSVKFWDCTGVLLKPIYNFKTSSIFGSESDFRDDAAADMSAEQVDEGEPPFRKSGLFDPYSDDPRLAVKKIAFCPKTGQLIVGGTAGQIVIADFIDLPEKVSLKYISMNLVSDRDGFVWKGHDQLNVRSNLLDGEAIPTTERGVNISGVLQVLPPASITCMALEASWGLVSGGTAHGLVLFDFKNFVPVFHRCTLNPNDLTGAGEQLSRRKSFKKSLRESFRKLRKGRSTRTNQSNQVPTTLEARPVERQIEARCADDGLGSMVRCLLFAKTYVTNVNITSPTLWSATNASTVSVFLLHLPPAQTAATAVPSASGNAPPHMPRRISAQLAKEIQLKHRAPVVGISIFDQAGSPVDQLNAGENGSPPHRVLIASEEQFKVFSLPQLKPINKYKLTANEGARIRRIHFGSFSCRISPETLQSMHGCSPTKSTRSHGDGEADPNISGSLAVSRGDVYNETALICLTNMGDIMVLSVPELKRQLNAAAVRREDINGVSSLCFTNSGEALYMMSSSELQRIALATSRVVQPTGVVPVEPLENEESVLEENDAENNKETYACDEVVNTYEIKNPSGISICTRPAEENVGRNSVQQVNGVNISNSPNQANETISSSIGDITVDSVRDHLNMTTTTLCSINTEETIGRLSVLSTQTNKASTTVNMSEIPNINISNLEDLESKRNTTETSTSSVVIKSIITNISHEKTNGDNKIGTPKTAPEESQF

SEQ ID NO: 4723 - DNA, 6007 bp, DROSOPHILA
tgtattttatttgcaccctcaaataaacgggttctaatacaattttttaaaagtttctaagatagatgcgttacatttaatacaattggttcatcaaataagcgtttgcactttaatcactggttaaggtccacacctttcccatttacctgaatggtaatttggtcagtgtgtacgctgtcatctggctctctctcccgatgcaactgtcgatgtgccgcagacgttgctcctctcctgggaagtgagcgcaaggatatttcgtcgctctcgcgcctcatgaatcgtctccgagtacgggcgaagtcaaaactttcacgctgccgttgccgtgactgggcatgggcggcgtctgtcaggtgcttcaaggcctgcgacgagttcgagcgctgcatctgggcgacttcgctatggagctgcggctgacctaggctagacaccagcacagagggctggcgttggcgaccaccaaagcatccagtcgagtagcgcccatccgctgatcgcgatcgccggtggcgagccgactctcgcgcactaagaagttgcttaatggagacagcatttgagtacatatctcgtcggtaattaaaatttgttcactttattacctgctgcatttcatcattgcgcatgctgcgcagtccctgttgctcctcgagcttgttgctcatcaggctcacccaatcacgagcttgtctaagcgatagggagctctgagatcgttcgggtatccgacacgggaacagcatttcgcgggctcccacaacacaaccgctgtcgaggacaaatactcgcggaaagtctactacaaagtcgcggcttcgattaagatccgcagattcgtcccgtgcctcaaccagtgccagtccctgcgggggatcaggctgatattccagaatactttcctcgcttcctaaaaactgtaaaataaaaagccatctaggtttggttcggctccaagacataaagagcgtttctatgttgaaaagcggcgtatttaggtaaattctcaaaattcaatatgtttattggggttgttctttaatatgttggaggtgtctagcacagcatggtcttgtttcaaagttggtgataaagcaaataacaaattcaagaaactactcgggatttcttcataaactcaaaacgtataaaacgttataaaacgactattaataattatatatgatatataaaatgtatgatctaaactaagttataaatggaatataaataatttatgtatgagctataaaaacaattgaaaaataaatgcaatcaaacgaattaagcaataataatgtaagtacataaaaatgtttcaatttttatttaatataaaaaactaaaagcaaatactttggcacctgtgatattacagcagtcattgattcacaatatgcgctggctgcgatttgtgtagccgtctatgggtgactagcaacacagtcggtgatcttgctatatttattgcatttaccattaccttttctacagctttaagatatagtcactgtttataattgtattggtattaaatttcagtgtattgaatttaagggttcatactcggaagtaatttcctttgcatacttttatcgacaattgttagtcttatagaacataatcatatgcttaaaccctatgcgatttaagtgtattcatgattccgctttcaagttaaacttccaacggtattttatattgttgcttaaatacatgtaaatgtgtgtggggctttaaaaaattaaaatggaagtctttgtatcagcttttttaagtacactgctcttaaatgagtttatttacacatgagtgaatgtatccataagatttttcgttactcttataattttttatcataacttataattaagtaaaacgaggaatacgttaaacttcagtcaactgcttgaacttgctacactacgtccatttgtaagggcattgaaaaatataggctgcacattcgcataacctgtgaacctaatctgtaccaaaatgcatattgactacttacagacttacatttcaaaataataaaaaatacaattaggctgaatataacattggactcaacggacgggtttgcgccagtttaactatacaaattccgatgcaagggtcttactaaaggaatatgaatattggtctggtggtatagctgactattgaatacacgagtttttatgtacagagtaggctgtactttgtacctaagccttgttcgtgggtagttgacgatattttagacgtcggtcacctgatgactggcagttatagcgtgcggcattgtggcgggagcggagttacgtctgccgcgctccgatgccgcctgctgcgggtgtggttgatacgttagtggcgctagctgctgctggacactactgctaggactacgactactctgaaaatagtgactaggagcgaaactactcatgttgctggcctggagcggctgcaaaggctgcggcccgtgcggcacggccaccacaatgacgggcacctcctctatggaggcgattggcgctgtatgctgtggactcggtgtttgatagatttggtcacccaccacatatccatagaacttcaggacgtcgagcttacacatgggacaggttcgatgctctataagccacggatctatgcagtttttatggaactcgtgcctaaaattaagaagttcaaaggtatttcttttgaaagcttgcagagctgcattcttacttgcacggcaatatccgtatggtgtccgtgggcttataggcttcgatgcatatagcacagcagtcgctatccaagtccttttcatcgctgaattttccggtttttgttggaatcttcatgatagcctttttggtaacagagcagagattgcgctacatcgggcaaggatgaattaaattatgtatttgattattaagtgaaggcttaccgattgttggtccttcgcctgcatgtaacggaacctctgaatatagtagaagatgagccaaaccagagaaataatcatcaaaacaataaatgaaatcgacacaaacagcactgatgttctaaaatataaatggaaaaacaggtaattatttaacttaagttcgttaagttcagaatataccaaaactaagactaaagcttataagtctttacaaatatccaaaacatattaagatccaaagactgcctgttcgaatgactagttttcaaactagaactagaactaattagaatattaaaattttgaaaatagaaaaaatacctgccttaccgacgtattgcggtaaagcagtttttcttggcctgcctgtagtaatggtttaggcagcactcatgaccaaggggacgtagctcagtggtagagcgctcgcttcgcatgtgagaagtcccgggttcaaaccccggcgtctccacatgaatcacctcttttttgttattgaacaaattattcacggcaagcgaccgcattggttttatttgcttgtttaacgtaaaacagttacattttgacgttacatgatgtaaaattttagaacaggctgcatgattgggcaaatggaatttaatgcactgaattaccggcgttcttttaagcagtcaagggtcaggatcaaatcagaaaccaaatatcagaagtatttaacgtaacagttacattacattttgacagtaccatttaactcagtcacagtttggggtattattatgcacacttttagaaaagatttcaagatttgattaacgaaataaaaagcaatcaggatccggatcaaaccaaaaaccaaatatcagaaatatgtaacgtaacagttacattaaattttgatttcacattttagaaaggctgcaagatttgacaaagggaatagaacgcactgcattactggtgttttattaagcagtcatgattcggatcaaatcagaaaccaaatatcagacgtgttatacggaaccgttacattacattttgatgttacattttagaacaggctgcaagatttgacaaatgaaattgaaacctgctttaccggcgttctattaagcagtttaagcgaaagtggttctgattctagttgataattggtcaccaggaagacgcaaggggacgtagctcagtggtagagcgctcgcttcgcatgtgagaagtcccgggttcaaaccccggcgtctccaacagagttgtcaattatttttttggactaagtttcaaatgttggttggatttaatcgtcctcagaaaaccaaatgcattgcaagtctaccgaagcaattgggaattggaaaggacttgaacaattgttttgtcaatttcgaatttgaacttttttggactaagtttcaagtgggaaatataacaattactctgataataatgcggttctatggggacgtagctcagtggtagagcgctcgcttcgcatgtgagaagtcccgggttcaaaccccggcgtctccatgttcaggagatattgttctttttttactttgaatgtgtaggggtgggactcacctatttaagctgctaatggtgcgaacacctcgtcttccctcgatgatcgaaatagttacattatagcccttatcaagagtcaaagacaggtcttgcccaatgttctgataagttataacggcggctatgtttcctgggaaaatagtgtacttttaatgagcaggctgatagtcggaatattatagctcaagctcacttgttttgcccttgatctgcatcttctccagctgcattacttgcttgtcgttataaataataacaccggcagcattttgctggtagacatgtttaactttttcctcaaaggtgcagcggccccgtcgcaccaatgcaatccatgtctcccctttatctggtatgggtgctcccaaggttcctcggatgtacggcgtgcacgcgtaatcgtcactaaagttgtccgtggcggtgatgtgaattaaccgtcccgttacgttcaacaccttgccctctccgtaacgggcctgttcttgggcgaattccatgttgcacagcatgttaccgtgctctacgtatgaccagttaagaaaggcgtagttatagacgtccacggcaatacgatcttccatgccggagaagctgtgagtgccgttgcctggtcgaaagtagcgctccaagtcctgatttgcgatggacatggccgccactaaggtagtggtcgttgcagggaaggtgagaggcgggagtcccccgaacagcaaaacaaggcaagccagtaggagcgttttccgtatatacatcacgtaggagtatagcagatgttttctattttaatcagactgtcgcattcgcttcttagcctatttattcgacaactgaaacgaaaatcaaattaagtttagctaaattattggaggcctgaagccatcgggcgatgggcgacacaatttattaaaaccataagtacggttagtatgaacagtcaattcagtcatttgtttaagtcaagactatttgctttatgttctacaaaaacaaacaaatttaattgtctttataacttacaaaaaaattcttaattgattggaaatttaaaaaattattttcccaaaaaaattggctataccaaataaaaacttaagttactaaacagacgcgtacacatttcgcgtactgacttccacttgctaagtaacaagtttatttttaagactattggtaaaacataattattcaaaatacctttcaacaaaatacatttatattaatagtaaaactggttaatttctataagcggatataaatactgccgatatgaatattaaacattctgttgattaattttcttagtaaaacgtgatttgcaaaaacgtgcctcggaccacaataataataatctaggaatattttcttgcttggtgcttgtgtccaaatacactagagtgtctgtattgtgtttatttaaaattgtgtttgttataacttgcaaaatcgaaggcgataaatgacaaaaatcttaaaaattaactgtcgaaatttatg

SEQ ID NO: 4724 - DNA, 2379 bp, DROSOPHILA
gaattcgcccaagaacaggcccgttacggagagggcaaggtgttgaacgtaacgggacggttaattcacatcaccgccacggacaactttagtgacgattacgcgtgcacgccgtacatccgaggaaccttgggagcacccataccagataaaggggagacatggattgcattggtgcgacggggccgctgcacctttgaggaaaaagttaaacatgtctaccagcaaaatgctgccggtgttattatttataacgacaagcaagtaatgcagctggagaagatgcagatcaagggcaaaacaagaaacatagccgccgttataacttatcagaacattgggcaagacctgtctttgactcttgataagggctataatgtaactatttcgatcatcgagggaagacgaggtgttcgcaccattagcagcttaaatagaacatcagtgctgtttgtgtcgatttcatttattgttttgatgattatttctctggtttggctcatcttctactatattcagaggttccgttacatgcaggcgaaggaccaacaatcgcgcaatctctgctctgttaccaaaaaggctatcatgaagattccaacaaaaaccggaaaattcagcgatgaaaaggacttggatagcgactgctgtgctatatgcatcgaagcctataagcccacggacaccatacggatattgccgtgcaagcacgagttccataaaaactgcatagatccgtggcttatagagcatcgaacctgtcccatgtgtaagctcgacgtcctgaagttctatggatatgtggtgggtgaccaaatctatcaaacaccgagtccacagcatacagcgccaatcgcctccatagaggaggtgcccgtcattgtggtggccgtgccgcacgggccgcagcctttgcagccgctccaggccagcaacatgagtagtttcgctcctagtcactattttcagagtagtcgtagtcctagcagtagtgtccagcagcagctagcgccactaacgtatcaaccacacccgcagcaggcggcatcggagcgcggcagacgtaactccgctcccgccacaatgccgcacgctataactgccagtcatcaggtgaccgacgtctaaaatatcgtcaactacccacgaacaaggcttaggtacaaagtacagcctactctgtacataaaaactcgtgtattcaatagtcagctataccaccagaccaatattcatattcctttagtaagacccttgcatcggaatttgtatagttaaactggcgcaaacccgtccgttgagtccaatgttatattcagcctaattgtattttttattattttgaaatgtaagtctgtaagtagtcaatatgcattttggtacagattaggttcacaggttatgcgaatgtgcagcctatatttttcaatgcccttacaaatggacgtagtgtagcaagttcaagcagttgactgaagtttaacgtattcctcgttttacttaattataagttatgataaaaaattataagagtaacgaaaaatcttatggatacattcactcatgtgtaaataaactcatttaagagcagtgtacttaaaaaagctgatacaaagacttccattttaattttttaaagccccacacacatttacatgtatttaagcaacaatataaaataccgttggaagtttaacttgaaagcggaatcatgaatacacttaaatcgcatagggtttaagcatatgattatgttctataagactaacaattgtcgataaaagtatgcaaaggaaattacttccgagtatgaacccttaaattcaatacactgaaatttaataccaatacaattataaacagtgactatatcttaaagctgtagaaaaggtaatggtaaatgcaataaatatagcaagatcaccgactgtgttgctagtcacccatagacggctacacaaatcgcagccagcgcatattgtgaatcaatgactgctgtaatatcacaggtgccaaagtatttgcttttagttttttatattaaataaaaattgaaacatttttatgtacttacattattattgcttaattcgtttgattgcatttatttttcaattgtttttatagctcatacataaattatttatattccatttataacttagtttagatcatacattttatatatcatatataattattaatagtcgttttataacgttttatacgttttgagtttatgaagaaatcccgagtagtttcttgaatttgttatttgctttatcaccaactttgaaacaagaccatgctgtgctagacacctccaacatattaaagaacaaccccaataaacatattgaattttgagaatttacctaa

SEQ ID NO: 4725 - protein, 286 aa, DROSOPHILA
MQLEKMQIKGKTRNIAAVITYQNIGQDLSLTLDKGYNVTISIIEGRRGVRTISSLNRTSVLFVSISFIVLMIISLVWLIFYYIQRFRYMQAKDQQSRNLCSVTKKAIMKIPTKTGKFSDEKDLDSDCCAICIEAYKPTDTIRILPCKHEFHKNCIDPWLIEHRTCPMCKLDVLKFYGYVVGDQIYQTPSPQHTAPIASIEEVPVIVVAVPHGPQPLQPLQASNMSSFAPSHYFQSSRSPSSSVQQQLAPLTYQPHPQQAASERGRRNSAPATMPHAITASHQVTDV

SEQ ID NO: 4726 - DNA, 3891 bp, DROSOPHILA
gctttagttttaaaaatgttccgtaatcccacactcgcaaatgcacatacttttgaatggtatctgctgaatttgcaacacgttatgatttttattaaggtgttttttttttttaagggtagaggcaaaggtttactcttttatagatgaactaaagttcttcagttaagaggaaaccttccttggccaataaagcaaaaaactgaccccaaaacctttgttgtgcttttacttatcgtgggttgaaagttgttattactttttgatggagtaaaatacgccttttattcgtctaatatttattcaaaggaaatgaaacatatcgatatggaatcactcttaaaacactgtgcgagtaatgcgactttagttcaaatacaaatatataagtctgggctggctcaacctaggatttctcaaaaataaagtaattggcaatgaataaataatgcacattcaagtaaatatatatacatatatatgatcttctaaaaaaaaaattcgaacaaaagtagttgtggctgtgaattggccgaacatcaagtgtaacttgaaaactataaatcgttacaaatcttagtctaaacttgagtgcaagtggatatttacaaaaggataggcacggtatgtgtggtgttgtccagtaaatactgctggcattcctcagcattcgcaaagtaacaattaaaatgatcaataaaacgtgcattcaagctgcatcatttcattaactacactttagtttcgctagtgaataccctaaatacatttaaattacataaatcattaagtattcttatcgctgctttacattacaattatcgtctcaacagaaagtgctacgaattgtccagacgttaatatccatcctaatatatatacacacaaaacgtggggaatatcaaggacaccggatgcaccggatacaccagagcaattaccgaacggcggcctccgggttacggacaaatactgttggcagatccggattcctccagagctagacgcgcggcagcagcttctcctcatcgccgccaggaccatgcatagttggcttcggcgccgacctggccggatcgtagccgtagagaaatatggaggcgatgaccaggccagctccgaagctgaactgcagcgtgagattgaagtcgaagatgtatatggaggccacgcacgagatgatgatggccagcgaggtggcgaagcccttgagaatgttatccgcgtacttgaccaccacggcaacgatcaatccaccgccggcctgcagcaggaccaggtaccagacaaacagatcgtagcccttgaagaatccctggtcgaagatcctactgccgtcgttaacgaaacaggtgagcaggccgaagggaatgctgagcagactcaactgcacattccgcatccacacggagatctcggcacccttgaggatcttctcaaagtagatgcccgcgaatccggagaggaagcaggcgcccagtgcggcccacagtccgagcatcctgttctgctcgggagcaccgccagaggaggcggccgtggctgcagctgcggcaccaccggctgagccactcgtcggaccctccgtttgggccaactgcaccaggacgatgcccatcaccaggagcagcagcgcaccccactgcgtgttcagcagcttgcggcgcagaatgacaaccgcgaacatggccgtggtgagaatcttcagctggtacgtcacctggtaggtggccgcatccaaatgggaggcagagacgtacagcagattgttttgaacgatatagaccagcgaggggacgcacaccttcagcgtgtccatgggattcgcaatgatggtcttgtgcagcgagcgtacaaacttctgggcatccttgccctcctcgttgaagaccaggaacaggcacgtgatcagtttggcgaactctgccatgagtacggctgcgaaagagggcgcaaaatggcaatcaatcaatcaaatatatgtacatatatactaataagtccaagtatcgctgttcgggttttcaaataagtccggttaacttacacacagagtcaccaaagcaataaccaaagtttaatggcaaaatgtaaacccatatgtaattcaagaatgccaaccaaacctccttgagctatcgcggtagaagttccccaacagttttatcaagctattaggagctaaatgcggaagtggctgcttatcagtttctttggcagcttcacatctacccgaacgaccattccccgcctgccactgctcctacaccaccttcacctccacctcttcgactcgtttgcttttactgctgatgttgctgcttgcgtggacagacccacgtcgaggtttcgtggaagtggctctgggcaacgaggtgaatctgctaagcggtgaaccggcttgacctgctgagcccgacgacctgttggacttttggataagcactcacccgtggagctgaggaagatgtcgcctggccgggtgcgggcgtagcgcatgctgaggcccaggatggcattctgcagggtcagcgtcagcaggctgatgtacttcagcgtattggcgttcactgtgcgatgggaataggaatacgtgacgggggcgggcaggagcgccatgtcagtaccgctggagtaacgccaccgcactaaaggccaaatactcactgtgtatgctattcatggtgctacgcttctagctctattgtctcaactccaaaaccaaatagaaaccgaaggcaaacaaaacgccgtagttgggggtacacaaagactccgttcctggccaagatcagttgtcggcgggccgttccgtttggcagttcgttcccttcaagttggccagaaaagcagaagagcgcaaatgaagacgactccactggaccgggcgacacgtaaacaacaatcagagcccgaagcttctgccagcggcggctttttatcgccgcctatgtggttgttgttgctgcgcgccagggacgtggtcctgggcttgcaacgggggtcataaatgcgaaaccttcttaattgaatgcaaacaaaatttaaaagtgcattgtgcatttcagtaaagtaaatacaccttacatatgctcctgggggatggatccccattttaaagcaagctacgcccatggcgtgcagcttttgttgctattttcgcagcagagaccgacttttcgatagtcacagtgctggcattgtggcggaactcgcgaaaaaagaagttgcttgcaaaaaaagctagatatacaataatcgggcattgagattgcttaaattaatgtatatattatgactttaaaattaaaattaaaatttaacaagagagcatggggatcgaaagtagaaaacaagaaaactcatggacgaaatacataaatacatattgtgcatgcttgttctacatgcacatgtatgttaaatttttaagcccagcgaaatttatttttgccgcactaggttggctatttactcagctgccgttgaaaatacgtcatgaaagccagtatatgcagacaattaaaataaacataaaacatcaaattaagccagtgaatgatgaacaacctgttggcggcacctgataattgcgatgcatcaaatttacaatacaacattacaaatatattgccatttggggggattaaataaattaatttaatcaaatgcaataaatgaaaacattaataatttccgtgttgattttaaatcttttacttttttgagttcatcactagaattcgctttcgcctgccgcctatcgataacattgctcggtgtggcgatttcgtaaatagttttctaactgaataatggtaacagttggccactttagttgataattcataattgcaaagaccagagacgccaggacacgatgaaggaaca

SEQ ID NO: 4727 - DNA, 1282 bp, DROSOPHILA
tcgcccggtccagtggagtcgtcttcatttgcgctcttctgcttttctggccaacttgaagggaacgaactgccaaacggaacggcccgccgacaactgatcttggccaggaacggagtctttgtgtacccccaactacggcgttttgtttgccttcggtttctatttggttttggagttgagacaatagagctagaagcgtagcaccatgaatagcatacacatgaacgccaatacgctgaagtacatcagcctgctgacgctgaccctgcagaatgccatcctgggcctcagcatgcgctacgcccgcacccggccaggcgacatcttcctcagctccacggccgtactcatggcagagttcgccaaactgatcacgtgcctgttcctggtcttcaacgaggagggcaaggatgcccagaagtttgtacgctcgctgcacaagaccatcattgcgaatcccatggacacgctgaaggtgtgcgtcccctcgctggtctatatcgttcaaaacaatctgctgtacgtctctgcctcccatttggatgcggccacctaccaggtgacgtaccagctgaagattctcaccacggccatgttcgcggttgtcattctgcgccgcaagctgctgaacacgcagtggggtgcgctgctgctcctggtgatgggcatcgtcctggtgcagttggcccaaacggagggtccgacgagtggctcagccggtggtgccgcagctgcagccacggccgcctcctctggcggtgctcccgagcagaacaggatgctcggactgtgggccgcactgggcgcctgcttcctctccggattcgcgggcatctactttgagaagatcctcaagggtgccgagatctccgtgtggatgcggaatgtgcagttgagtctgctcagcattcccttcggcctgctcacctgtttcgttaacgacggcagtaggatcttcgaccagggattcttcaagggctacgatctgtttgtctggtacctggtcctgctgcaggccggcggtggattgatcgttgccgtggtggtcaagtacgcggataacattctcaagggcttcgccacctcgctggccatcatcatctcgtgcgtggcctccatatacatcttcgacttcaatctcacgctgcagttcagcttcggagctggcctggtcatcgcctccatatttctctacggctacgatccggccaggtcggcgccgaagccaactatgcatggtcctggcggcgatgaggagaagctgctgccgcgcgtctag

SEQ ID NO: 4728 - protein, 357 aa, DROSOPHILA
MNSIHMNANTLKYISLLTLTLQNAILGLSMRYARTRPGDIFLSSTAVLMAEFAKLITCLFLVFNEEGKDAQKFVRSLHKTIIANPMDTLKVCVPSLVYIVQNNLLYVSASHLDAATYQVTYQLKILTTAMFAVVILRRKLLNTQWGALLLLVMGIVLVQLAQTEGPTSGSAGGAAAAATAASSGGAPEQNRMLGLWAALGACFLSGFAGIYFEKILKGAEISVWMRNVQLSLLSIPFGLLTCFVNDGSRIFDQGFFKGYDLFVWYLVLLQAGGGLIVAVVVKYADNILKGFATSLAIIISCVASIYIFDFNLTLQFSFGAGLVIASIFLYGYDPARSAPKPTMHGPGGDEEKLLPRV

SEQ ID NO: 4729 - DNA, 3374 bp, DROSOPHILA
aattcgcctaacgtcgccaccaacctgttgggatgcccagctctttggagccgcgtccgaagccccgaacaatctcgcccccagcgaacagaggcagttggctcagcatttcccagatttccttgcaatctgacccagatctgctgtgctggcgcttgaaatgaatatcaggggccaatgggcggttgatttgcggtattctgtgcaaccgcaaagcgctgcgggccaatttatcgagtctggcaaggagtcaagcggggttttctacagagtacgtatgttgtgattgccgcgtagccactcacataactattcctcgttccattgatcggcataatattcataaacacacagacaaattttccgcattcataaagcgaatcagctgttgccttcgggctgccaacctgtttcagttatatagtactgtcaattagcgaattttttttactagatatttaaattgtaagaaactgaaatgtatatattacgcacagtatggttttaatcaataaagcttgggtttatattgtaatgcagaattaatgtaattggattgattttaaaattttagcggcgggttaaacatattttcatcaaaagcttttatttgctgtgtagagcttctattgaaaatattgaatttttatttcataaatgaatcatcagatgttttgtgtaaatactagtactctattcccaaaataaatagaacaccaaatcgtaattaaattacaatgaaagccagcttgcctgaaaaatatttgtgttattaatacaaatatacatacatatatacatatatatacatatatacatattttttcatatcatatcaatctcaattttttttattctgaataattgttttccatgtgtacatgtattattcagcactaaaaaaaatgtacaaatgatcagtgcgacggttggtttctttgcagttccagttatcatccaattctccaaaaagtgaacacttacacttgtgtagaatgagaaatcaattgaactctttaaaaaatgtgccgtttattcatataatttaccagcaataactgtaaaaccagcgaaacgggattattagtttgcaaaacaaggccaatgtcaatggtcaattcataagatgtcgtaaactgttcttttattaaaaaacattgcatttggttgttgatttagatgatgcacagcgcgaagaacgtgtgccggacttgtatggacgagaccggcaccctggtagatatattcgccaatgtaagggatcctgtgctcgacgaaccggagatgagcctctcgcacatcctggccaggtgtaccgaacgtccagtgaaacgcggcgacctgctgccgcagttcatatgcgtttcctgcgtcctggccgtgcagaatgctttccggttcaagtggcaaagcgagcagagctaccagcacttcttccgcgtcctaaaccagtcgggtgctccggaaaaccaagtgcacttagctgcatgtaatggggataagaaccagataataaaccagaaaatgcagctcaaaagcgatcgtcaacaggatacgcagcaaatgacaaaaacgcagaaaccagatgatgatcttagtcaaaaacaaacactccaagcgaagctccaagagggaaatattgatggcccaccggagtccttcaccctgcatcctcgtaagcggacttgtcgcacagaagaacaggcagacatgatcccaaaggaagctacaaggtaatgcaatttgttataaatatcaagcctcaagatagacaaataattgaaaaattataaaaatttgaaggtacatctttgattacttatacttttatatgaataattaaaaataacttaaataagcttaaataattatattcccgattttcagaagtaccaaaatgatctgcgatgccgatggctactacaactgcccgcactgttctaagcgattttgttcccagacccagttaaggacccacatcaccgatctgtgcaacaggtgtccctactgcccacgcacttatatgcaaaaatcgaacctcaagcggcatttgcgaaaccacctaagcaagccagcgcacaagtgtttccactgctcgaaggctttcatgcgtaaagatcaccttaaaaggcacctgcgcacccacgacagtgacggtccgctctcctgcagccagtgctcagcggtatttatcgaacacgttcagctggaaatccatcgcagagagcacaaacaaaggccgggctcttcaaaatcggagtccacgaaggatcctgactcggacgacagcgatcaagcgcaggatctaaaaccaaagtggactaagaacaccttcaatggcacgtgcagcattccacctatgctaaagccgtgagtttggaactccaccagtcttatgtaatatagttatacctgatagttatacttataccctagtaccgctgagaaatttgtgacgagcgaaggtagcgtatctgacccctttatattcttaatcggaaccactagccgagttcataagttctcatcagtccgtccgttcgtctatttttccgtctgtctgtccgcagagatctctggaattaaaaatctagaaaattaaggttttgagtttgtttcagacctttaaaaagccaacaaacggacattaagttattgttttcatttattcttttacttaaatttttggcgatagccatttcgccgaagaaaatttgaataatcaaactttaaccaaactttaaaattgtatacccgttacacgataagtaataaaaaggtttactagtagaaggaaataataatcttgcacaggatcaatagtctgtccgtccgtctgcgtgtccgtaagaacgccgtgatcccgttaactataggagctaaatccctaagatttagtaaaatttatagaaatagaaaaccctcgcacttttactagctgattaacgggtatctgatagtcgaggcgaatcaactaatatcatttgcttctatttatttaacaacaggaaaccgatatgcgatatttgccaaaagaagttcagtagtgtctacgccttgaagcggcatatgcttactcacaatcgccaacatcatcttaaaaaatgtacctattgttccgaggagttcaaaacagaaaaacatctcaaaaggcacgagcgtggtcacatgggagatctgtttcgttgcgaattttgctcattggtatttgtagatgttaactacttgcgaaagcacaaaaaacgcattcacagcaacaacgtaatagcgatgtaggagaagatcatgtccaaacgggtgactaccggttatactcttggaaaacaaccattgaattaagcagattaatatatgtgaaaggaatataaacgatt

SEQ ID NO: 4730 - DNA, 1220 bp, DROSOPHILA
aaatcaattgaactctttaaaaaatgtgccgtttattcatataatttaccagcaataactgtaaaaccagcgaaacgggattattagtttgcaaaacaaggccaatgtcaatggtcaattcataagatgtcgtaaactgttcttttattaaaaaacattgcatttggttgttgatttagatgatgcacagcgcgaagaacgtgtgccggacttgtatggacgagaccggcaccctggtagatatattcgccaatgtaagggatcctgtgctcgacgaaccggagatgagcctctcgcacatcctggccaggtgtaccgaacgtccagtgaaacgcggcgacctgctgccgcagttcatatgcgtttcctgcgtcctggccgtgcagaatgctttccggttcaagtggcaaagcgagcagagctaccagcacttcttccgcgtcctaaaccagtcgggtgctccggaaaaccaagtgcacttagctgcatgtaatggggataagaaccagataataaaccagaaaatgcagctcaaaagcgatcgtcaacaggatacgcagcaaatgacaaaaacgcagaaaccagatgatgatcttagtcaaaaacaaacactccaagcgaagctccaagagggaaatattgatggcccaccggagtccttcaccctgcatcctcgtaagcggacttgtcgcacagaagaacaggcagacatgatcccaaaggaagctacaagaagtaccaaaatgatctgcgatgccgatggctactacaactgcccgcactgttctaagcgattttgttcccagacccagttaaggacccacatcaccgatctgtgcaacaggtgtccctactgcccacgcacttatatgcaaaaatcgaacctcaagcggcatttgcgaaaccacctaagcaagccagcgcacaagtgtttccactgctcgaaggctttcatgcgtaaagatcaccttaaaaggcacctgcgcacccacgacagtgacggtccgctctcctgcagccagtgctcagcggtatttatcgaacacgttcagctggaaatccatcgcagagagcacaaacaaaggccgggctcttcaaaatcggagtccacgaaggatcctgactcggacgacagcgatcaagcgcaggatctaaaaccaaagtggactaagaacaccttcaatggcacgtgcagcattccacctatgctaaagccgtga

SEQ ID NO: 4731 - protein, 346 aa, DROSOPHILA
MMHSAKNVCRTCMDETGTLVDIFANVRDPVLDEPEMSLSHILARCTERPVKRGDLLPQFICVSCVLAVQNAFRFKWQSEQSYQHFFRVLNQSGAPENQVHLAACNGDKNQIINQKMQLKSDRQQDTQQMTKTQKPDDDLSQKQTLQAKLQEGNIDGPPESFTLHPRKRTCRTEEQADMIPKEATRSTKMICDADGYYNCPHCSKRFCSQTQLRTHITDLCNRCPYCPRTYMQKSNLKRHLRNHLSKPAHKCFHCSKAFMRKDHLKRHLRTHDSDGPLSCSQCSAVFIEHVQLEIHRREHKQRPGSSKSESTKDPDSDDSDQAQDLKPKWTKNTFNGTCSIPPMLKP

SEQ ID NO: 4732 - DNA, 3349 bp, DROSOPHILA
ggaccgggcgacacgtaaacaacaatcagagcccgaagcttctgccagcggcggctttttatcgccgcctatgtggttgttgttgctgcgcgccagggacgtggtcctgggcttgcaacgggggtcataaatgcgaaaccttcttaattgaatgcaaacaaaatttaaaagtgcattgtgcatttcagtaaagtaaatacaccttacatatgctcctgggggatggatccccattttaaagcaagctacgcccatggcgtgcagcttttgttgctattttcgcagcagagaccgacttttcgatagtcacagtgctggcattgtggcggaactcgcgaaaaaagaagttgcttgcaaaaaaagctagatatacaataatcgggcattgagattgcttaaattaatgtatatattatgactttaaaattaaaattaaaatttaacaagagagcatggggatcgaaagtagaaaacaagaaaactcatggacgaaatacataaatacatattgtgcatgcttgttctacatgcacatgtatgttaaatttttaagcccagcgaaatttatttttgccgcactaggttggctatttactcagctgccgttgaaaatacgtcatgaaagccagtatatgcagacaattaaaataaacataaaacatcaaattaagccagtgaatgatgaacaacctgttggcggcacctgataattgcgatgcatcaaatttacaatacaacattacaaatatattgccatttggggggattaaataaattaatttaatcaaatgcaataaatgaaaacattaataatttccgtgttgattttaaatcttttacttttttgagttcatcactagaattcgctttcgcctgccgcctatcgataacattgctcggtgtggcgatttcgtaaatagttttctaactgaataatggtaacagttggccactttagttgataattcataattgcaaagaccagagacgccaggacacgatgaaggaacagccgctaaaggagatcacacagctcatccacgccatcaaagtggggtaagtcgtcggttggcaggcactgcgattcatttggttgttaaagtggcatatgttttgcaggctggtggagggatcctacaacataaccaacaagacgctggacatcttcaagtacatcatcatgagcaagagctggcagaacgccgagtgagttgcaagggatggcacaccaaggataacacattaactgataaacaactccccctcatttgacagtgctctcatgcagattgtgcgcgaccagtgtaagatcctgcaggcagctctgccccaggagacggttacctcgaacattgccaggcggatcctcaagctgactcgcgaggagttcgatctgttgcacgccaaggtgcaacacttcgcggacgactcacaggcctcgctgtcgcttcacaagctagtcacgcagaccagcgagagcaacgtcagcgtagattactcggtgccccagcatggattgcgggaagcgctgctcgaccacctgcaggaggtggaaacggagctggagaccagttcggagaacatctgcgtccaggccgaggagcacatccattcgtcggagatcatcttgacactgggacactcgcgcagcgtcgagaatttcctcaaaagggcgatcaaaaagcgtcagtttctcaccatcatcgtagccgaatgtgcgccagcctgccgggttagttgggtctctttatgggacgacagtatttgtggggtgtaagaaaatgctcttatgttgcttaacaactgcctatgtcttttacagggtcacaatttggccgccagcttggccaacgagaagaatgtggagattgttgtgatcccagatgcggccatcttcgctatgatgtcgcgcgtcaacaaggtaataatcggtacgcacagcgtgctggctaatggaggactcagagcggcgtgtggagcgtatacagtggccctggccgccaagcattactccgtgccggtcattgtactggcgcccatgtacaaactctcaccattgcatctgtgcgagcaggacgccttcaatatggtcggctgtgcggaggatgtgataccctacgattcgattccagcgcgcgaagccaaggtatacagtcccatgttcgactacgtgcctccggaactggtcacccttttcatatccaacacgtaagtagtgcgcttatcggcctttcgactcttttttattgcatttattggattctttttttacttagcggtggccatgccccctcgtatgtgtaccgcctccttacggaactgtatcatcccgaagatttggagatttgaaatcgtgtttgtctcgttgttttagcaattctaccaataaagtctacagtaaagtagcaagcccatttcgatttggattgatttaaatgcatcaatttcgtagacatttataaactttaaaattcaacaataattatatcgaataagcaataacggtggatcggttttcgatttaagaacattactactttatcttgggttgatatagttaatttcaggtagcacgtttctcgtaatttccctgcggcacacgatcctcaacctatttttgaatattttcaagcagctgcgtgaagtcggccaggctatcggcatagtaatccggctgcgcttccaccggggcgttcagcatgtcctcctttgttaggcagccgctaagtaccagcagggactggaagccgcaggccttgccgaactgcacatcctgcaccagtgtgtccccgatgaagatgcagcgcttgcaatcacgaatctcgaacatttcgccaaacatttcgcccaaaatgggagacggcttgcccagaaacgtggcctcgcgttgcgtgtagcgtttaacgtgctccaggaagtcaaagaacccggccacattgagattctccgccagtggcatgatgacatcgctgccgccggctatcaactggcagtcgtcattctcctgaaggtgcctaatggccttcgccagctccacgtacgagaggtccaagtggatgtcgaatagcacagcgcccacgggcttttcaatggccaggtgatccaccagcgacgcggccgtcaggtgctccttgacttgctgaaggagaatgatatgaaatttaatagtcacacggaagctcttgaactaaatatattgtatatatatatttataagtaataaccttccccttaccagcgattcaaactcgatgttgtgcttacgtaacgtttcgttcgcttcgagggacatgagggagtatacccgctcccccggcttgtgcttcttcaggtaccggacaatggtctt

SEQ ID NO: 4733 - DNA, 1059 bp, DROSOPHILA
atgaaggaacagccgctaaaggagatcacacagctcatccacgccatcaaagtggggctggtggagggatcctacaacataaccaacaagacgctggacatcttcaagtacatcatcatgagcaagagctggcagaacgccgatgctctcatgcagattgtgcgcgaccagtgtaagatcctgcaggcagctctgccccaggagacggttacctcgaacattgccaggcggatcctcaagctgactcgcgaggagttcgatctgttgcacgccaaggtgcaacacttcgcggacgactcacaggcctcgctgtcgcttcacaagctagtcacgcagaccagcgagagcaacgtcagcgtagattactcggtgccccagcatggattgcgggaagcgctgctcgaccacctgcaggaggtggaaacggagctggagaccagttcggagaacatctgcgtccaggccgaggagcacatccattcgtcggagatcatcttgacactgggacactcgcgcagcgtcgagaatttcctcaaaagggcgatcaaaaagcgtcagtttctcaccatcatcgtagccgaatgtgcgccagcctgccggggtcacaatttggccgccagcttggccaacgagaagaatgtggagattgttgtgatcccagatgcggccatcttcgctatgatgtcgcgcgtcaacaaggtaataatcggtacgcacagcgtgctggctaatggaggactcagagcggcgtgtggagcgtatacagtggccctggccgccaagcattactccgtgccggtcattgtactggcgcccatgtacaaactctcaccattgcatctgtgcgagcaggacgccttcaatatggtcggctgtgcggaggatgtgataccctacgattcgattccagcgcgcgaagccaaggtatacagtcccatgttcgactacgtgcctccggaactggtcacccttttcatatccaacaccggtggccatgccccctcgtatgtgtaccgcctccttacggaactgtatcatcccgaagatttggagatttga

SEQ ID NO: 4734 - protein, 352 aa, DROSOPHILA
MKEQPLKEITQLIHAIKVGLVEGSYNITNKTLDIFKYIIMSKSWQNADALMQIVRDQCKILQAALPQETVTSNIARRILKLTREEFDLLHAKVQHFADDSQASLSLHKLVTQTSESNVSVDYSVPQHGLREALLDHLQEVETELETSSENICVQAEEHIHSSEIILTLGHSRSVENFLKRAIKKRQFLTIIVAECAPACRGHNLAASLANEKNVEIVVIPDAAIFAMMSRVNKVIIGTHSVLANGGLRAACGAYTVALAAKHYSVPVIVLAPMYKLSPLHLCEQDAFNMVGCAEDVIPYDSIPAREAKVYSPMFDYVPPELVTLFISNTGGHAPSYVYRLLTELYHPEDLEI

SEQ ID NO: 4735 - DNA, 4251 bp, DROSOPHILA
ctggctgctagggggcttatcttcggcaacttcttcttgggattcggatgcctttgcctgcttcttttgggctttcggttgtctcttcgttttgaccaactctttggattgcttcgcttcctttgaatcgacttgagttggctcttcctcggatttctgttcctttttggatttacgcgaagttgaagttgaagttggtgccttcgtttttgataaaaacaatatttagttaattttttctggacttattgggccttccctacctcgttttcctgtgcttcctctgtggactccgacttctttggcgatgctagagcctcggaccccggtaaatcaattttagataacttctgcgtgttgatctgttccttggactcctgctggtcacctagaatccctacaatccgatcgtatacctcctccacagtgggaaacttgcgagcacgtggtggaccccgctttagacccgaccaaagtgccacctgctcctgctttcccattccgccggcgctcaaacttaactcgaaggctcctcgccgtggtgctccaagtgcattcagctggagctgaagctgttggagaccacgctcccggagagcggagtgcagctcctccgctcgacgacgaaagactcgtcaggatcggcagtgctctacgtagagcaccggcgcattgggatccagctcttcgcctgcatcccgctcagcgattggcgcctgtagaatcgtttggaaatgcatttagctattgaaataatgtagtatttcaatcgtacctctgcttttttgttccgttttggtggcatgatcctaaagtaatcagaatttttaagtaaatggcgcactttttatttggcagtgctgccagatggtttagtaacactagggtgtcaatcgcgactgcatccctggaaactatcgatttgccgataacaggcgttaaacgacgcgcgattcccaatcaaactgagtaaacatttaatttaatcaacgtagtttcaataacgccaagatgtcgcacctgatgccccggcggaccagcgagttccgtggcgatgtactggaggagcgaggcactgccgataagcggcaaaccaggtgagcatcgaaatccaactgatcaaatcttgtcaacgatgcaaatgcgtatccttttccagggcaacaaagcggagcgcagccacgcacactccgtcctccagccaggcggcacccagaaggtatgcacaaccatttgattatcgaaggcacaaccagtaatgtttgaatccaatccgcataggccgtccgcatcgcgtctgccgcagccgctgaacttggagcgcgatcgggccagtcaaatgggcgtgacgcccaagcgaggccaccggtttgtgccctccactgcggagcgcgccattgcgccacactccgacaagaaatgggtggcggagagggcacagcagatcctggaatacctacatggcattcagaacagcgaggcgcccactggacttattgcggatctattcagtcggcccgggggtttgcgacacatgaccatcaagcaatttgtttccattctcaactttatgttccaccacatctggcgaaatcgcgtgacagtgggccagaaccatgtcgaggatattaccagcgcaatgcaaaagctacagtatccttatcaggtaagcaactcggatgctcttaggtttccagtgttcgtttaattcttaaatccacttgtgacttgcaggtgaacaaatcatggcttgtatcgccaacaacacagcattcattcggccatgtgatcgttctgctggactttctcatggactttttaccgcctctgccctcgtcggatgtggtggaggaggagtttccgtttatggaaaccatggagcagcccagctcgtatctgaatagcatgcactgcgagtcgacgaccatcatgtccaccacacaggcgcacgccattcagctagatgaagacgtcaatggtctgctcttcgaagaggctagcaaatgcattgccttgtgggatcaggagcttaccaatgaggaggccaagctgcaggcggagaccagggatcaggtgatcagcaagaagtgtgatttgcccgatcgcaaagccttagaccagctaatcggcgatctgaagacgaaactacagcaactggagaataagttgcatgatcccagtgaagacaataaactgaacaaactggaacgtcttaccaaagagcacgatcagcttgcccaacagctagctgccagtgaagaggagctgatcaagaaactgaagttatacgaacagctgtctgcccaggtagaagaaaaacagtctaatctccgccagcaaatgaagtatgaaaagcgtctggagcaggcggttaacaggcagaagttctccgcccagcagctaaaggagcttcaaatgaagtgcgacgatatggaaaactactccaaggcttatgagcgccaggtgaaggaggtgtccgagctggagctgcatcagcaggtgatgctgtcgcgcgccaagcaaaagcaactggattccgttgaggtctttaactcgcacgtgcgccacctgagcatggacccggtgatttgtggcctgataaagagcggcattggccagcaatcggaccttactctgccactaaatcccaatcaagaggacatctcggagagggtgcagtgcctggagttgctgggcaaacttctgcaacagcaccgccagcagaatatcgatcggcgtcagatgttggacaagcaggtggccaaggtaaagtctgattccatcgagttagacaccgaaatcgccaccatggactctcagttgcgggcgcagaaacagcgtctgaccaaaatggaggccagttatcggaccaagcgcgacatgcaggcgcagcacaggcaacagctgctcgaggatcagtacgaccagaccgcccgtctggatgagttggagaagagggagaagcaggcgctggaaaagctggaagccagcaagcaacggaacgaggatctactcaccgctgctgagcagtttcaggagcaggatctcaaggcccgccaagatcgcctggaaaaatgcgagcagaagctggccaaagcggaggaccagctgctcgccgtggaatcaaaggtcaacgcgactcaggccaagctgaacgaggtggagcaaaaggtgtactccgccaagctgccatcctttcagcccgtgctagatgccatcaagaatcattgatttgatccggatgttttgttgtagtccagttgatctgtaaggaatttattaaagagtattctttgttttcaaattaaaaaagacaatgaagctgtctgcaatgttcaatgttttatgttttatgaaatgcatttatttttgattacatttgaattaggtaaattgagttgaacacagcggttcctggacaaaggaggggatgatactccataatatcagatttcttaagttctttattgccacacgtattacggatttcattacggatctccgctgccttttttgggattacaaattgcacttggaacggtttagctttacatggttatacatatgtatacactgagtggtgggtaaatacggcaagggtaacttaagcgtaggtatctataaatattaaataatattatcatttggccaattttgtgtagtttagcgtgcgattgacttgtgccacaaaaaagttgcagggaaacgtttgcatttattgctattaaattaattaatttggatatttcatttgtgtgcgcttttttcgtattcgtagatatatattttgtcatttttgggcttaaaataaacgaaaatgaggtattatttcaattagtagtgatgtatctcatagtatattgtcgctcgatcataaatcctaggtttctgtgtaccacaagtcaaccaactacagaatatgtatgggtatacaaaaaaataggggggaagttcgagtagtagttataaattcaacattgagactgagacaatatgttgtgtaataaataaatatcatttagcttagttcaattctatacaatgaccccgatagtgctaacgtcctcagacaatgaagacatcgccactgctgcgctccacggccgaggtggccacatcgccgccacatcctggccgaccggcttggcttgcagccgcaatcttgggctcctccgattgcgcagttttgtccaacagctccgcctcgcgtccaatctcgacgatgccttgcggcttgtcgcagctgacgct

SEQ ID NO: 4736 - DNA, 2059 bp, DROSOPHILA
ataacgccaagatgtcgcacctgatgccccggcggaccagcgagttccgtggcgatgtactggaggagcgaggcactgccgataagcggcaaaccagggcaacaaagcggagcgcagccacgcacactccgtcctccagccaggcggcacccagaaggccgtccgcatcgcgtctgccgcagccgctgaacttggagcgcgatcgggccagtcaaatgggcgtgacgcccaagcgaggccaccggtttgtgccctccactgcggagcgcgccattgcgccacactccgacaagaaatgggtggcggagagggcacagcagatcctggaatacctacatggcattcagaacagcgaggcgcccactggacttattgcggatctattcagtcggcccgggggtttgcgacacatgaccatcaagcaatttgtttccattctcaactttatgttccaccacatctggcgaaatcgcgtgacagtgggccagaaccatgtcgaggatattaccagcgcaatgcaaaagctacagtatccttatcaggtgaacaaatcatggcttgtatcgccaacaacacagcattcattcggccatgtgatcgttctgctggactttctcatggactttttaccgcctctgccctcgtcggatgtggtggaggaggagtttccgtttatggaaaccatggagcagcccagctcgtatctgaatagcatgcactgcgagtcgacgaccatcatgtccaccacacaggcgcacgccattcagctagatgaagacgtcaatggtctgctcttcgaagaggctagcaaatgcattgccttgtgggatcaggagcttaccaatgaggaggccaagctgcaggcggagaccagggatcaggtgatcagcaagaagtgtgatttgcccgatcgcaaagccttagaccagctaatcggcgatctgaagacgaaactacagcaactggagaataagttgcatgatcccagtgaagacaataaactgaacaaactggaacgtcttaccaaagagcacgatcagcttgcccaacagctagctgccagtgaagaggagctgatcaagaaactgaagttatacgaacagctgtctgcccaggtagaagaaaaacagtctaatctccgccagcaaatgaagtatgaaaagcgtctggagcaggcggttaacaggcagaagttctccgcccagcagctaaaggagcttcaaatgaagtgcgacgatatggaaaactactccaaggcttatgagcgccaggtgaaggaggtgtccgagctggagctgcatcagcaggtgatgctgtcgcgcgccaagcaaaagcaactggattccgttgaggtctttaactcgcacgtgcgccacctgagcatggacccggtgatttgtggcctgataaagagcggcattggccagcaatcggaccttactctgccactaaatcccaatcaagaggacatctcggagagggtgcagtgcctggagttgctgggcaaacttctgcaacagcaccgccagcagaatatcgatcggcgtcagatgttggacaagcaggtggccaaggtaaagtctgattccatcgagttagacaccgaaatcgccaccatggactctcagttgcgggcgcagaaacagcgtctgaccaaaatggaggccagttatcggaccaagcgcgacatgcaggcgcagcacaggcaacagctgctcgaggatcagtacgaccagaccgcccgtctggatgagttggagaagagggagaagcaggcgctggaaaagctggaagccagcaagcaacggaacgaggatctactcaccgctgctgagcagtttcaggagcaggatctcaaggcccgccaagatcgcctggaaaaatgcgagcagaagctggccaaagcggaggaccagctgctcgccgtggaatcaaaggtcaacgcgactcaggccaagctgaacgaggtggagcaaaaggtgtactccgccaagctgccatcctttcagcccgtgctagatgccatcaagaatcattgatttgatccggatgttttgtt

SEQ ID NO: 4737 - protein, 675 aa, DROSOPHILA
MSHLMPRRTSEFRGDVLEERGTADKRQTRATKRSAATHTPSSSQAAPRRPSASRLPQPLNLERDRASQMGVTPKRGHRFVPSTAERAIAPHSDKKWVAERAQQILEYLHGIQNSEAPTGLIADLFSRPGGLRHMTIKQFVSILNFMFHHIWRNRVTVGQNHVEDITSAMQKLQYPYQVNKSWLVSPTTQHSFGHVIVLLDFLMDFLPPLPSSDVVEEEFPFMETMEQPSSYLNSMHCESTTIMSTTQAHAIQLDEDVNGLLFEEASKCIALWDQELTNEEAKLQAETRDQVISKKCDLPDRKALDQLIGDLKTKLQQLENKLHDPSEDNKLNKLERLTKEHDQLAQQLAASEEELIKKLKLYEQLSAQVEEKQSNLRQQMKYEKRLEQAVNRQKFSAQQLKELQMKCDDMENYSKAYERQVKEVSELELHQQVMLSRAKQKQLDSVEVFNSHVRHLSMDPVICGLIKSGIGQQSDLTLPLNPNQEDISERVQCLELLGKLLQQHRQQNIDRRQMLDKQVAKVKSDSIELDTEIATMDSQLRAQKQRLTKMEASYRTKRDMQAQHRQQLLEDQYDQTARLDELEKREKQALEKLEASKQRNEDLLTAAEQFQEQDLKARQDRLEKCEQKLAKAEDQLLAVESKVNATQAKLNEVEQKVYSAKLPSFQPVLDAIKNH

SEQ ID NO: 4738 - DNA, 3880 bp, DROSOPHILA
aaccttatagctttaatagttcctgagctctcgacgttcatgcgggcagacggacatggctagatcgactcggctattgaccctgatcaagtatatatatataccttatatggtcagatatgtcaggtataaaaatatactgacagaatttatagactggtagacctttatatatatatgccttttgggcattataaagtaataatagtaataaataaatcaagtgagtttcccactccgataaaacgtttcactgtcaaaaatatatatgattaaggcattcggcgagctcaattaggccagtgtttagctagcaaatttctaatcctttctttatgctgaaactatccttttctgaatatactatttgtagctacgagctacagattctcttatctttcaccaacttatttctttacacattacacctatttttcggttccttaaaaataaaaaatctataagctctaaatcaacgttttcgggcgttttgatggttaaaggaagggcgtggccaaagtgttttttggaatacctacagaaattaacaagacaaacaataaaatatgggtcaacaaacttgcgcttttatagttcatgatcgattcgctatgatcctgatcaagaacatatatatataccttatacattcggaaacgcgttcttctgcctgttacatacttttcaacgaatctaatcgttatacggttatatttccttttaatttggccactttgtaattcaaaaagcacacagaagaaacatttataaaatataataaaaaataaaaatagcgaggattaaattagcagactttaatttcgccaaactacacaataatatatatataatttttatcaattgaactctcgatatatgttgctagtcaagtgtctttacctgtgtaaaaattaattaggttacttaaaccaaaactgataaaacccatacaggcgcataaaaagaaaaatagaagaccaaaaaattcaacaaaccaagtaaaatgtacgttttttatatttatgagaagattaacttataattggtgaattattaatgtagcttattagcttatttaatcttgtggaactcctccatgcatagcttgcagctccaagaaccctctggtggagtcacaagcggtggtgacaggcagtacatatggtatccccggtcacaatcgtcacaaaataaaagttgatcgtcattatcagaggtcccacagatggagcagtacttgcattcaatgcattgccaacgataacgttttaccgatataatcatatttgccgtgaactgcagacacgatggatgaccggaacgaccacagtccgagcacgatactagctcttcgggcatattggtttttttattttctcgttgatctcccagacaaaagtcacaataaggtgatggttgcgctatgtcacgttctacacgttgtttgaccttattaccagtagcaaacaccgtttgatttgttcctgtttgcaccggatgcgcattgcaaacatttgaggttgtcaggcccgcgtttatggcaaccattgttgctaggggaattgagtcattggaagctccagcatcgcttgaagtcttatcgtacgacgacgatatgtttgttggcagtatgagtcctgactgtgaattgtcgtcatttatgggaataggcgaagctgagttggaatgagatgcatagagcccagtgctagcgacagcagctgcagtacatgctgcatgtgcgacagcggcggcagctgccgctgcggctgcggatgtatttgcactatttccaccggctctacgttttcgatcagattctccctcaacggcgttctttcgacgattgcctagggtatcaataacgtttacaattcatcagcttaataaacttgtactcaccaccacctttacgtccccgtttgggagtaccctctacgtttgcatttgttcgtctaggacgcgaacactttttgcgtttgccccggctggtgtaagactcatcaaaatcgttatctgaatcaaagtcatcctcaaattcatcgccatgatgaaaatgtgatgtgtccatttcatcgtggaaccattctttttcgacgtttgcatgtgagtccttactatcattatctcctgatgctcccatggagttgccatccgtagcagcaatggctgtaaataaaaacccataataaatataaatgtcagatgtataaaatattgactttcatccgacgataagctgcaattttttacctgcgctttcagctaagtgaggattttgtggtacagcaacgccagacgaaggtatatgatggtgatgctgatgcgtttgatggtgggagtgctgaaggttgtgctcgcgatactgataggctcggaaactttgattcgggttaagtaagtactgacgttttggtttgcgccaccgagacgatggataagtgtatatctgaccatgtcgaagacctggcattcgctgtttttttttcataaagagggagcaatgtgtctgtgcgacacctgtctggggatcgaggaatggcatgcgaagtcgacgttcaatgcatagacgagtgttgaaattctcgctgttttctagaatctccttgtacttttccttgtcatttaaaaagttctgaattttttcaaaattggcaatgtttactaccaaagttttttcgtacgcagatttggaagccatgttgatgccgagtggtagccgcaggaattatttggttaagcaatagctaaactaaagagctaaattgtcaacatatttttttgtcattgataaaatttatgtttcttcacacacaattcaagctgatacaaataacaaaatatagaattgttatggggcactaggcaagaagtacaaaattaaatatttagaaaaggtgtgaacgtatttctattttaaaatagatacaaaatgtatatcaaagttctcgaccatagttataataagttatttccacaagtgctccctaatgcgcaattcacaacttcttgatacgtaacaataagttaacattaacaataagttctgtagcaaaagttcttgatccagtgctaagaaataaacattgcattaaaagaatttatttatttttttttgtttttataccattgatgctatattttttaattccgaatttttatcgcattgaaggagaattttcggagtgtgaaagtctcttaatgcttaacggctggtcatatcgtctcgaattagtcatgttcaaaatgtactgagtttgacttttaaatagttattcaaaattttttttaagaatatatgttatttatccaatttagccatattgatgaaaatgataaacataaccctcttcatgaaaaccacttctttatttctattcacactggtgaaatttattcagtcgttttgaatttgacaattctatttgaattttttgatgtagatgtatagcaagtgtattaaaacaaatacaaaaacatttaaaacacgaaatcaacaccgcaggggtcgatagttaaatcgaagttttaaagtctgtatacattagatataaatttattaaagatcaatcattcgccagaagttaaaccataggcgttggatctcattaaattgtaccgcaaacttccttgacaaggataccatctgctccatttctaaacccgctactcgtagactaaaagggtacactggattcgttaaaaaataggtaacaacccgaaggaacggtttctgatcacataaagtatatatattcttgatccgattaatagccgagttgaattggccatgtccgtccgcatgaacgtcgaaagctcaggaactattaaagctataaggttgagattaagcatgcagatccagaagcattcacaaact

SEQ ID NO: 4739 - DNA, 1738 bp, DROSOPHILA
ttttgtacttcttgcctagtgccccataacaattctatattttgttatttgtatcagcttgaattgtgtgtgaagaaacataaattttatcaatgacaaaaaaatatgttgacaatttagctctttagtttagctattgcttaaccaaataattcctgcggctaccactcggcatcaacatggcttccaaatctgcgtacgaaaaaactttggtagtaaacattgccaattttgaaaaaattcagaactttttaaatgacaaggaaaagtacaaggagattctagaaaacagcgagaatttcaacactcgtctatgcattgaacgtcgacttcgcatgccattcctcgatccccagacaggtgtcgcacagacacattgctccctctttatgaaaaaaaaacagcgaatgccaggtcttcgacatggtcagatatacacttatccatcgtctcggtggcgcaaaccaaaacgtcagtacttacttaacccgaatcaaagtttccgagcctatcagtatcgcgagcacaaccttcagcactcccaccatcaaacgcatcagcatcaccatcatataccttcgtctggcgttgctgtaccacaaaatcctcacttagctgaaagcgcagccattgctgctacggatggcaactccatgggagcatcaggagataatgatagtaaggactcacatgcaaacgtcgaaaaagaatggttccacgatgaaatggacacatcacattttcatcatggcgatgaatttgaggatgactttgattcagataacgattttgatgagtcttacaccagccggggcaaacgcaaaaagtgttcgcgtcctagacgaacaaatgcaaacgtagagggtactcccaaacggggacgtaaaggcaatcgtcgaaagaacgccgttgagggagaatctgatcgaaaacgtagagccggtggaaatagtgcaaatacatccgcagccgcagcggcagctgccgccgctgtcgcacatgcagcatgtactgcagctgctgtcgctagcactgggctctatgcatctcattccaactcagcttcgcctattcccataaatgacgacaattcacagtcaggactcatactgccaacaaacatatcgtcgtcgtacgataagacttcaagcgatgctggagcttccaatgactcaattcccctagcaacaatggttgccataaacgcgggcctgacaacctcaaatgtttgcaatgcgcatccggtgcaaacaggaacaaatcaaacggtgtttgctactggtaataaggtcaaacaacgtgtagaacgtgacatagcgcaaccatcaccttattgtgacttttgtctgggagatcaacgagaaaataaaaaaaccaatatgcccgaagagctagtatcgtgctcggactgtggtcgttccggtcatccatcgtgtctgcagttcacggcaaatatgattatatcggtaaaacgttatcgttggcaatgcattgaatgcaagtactgctccatctgtgggacctctgataatgacgatcaacttttattttgtgacgattgtgaccggggataccatatgtactgcctgtcaccaccgcttgtgactccaccagagggttcttggagctgcaagctatgcatggaggagttccacaagattaaataagctaataagctacattaataattcaccaattataagttaatcttctcataaatataaaaaacgtacatttt

SEQ ID NO: 4740 - protein, 495 aa, DROSOPHILA
MASKSAYEKTLVVNIANFEKIQNFLNDKEKYKEILENSENFNTRLCIERRLRMPFLDPQTGVAQTHCSLFMKKKQRMPGLRHGQIYTYPSSRWRKPKRQYLLNPNQSFRAYQYREHNLQHSHHQTHQHHHHIPSSGVAVPQNPHLAESAAIAATDGNSMGASGDNDSKDSHANVEKEWFHDEMDTSHFHHGDEFEDDFDSDNDFDESYTSRGKRKKCSRPRRTNANVEGTPKRGRKGNRRKNAVEGESDRKRRAGGNSANTSAAAAAAAAAVAHAACTAAAVASTGLYASHSNSASPIPINDDNSQSGLILPTNISSSYDKTSSDAGASNDSIPLATMVAINAGLTTSNVCNAHPVQTGTNQTVFATGNKVKQRVERDIAQPSPYCDFCLGDQRENKKTNMPEELVSCSDCGRSGHPSCLQFTANMIISVKRYRWQCIECKYCSICGTSDNDDQLLFCDDCDRGYHMYCLSPPLVTPPEGSWSCKLCMEEFHKIK

SEQ ID NO: 4741 - DNA, 3107 bp, DROSOPHILA
ttcgtcggagatcatcttgacactgggacactcgcgcagcgtcgagaatttcctcaaaagggcgatcaaaaagcgtcagtttctcaccatcatcgtagccgaatgtgcgccagcctgccgggttagttgggtctctttatgggacgacagtatttgtggggtgtaagaaaatgctcttatgttgcttaacaactgcctatgtcttttacagggtcacaatttggccgccagcttggccaacgagaagaatgtggagattgttgtgatcccagatgcggccatcttcgctatgatgtcgcgcgtcaacaaggtaataatcggtacgcacagcgtgctggctaatggaggactcagagcggcgtgtggagcgtatacagtggccctggccgccaagcattactccgtgccggtcattgtactggcgcccatgtacaaactctcaccattgcatctgtgcgagcaggacgccttcaatatggtcggctgtgcggaggatgtgataccctacgattcgattccagcgcgcgaagccaaggtatacagtcccatgttcgactacgtgcctccggaactggtcacccttttcatatccaacacgtaagtagtgcgcttatcggcctttcgactcttttttattgcatttattggattctttttttacttagcggtggccatgccccctcgtatgtgtaccgcctccttacggaactgtatcatcccgaagatttggagatttgaaatcgtgtttgtctcgttgttttagcaattctaccaataaagtctacagtaaagtagcaagcccatttcgatttggattgatttaaatgcatcaatttcgtagacatttataaactttaaaattcaacaataattatatcgaataagcaataacggtggatcggttttcgatttaagaacattactactttatcttgggttgatatagttaatttcaggtagcacgtttctcgtaatttccctgcggcacacgatcctcaacctatttttgaatattttcaagcagctgcgtgaagtcggccaggctatcggcatagtaatccggctgcgcttccaccggggcgttcagcatgtcctcctttgttaggcagccgctaagtaccagcagggactggaagccgcaggccttgccgaactgcacatcctgcaccagtgtgtccccgatgaagatgcagcgcttgcaatcacgaatctcgaacatttcgccaaacatttcgcccaaaatgggagacggcttgcccagaaacgtggcctcgcgttgcgtgtagcgtttaacgtgctccaggaagtcaaagaacccggccacattgagattctccgccagtggcatgatgacatcgctgccgccggctatcaactggcagtcgtcattctcctgaaggtgcctaatggccttcgccagctccacgtacgagaggtccaagtggatgtcgaatagcacagcgcccacgggcttttcaatggccaggtgatccaccagcgacgcggccgtcaggtgctccttgacttgctgaaggagaatgatatgaaatttaatagtcacacggaagctcttgaactaaatatattgtatatatatatttataagtaataaccttccccttaccagcgattcaaactcgatgttgtgcttacgtaacgtttcgttcgcttcgagggacatgagggagtatacccgctcccccggcttgtgcttcttcaggtaccggacaatggtcttcaccggatgaacgatgtcgtcctcctggacgttcttggcgccgatgtggcgaaacttctccatgtaatcctcctcggaccggaagctgttgttcgacacgaacttgatctgcttgccggccgctttcaaggcattgacggcggctcccgtgttgggaatccagcccaccaggagccagacgacgccatcgcagtcgctgatcaccaaatcgaaggaatcgatgaactgccgctgctcctcgaggctgagcttcaaaatgtgtcgtggtggcgacatggtaatgttggttttttggcttacaggaacgaattggatgctggttgcgcgcgcacggaaattccacagccgactaaccgcctttgccggcatttaaccttcaatgtcaacgcattgacattgttcccccggttcctcgaacccgaacccaaccacccctcgcccatacaaccctatgcctacgtacatatgtgctaagtatcttttattacacgatttagcgaacccgagcggagtggctcgtccgataagattccgtatgtaaatataagatcttctgtgtggaacgcggcatgaaagactcgtgcgatttgttgtctatttcacattcccatctgccggacagagcggatagcagtccggaaaatacatacatacatatgtatctcatttgcttcctagttcggatttacaatcaagcgtacgcgtgattataccaagtttatcttaaggaacaacttataaaatgagtctgctgcattcgtcaaattttggttattcatgcttttgactgtcatttgaatttaccggatataatttagaaccatatagattatcgaactagttccactgccaaatgtgactgaaatatattggtctcgaaataattgacagccttattattgaattcaattctatgcaatcaaagcgaaaccacaaacccaaaatggctgtaaagaaaaatttaattaaatttcaaaggcttttggcatgctataaatattatatgtattttgcgattcacatgcttccttttcttcctttcaattgcatttcttacaaatcctctgcgatacacgtgattgaaggcgattgacatacatacatatgtatgtatgtaagtattgatcggtggtgcatcggccttttgttgctgctgttgttcgctcaagcttataacaggcaggcacaaacgtgtacagtgaacactcgaggaaacatgtatgagcacgctttcctcagttcgaaaagcaaaggtacagttgacgcatggagaaactaataagtatgatgacaattgcgaaagttcagcagcgtagacaacagaatgcctgtcgccctacggaggtcccactgtgctgggccgtagacc

SEQ ID NO: 4742 - DNA, 1011 bp, DROSOPHILA
atgccggcaaaggcggttagtcggctgtggaatttccgtgcgcgcgcaaccagcatccaattcgttcctgtaagccaaaaaaccaacattaccatgtcgccaccacgacacattttgaagctcagcctcgaggagcagcggcagttcatcgattccttcgatttggtgatcagcgactgcgatggcgtcgtctggctcctggtgggctggattcccaacacgggagccgccgtcaatgccttgaaagcggccggcaagcagatcaagttcgtgtcgaacaacagcttccggtccgaggaggattacatggagaagtttcgccacatcggcgccaagaacgtccaggaggacgacatcgttcatccggtgaagaccattgtccggtacctgaagaagcacaagccgggggagcgggtatactccctcatgtccctcgaagcgaacgaaacgttacgtaagcacaacatcgagtttgaatcgctgcaagtcaaggagcacctgacggccgcgtcgctggtggatcacctggccattgaaaagcccgtgggcgctgtgctattcgacatccacttggacctctcgtacgtggagctggcgaaggccattaggcaccttcaggagaatgacgactgccagttgatagccggcggcagcgatgtcatcatgccactggcggagaatctcaatgtggccgggttctttgacttcctggagcacgttaaacgctacacgcaacgcgaggccacgtttctgggcaagccgtctcccattttgggcgaaatgtttggcgaaatgttcgagattcgtgattgcaagcgctgcatcttcatcggggacacactggtgcaggatgtgcagttcggcaaggcctgcggcttccagtccctgctggtacttagcggctgcctaacaaaggaggacatgctgaacgccccggtggaagcgcagccggattactatgccgatagcctggccgacttcacgcagctgcttgaaaatattcaaaaatag

SEQ ID NO: 4743 - protein, 336 aa, DROSOPHILA
MPAKAVSRLWNFRARATSIQFVPVSQKTNITMSPPRHILKLSLEEQRQFIDSFDLVISDCDGVVWLLVGWIPNTGAAVNALKAAGKQIKFVSNNSFRSEEDYMEKFRHIGAKNVQEDDIVHPVKTIVRYLKKHKPGERVYSLMSLEANETLRKHNIEFESLQVKEHLTAASLVDHLAIEKPVGAVLFDIHLDLSYVELAKAIRHLQENDDCQLIAGGSDVIMPLAENLNVAGFFDFLEHVKRYTQREATFLGKPSPILGEMFGEMFEIRDCKRCIFIGDTLVQDVQFGKACGFQSLLVLSGCLTKEDMLNAPVEAQPDYYADSLADFTQLLENIQK

SEQ ID NO: 4744 - DNA, 6916 bp, DROSOPHILA
gcgctgcagtgtggttggccttttgtcgatagcggttcagaccggagtacaaattgctccacttgggctgctcggtgtggtccaccagttccgagttatcttcgattttgatctcctgctggtcctcccgcaaacgcaaagtgtccaggaattcgcccagcgcctccaggcgggcattgagcttctccaggtgcaactttaaatcgcaaagctccttggtttcggacgcgttctcctccagttgccgctgctgctgctccattgtgagtatcttttgcaccagctgatcgatctgtgcttttttttcgttatactccgaagcactgacaaaaattgcactttcattgtcggcatattctgttggggaaaggtcgaggtaagtaagaagaagtggcattgcatgttccaggttcttaccacctgacaattcgagactgtcaactggctcaggctccatccagttgttaatttcaccagagctgtccggcacggggacgctgctctggtcttgaatgctgcacgattgtttgtggatttcggttgtatctgatggtgaagatgattccattgggtatattggactgcttccatacctggattgggtattatttaagcttgagatcacagataaactgcaacacggcggcaagtccgatctcgaacacggactccgtggaactgaaaacgactctattaggatgaacaacaaagtaaatgctcccggaaaacctacgatctaattccatttgataactaaaagctcaaaaaacgaagcgacaagttaaaagattcattaaatcttttaaaataaacaccgggtaatcgataatcgattttaaaaggtgcattataaccgatcatttcgttgcgaagcgttcacactgtgggcagatggtaccaaaatatgtgcagtaggctcgatttttgatgtttaaactatttggcctgccacacgactcggcgcgatcttctgctttctaaaatatcgatagtttgtggcattgttttgatcaggtggcatctccattctgaaataaatggcgctgatttacaagcattttttgtaaaatacctatagctaaaaatgtccagtgaaaacagcgagtattatagtgacaaggaggaagactcggtggtcaacaactccagtttaggtaagtaatttttggatcgcttttagtttggtgcccagttcatgtcattcacttaacatgcaatacaggccgatcaaggaaatcctcgcggctcagcaaatcgtcgcgactcagcaaatcctcgcgccccagcagcgctggcgtggttatagatgaaacgcaatcagaggaggaagagtcccagtcgagtgagactgcggaatccgaaaagtccgatgagtccgacaactcgcaaaattcccaggagtcagaagactctgaggacgacagcgttcgtccgtccgctaggaacactaagaggaagcccttgggaatcccctccgatagcgaggatgaggaggacgagctggaacagcgcgctttgtcacccagcacccgcatgagcatcactggagtgcggcctcaggatctcagcgatgacgacagcgagatcgagtacagcgatgaagtgcaggagggacccacggaggcacccactgccgaagcggtcgtgccgcgctacaccacacagtttgctggtaatatacagaacgacctccattcgacgattggcgctgcggattctgaggtcttggacgactccagtggcagtgatgtgctcatactcagcaacaaggagacacctattgagatactatccagcacagacgacgatgccaccaccaataaggaaaacatgtccggcccgccgtttgaacgcccatcaaagtctttgtcgcccagaagcagtgctggcgcttcggtggtcaagacaagcaagaatctcagtcagccaacaatacaagcggttcttaagcaaaagacatctcctgccgctccacgtcgatctcggattaagagcgaggaccagaaggtggtcagccaggtggtctacgatgaggagatgcgtaagctggccgaaaagcgcgttcaggtaagcgatgcggagaagctcttcgagaaagtggcccacaagctgcccgataagggcagccagattatgaagcgcattgacaccctgcgccgtgagctcgcaatggacgagcaatggattagcgcactaagggttcagcagagtaatgtgcctgccgtcagagtggttaagccaacactaaatccacccagagctccatcaatcgatactcttgactgggatgagttgtcggaggcggtcaatgaaataaagcccgtctacacgggtgcccaaggaatggccacatttaacaaccagaaggcactgaccctggaatcgctaaaggtaaggttaatagggctgtcaagttagttcgtctaatatatagtcttaggatgtattttcaagtcctatgcaattattgctagtacctaaaaaccaaagactatcttttgccttactccatgtgatgagtcagaacggatatctgagaagcgtgctcatacttggcagtcgctgggcacgagttactgtgcggtggctgtccaagagcaggccatgattaaaacctcgaatactgaataagtgattcgtgcattttttttttttcatatatttgcacagaaattaatggttgtttttgtaggacctccacgtctcactcgaggaccttcctggacccgaagtgctcgcagaggaccctgttggcctgaaggtatcgcttatgaaccaccaaaagcacgccttagcctggatgtcctggcgtgaacgtaaactacctcggggaggaatcctggcggacgatatgggtttgggcaagactctaaccatgatctcgtctgtcctcgcttgcaaaaatggccaagaaatgtccgaaggcaaagatgagagcagtgacagcgacagtgaggatgataaaaataagaagcgaaaaagcgtgaccggatggaaatccaagggccgtaaagatagtaagtcgcagttagggtgtttctgttttatattcttaaattcaatagcatcatataagtggcgaatatatattacattttccagcgcgtaggggcggcacattggtggtgtgccctgccagcttgctgcgtcagtgggagagcgaggtggagtcgaaggtttcgcgtcagaagctgaccgtttgcgtgcaccatggcaacaatcgggagacgaagggaaagtaccttcgagactacgatattgtggtgacaacctaccaaattgtggcgcgggagcacaagagcttgagtgctgtgtttggtgtcaagtggcggcggatcattttggacgaggcgcacgtggtgcgcaatcataaatcgcagtcatcattggcggtgtgtgatttacgtggcaaatatcgttgggcattgactggcactcctattcaaaacaaggaactggatgtctatgccctgctcaagttcttgcgctgctcgccctttgatgatttacacacgtggaagaagtggattgacaacaagagtgctggagggcaaaaccggctcaatctgctaatgaagtcactcatgctaaggcgcaccaaagcacagttgcaatcggacggcaagctgaacagcttgcccaataaagagctgcgcctgatcgagatctcgctggacaaggaggagatgaatgtttaccaaactgtaatgacttattccaggacactgttcgctcagtttctccatcagcgcgccgagagagaaactgattttaattacagaagcgatgccaataaaccaacctacaatcaaattaaagatcccaatggggcatattacaaaatgcacgaaaagtttgccagaatggctggaagcaaaaaggaggtaaaatctcatgatatattggtgttactgctgcgtcttcgacaaatttgctgtcatcctggccttattgatgcggtgagttcgattaaaaaatagttccattaccataatttcaattgtccaaaaaaattattttaagatgctggatggagaggaatcccagaccatgggagaccacagtagtgacagcgatacacccgaaatcgatttgttggcccagctcaataaactcgcaattacggacacctccaccgacggtcagcaatcggttgccaatgcaggtgacgacggtcctccgctattgccggatgaagcccgcattgccaaggcctccaagaatctgctgaaacgcagcaacccggtatttaatctgcatcgtccctcttcaaaaattaacatggtgatacaaatccttaagacatcgattctgaagagctcggacgacaaggccatagtagtatctcagtggacgtcagtgttagacattcttcgcgaccatttgagtaaggatggtgtggcgaccttatcattaaacggtaccattccggttaaaaaccgtcaggacattgttaatgagttcaacgatcgcaacaatcagaagcgcgttctcttgctttcccttactgctggcggtgtgggtttgaacctgattggtgccaaccacctgttgcttttggatctgcactggaatcctcagttggaggctcaggcccaggaccgtatataccgcgttggccaaaaaaagaacgtgatcatttataagttcatgtgcgtggacacagttgagcagcggatcaaaggattgcaagataaaaaattggatcttgccgatggtgtccttacaggcgccaaagttagctctaaacttactatagatgaccttaaaggtttgtttggaatgtgagcttgcttttaacgtttcgtattttatcaacttccatacttattttttgtcgttttgcaaatgcattccatagataaccattttatgtttatttacagcgaaatatttattcaagattattgtaaattttgtttaatgttttcatttctttgtttcaaagctttgtattaaaattaactagaataccatttaagttgtttggtgatttataatgagttccattaaaattgaaatgtgttctactatgttttaatatcctaatttaattatttgcgttttctgtctaagcggatacaatcgaattccactacaatgtgaatagcataacatatttggtttttgtcaaactgtacaaaagaaatcttttcaaatgttaaggaaacatcattttcttatgtttagaaacgtacgctacactatttccagatcagccagatcagttctcgttctcacgaagtaataataaaccgcatgctttcttcacatagcagcgcacagcccaagaaagatgtaatgtatgtattctaaagagtaaagtacaaagggattatcttgtaggctgataatctcatatcaattacacatgttttatgtatgctcaaatagaacaattttgaataaagtgatctgataatcttttcgtttcccaaatagcttgctgttaaataattatttcgaatcgaagtgctcaagcttaggactaaaagttgttaattatgtagtcgtgcctattttaggtttaagatgtttttagtttgtgctgatcgatattaaattcttgattatttccttgcagaagaattttaaaaataactaatatacaatacatgtgttctcgaagagctactatttatcgatttttataataactcgtggcttagttcactgttttatgcttgtttatttcagttgcttgagatcaattagaaacgtttttcggggattacactttgatagtctacatgtataggattttaggattttcacatttcgctggaattattttaagcctggttaaatattaaataacattccgcagaagccgcaggtttcttccacgcggggctaattagagtcatctattttttattgatctccagtgaaaatggtgctgctacttaattatcgctgtggaagaacaaagagaaatgaattatattattgtagttggccaggattagtgagcgggcttgttaattagtttgaaattcaatattgcatttgcaacatgccgctttcgcgagtgctgtataaaaccatttttaaagccaatgatcccagtgcgcccatatgggtgcactgtctcggccataaagcccattaaaatcattgtaatgtccgacagtcagtcagagccagctgaggcgtagagcccaccaagttatcctggacagctcaccttcacctgcccgtgtcctcggactcttgagcaatgagctgcgctccggcgctcgtaaaagcaaattttatagccaccgttgcccacggacggaccaagcaagtggccagggaggtatggaggtatcggagtggctcggattggatgggatgggatgcgatgcggcagctatgtccgcacaatatgggaagcagctgggtcccgacccgagagcttgatttttataatgcgaaatgtgatttttacgacgcgttttaagataatgctgcaggcgctgaaacttgattctcgattcgttttgcctgatttctaattgtcgcagtcatttgagcttaaggcaacattggaaaccacttcgcccccacccagcgcacaaagttccttaagggcattgaacaagtcaatgaacaatgagatgtaagccctaaacaaataaataaattagcaaaatcaaagcacggaatggcattcctgggttttgtgagctaaagtgaaattcgaaaaatccttttttcacttttggattgataaggactaacagctttagctacttttttaccatacatttcatataaattgctcttagttttagaactcaaatttataaacacatataatacaacaaagttcgccattgtgcaaaggaccctattattttggccatagagtacaccctattccctgtacttctggagtttagcgtcttaatgtgttttttatttgcctttg

SEQ ID NO: 4745 - DNA, 4398 bp, DROSOPHILA
attgttttgatcaggtggcatctccattctgaaataaatggcgctgatttacaagcattttttgtaaaatacctatagctaaaaatgtccagtgaaaacagcgagtattatagtgacaaggaggaagactcggtggtcaacaactccagtttaggccgatcaaggaaatcctcgcggctcagcaaatcgtcgcgactcagcaaatcctcgcgccccagcagcgctggcgtggttatagatgaaacgcaatcagaggaggaagagtcccagtcgagtgagactgcggaatccgaaaagtccgatgagtccgacaactcgcaaaattcccaggagtcagaagactctgaggacgacagcgttcgtccgtccgctaggaacactaagaggaagcccttgggaatcccctccgatagcgaggatgaggaggacgagctggaacagcgcgctttgtcacccagcacccgcatgagcatcactggagtgcggcctcaggatctcagcgatgacgacagcgagatcgagtacagcgatgaagtgcaggagggacccacggaggcacccactgccgaagcggtcgtgccgcgctacaccacacagtttgctggtaatatacagaacgacctccattcgacgattggcgctgcggattctgaggtcttggacgactccagtggcagtgatgtgctcatactcagcaacaaggagacacctattgagatactatccagcacagacgacgatgccaccaccaataaggaaaacatgtccggcccgccgtttgaacgcccatcaaagtctttgtcgcccagaagcagtgctggcgcttcggtggtcaagacaagcaagaatctcagtcagccaacaatacaagcggttcttaagcaaaagacatctcctgccgctccacgtcgatctcggattaagagcgaggaccagaaggtggtcagccaggtggtctacgatgaggagatgcgtaagctggccgaaaagcgcgttcaggtaagcgatgcggagaagctcttcgagaaagtggcccacaagctgcccgataagggcagccagattatgaagcgcattgacaccctgcgccgtgagctcgcaatggacgagcaatggattagcgcactaagggttcagcagagtaatgtgcctgccgtcagagtggttaagccaacactaaatccacccagagctccatcaatcgatactcttgactgggatgagttgtcggaggcggtcaatgaaataaagcccgtctacacgggtgcccaaggaatggccacatttaacaaccagaaggcactgaccctggaatcgctaaaggacctccacgtctcactcgaggaccttcctggacccgaagtgctcgcagaggaccctgttggcctgaaggtatcgcttatgaaccaccaaaagcacgccttagcctggatgtcctggcgtgaacgtaaactacctcggggaggaatcctggcggacgatatgggtttgggcaagactctaaccatgatctcgtctgtcctcgcttgcaaaaatggccaagaaatgtccgaaggcaaagatgagagcagtgacagcgacagtgaggatgataaaaataagaagcgaaaaagcgtgaccggatggaaatccaagggccgtaaagatacgcgtaggggcggcacattggtggtgtgccctgccagcttgctgcgtcagtgggagagcgaggtggagtcgaaggtttcgcgtcagaagctgaccgtttgcgtgcaccatggcaacaatcgggagacgaagggaaagtaccttcgagactacgatattgtggtgacaacctaccaaattgtggcgcgggagcacaagagcttgagtgctgtgtttggtgtcaagtggcggcggatcattttggacgaggcgcacgtggtgcgcaatcataaatcgcagtcatcattggcggtgtgtgatttacgtggcaaatatcgttgggcattgactggcactcctattcaaaacaaggaactggatgtctatgccctgctcaagttcttgcgctgctcgccctttgatgatttacacacgtggaagaagtggattgacaacaagagtgctggagggcaaaaccggctcaatctgctaatgaagtcactcatgctaaggcgcaccaaagcacagttgcaatcggacggcaagctgaacagcttgcccaataaagagctgcgcctgatcgagatctcgctggacaaggaggagatgaatgtttaccaaactgtaatgacttattccaggacactgttcgctcagtttctccatcagcgcgccgagagagaaactgattttaattacagaagcgatgccaataaaccaacctacaatcaaattaaagatcccaatggggcatattacaaaatgcacgaaaagtttgccagaatggctggaagcaaaaaggaggtaaaatctcatgatatattggtgttactgctgcgtcttcgacaaatttgctgtcatcctggccttattgatgcgatgctggatggagaggaatcccagaccatgggagaccacagtagtgacagcgatacacccgaaatcgatttgttggcccagctcaataaactcgcaattacggacacctccaccgacggtcagcaatcggttgccaatgcaggtgacgacggtcctccgctattgccggatgaagcccgcattgccaaggcctccaagaatctgctgaaacgcagcaacccggtatttaatctgcatcgtccctcttcaaaaattaacatggtgatacaaatccttaagacatcgattctgaagagctcggacgacaaggccatagtagtatctcagtggacgtcagtgttagacattcttcgcgaccatttgagtaaggatggtgtggcgaccttatcattaaacggtaccattccggttaaaaaccgtcaggacattgttaatgagttcaacgatcgcaacaatcagaagcgcgttctcttgctttcccttactgctggcggtgtgggtttgaacctgattggtgccaaccacctgttgcttttggatctgcactggaatcctcagttggaggctcaggcccaggaccgtatataccgcgttggccaaaaaaagaacgtgatcatttataagttcatgtgcgtggacacagttgagcagcggatcaaaggattgcaagataaaaaattggatcttgccgatggtgtccttacaggcgccaaagttagctctaaacttactatagatgaccttaaaggtttgtttggaatgtgagcttgcttttaacgtttcgtattttatcaacttccatacttattttttgtcgttttgcaaatgcattccatagataaccattttatgtttatttacagcgaaatatttattcaagattattgtaaattttgtttaatgttttcatttctttgtttcaaagctttgtattaaaattaactagaataccatttaagttgtttggtgatttataatgagttccattaaaattgaaatgtgttctactatgttttaatatcctaatttaattatttgcgttttctgtctaagcggatacaatcgaattccactacaatgtgaatagcataacatatttggtttttgtcaaactgtacaaaagaaatcttttcaaatgttaaggaaacatcattttcttatgtttagaaacgtacgctacactatttccagatcagccagatcagttctcgttctcacgaagtaataataaaccgcatgctttcttcacatagcagcgcacagcccaagaaagatgtaatgtatgtattctaaagagtaaagtacaaagggattatcttgtaggctgataatctcatatcaattacacatgttttatgtatgctcaaatagaacaattttgaataaagtgatctgataatcttttcgtttcccaaatagcttgctgttaaataattatttcgaatcgaagtgctcaagcttaggactaaaagttgttaattatgtagtcgtgcctattttaggtttaagatgtttttagtttgtgctgatcgatattaaattcttgattatttccttgcagaagaattttaaaaataactaatatacaatacatgtgttctcgaagagctactatttatcgatttttataataactcgtggcttagttcactgttttatgcttgtttatttcagttgcttgagatcaattagaaacgtttttcggggattacactttgatagtctacatgtataggattttaggattttcacatttcgctggaattattttaagcctggttaaatattaaataacattccgcagaagccgcaggtttcttccacgcggggctaattagagtcatctattttttattgatctccagtgaaaatggtgctgctacttaattatcg

SEQ ID NO: 4746 - protein, 1061 aa, DROSOPHILA
MSSENSEYYSDKEEDSVVNNSSLGRSRKSSRLSKSSRLSKSSRPSSAGVVIDETQSEEEESQSSETAESEKSDESDNSQNSQESEDSEDDSVRPSARNTKRKPLGIPSDSEDEEDELEQRALSPSTRMSITGVRPQDLSDDDSEIEYSDEVQEGPTEAPTAEAVVPRYTTQFAGNIQNDLHSTIGAADSEVLDDSSGSDVLILSNKETPIEILSSTDDDATTNKENMSGPPFERPSKSLSPRSSAGASVVKTSKNLSQPTIQAVLKQKTSPAAPRRSRIKSEDQKVVSQVVYDEEMRKLAEKRVQVSDAEKLFEKVAHKLPDKGSQIMKRIDTLRRELAMDEQWISALRVQQSNVPAVRVVKPTLNPPRAPSIDTLDWDELSEAVNEIKPVYTGAQGMATFNNQKALTLESLKDLHVSLEDLPGPEVLAEDPVGLKVSLMNHQKHALAWMSWRERKLPRGGILADDMGLGKTLTMISSVLACKNGQEMSEGKDESSDSDSEDDKNKKRKSVTGWKSKGRKDTRRGGTLVVCPASLLRQWESEVESKVSRQKLTVCVHHGNNRETKGKYLRDYDIVVTTYQIVAREHKSLSAVFGVKWRRIILDEAHVVRNHKSQSSLAVCDLRGKYRWALTGTPIQNKELDVYALLKFLRCSPFDDLHTWKKWIDNKSAGGQNRLNLLMKSLMLRRTKAQLQSDGKLNSLPNKELRLIEISLDKEEMNVYQTVMTYSRTLFAQFLHQRAERETDFNYRSDANKPTYNQIKDPNGAYYKMHEKFARMAGSKKEVKSHDILVLLLRLRQICCHPGLIDAMLDGEESQTMGDHSSDSDTPEIDLLAQLNKLAITDTSTDGQQSVANAGDDGPPLLPDEARIAKASKNLLKRSNPVFNLHRPSSKINMVIQILKTSILKSSDDKAIVVSQWTSVLDILRDHLSKDGVATLSLNGTIPVKNRQDIVNEFNDRNNQKRVLLLSLTAGGVGLNLIGANHLLLLDLHWNPQLEAQAQDRIYRVGQKKNVIIYKFMCVDTVEQRIKGLQDKKLDLADGVLTGAKVSSKLTIDDLKGLFGM

SEQ ID NO: 4747 - DNA, 3923 bp, DROSOPHILA
ggatccggaaaagtgggctttaatctcggtggggcgtcggtatcaaaatggcaggttgttcggctcagtcttctctttgttactttgtggcagtggaactatagcgccggttttatcaccaaatagccgtacgtacgtacagctgatatacagtcttatccgttgtttgcgagaccagctaatctaagtggtaaatgtaaatggtttggattggtgggtgttctctgtgagccgtgcctctatgtgatatatacatatctacggggcaaaaagcattcccgttaacgcaaacaaagcagtattttctgaaatttcaatgaccgggttgccttgttttgatttctcttttaattttgtttttgttttgttttggcgttgccagctgacaggagaatcgataagaaaatcgttaacactctgctgccctgtgcaatattcttttagctattttattaattgctaattatttatttgtgcagtctatgacttatcttaatttgtacttttaaatttgaagattttagttcctcatcgtgcgctgaaacaatgattgaccaatatgattgtgtaatttatttccaaagccatatataacgtatatataaacatattagttttttttgtcgcctgtgccgatccagataacaaactactattttgaaattggcgtaacaggtaggtaggcattatcgccagttgcccatctctattgtatgaccgtgggcccggcaatcgattggcttacaacttatcgatgtttgaaaactaaccaaaaaccctgtaacataggcttgtaattaaaactagaaaataccattacatagctatgcactgcaatgcataaattaactaacagacctatacaggcccttaaattggtaagaaaactgatcgctaaaattaaagcgaaagagtggattttttaggacaaaaataccggtcggtcgagaacatttggggggaaaatcatgtcgccatctggtaacactggcattcagcagagcagtgaaaacgacgttaatatttctgatcaattaaacaattggaaaatccggccgcagatcgcgatctaaacgtatcgccctcgccacgcccactgccgcccacgccccctggcgcggggtcacatcgatagagagctttgcgtgtgtgtgtgtgtgcgtgcgtgtatgtgtcggtcgagaggagaggtggaagacgaagaagaataaaaaaaacaggcagcgaaaagcgataagaaacggaacacaacacactggaaaaaaattgcgataagaaacggggcggagcggagcggaaattgccaagactctgggatggattagcggcacagccggactctgaggttagccaacagtgggattaggaccaggaacagccatgtcctccgccgttaacatccagatcgtctctatgccgaatctggccaagatcgagagcttcctgaaggatgtcagctaccgggagacgatcgagtacagtgccaacttcaacacgcgcctgtgcagcgaacggcgccaccggctgcccttcctcgatccgcagacaggcgtcgcccagaaccactcgcagctcttcctggacaagcgacagcggatgcccggcttccggcagggccagatctacacgtatccggcggcccgctggcggaagagccgtcgtcagtacttgagcaagatgtacaggtgaggaatcgtaaccaatcggtgcgggatttgagtgactggcacatgcacaaggaaaagttaggtataactctggcgaagcaaattagagcttggaaatctaggagtctgttacctatggtaatcttatttaaaacgagttaggttagaagaatatcatctgtgtatatgccattcaatctcatcaaatcctacatttttcgttgggtgagctccatatttatccctgctaataacgaactttccacttatacagccgctttcccgagcgtcccttccaggcgctacgcaaggagcacgaagctctggtggccagcggcgtcaatctgggactgagcagcctgaccagcggtgtgggctccatgcccggcagcaatagcctggccagcagctcctccctaacgctcaatatgcttacgggcggcggagccgcgccggccgtacttggttccctgcacagtgacactgcccacgattttaatggagccttcagcctggaggagtccagctcgctgggtgccgccggcggtgatacatccgacagcaaggacagtcaacagcaacaacatcagcagcaccagcaccagcagcaggccgtcaaagaggagcttttgcccaaggagtggttctacgatgacatggatatgaacgatgtggactcgctggaggagcccaaatcgccggcggatgatgagtacgattatgatccgcgctatggtaacaaaaaaaggcgcaagcggcgaccaggcaagcgaggtggagattccggcggcggtggtggtggaggaggcgccggcggtggcggcaattccggcggtagctccagctcgcggagacgcagtgcagcggccaggtcgcgtatcacaacgacggatgcggcgctggacgcatcgctggaggccattgaatctggcgagagtgtgccaggcagcaatggaggaccaatctccagcggaggcatcctaagcggcagcctgggagcaggcttagcgggagtttcgggatccggcggcggaggaggagcatcgggagcttcggccaacagccgcagatcgcggggagcgggaacacgtggcaggcgacgagccaaggggccaaatagcgccgttggagcgtcttgcgatccgacaagtcccggcatggtcatcgagccaccatccttcgagagtgccgctgctgcggtgggcgtggtcgaggacgcgaacgcccatctgcgcaactatcggaagtatctgtaaccgctctatcagcaactaactggacgtgtaatcaatcaaagccttgtttttcgcaatgttttctcgcctattgaatcgacctactttttcgcacataatttaaatatagtttttaagccttagttgatcactgtttgttgcccccctccgacaaaaggataaaagccaagcaagaaatgaaagaaaggaaacaaatacattgtggaccagggacagaaacaggattagaatcaggataacgatcagaaccgcgcaccaggccgtagccaatacaattccaatgtttcgcctctcttaactttacgttcccatagccaattgattgttgttttttaaactagcaatggactggtgaacttctactataggataacttgagcggaaacttatggatgtagcaaatattcttcgagcaattttgtaatgtaggaaaccctttaggccatcaattattaacgttgtataagttagacaatgaatttaaaaagaacctttttcgtcatcgttaggcaattcgtaatcaattattttcgggcatcatctatgccataagtgaaacagcacaatttgaactatgtatagttttgcaatacacgactatatttcacatctggtttccgaagttttgcttagagcagttcgccagaccattgcattatattgtacattatatatatgggtgtacagacattatatacatatatatatatatacatacttgcatgcattgtatttgcgactctacttaaggcaagtccaccttttggactggctctccacctaatcgcaatctctcggtttctgttgctgcatgttcttaatactatttcacctagctccccacccctccccacatattatattcaattttttttatttaaccaaaattttagttaaaaaagagacaattcagattgtaatctatttaggcaagtggtagggtatctctagcattagaagaagctaaaagtaaaaacaatttcgtaaaaccaaaattttt

SEQ ID NO: 4748 - DNA, 1667 bp, DROSOPHILA
gagcagtgaaaacgacgttaatatttctgatcaattaaacaattggaaaatccggccgcagatcgcgatctaaacgtatcgccctcgccacgcccactgccgcccacgccccctggcgcggggtcacatcgatagagagctttgcgtgtgtgtgtgtgtgcgtgcgtgtatgtgtcggtcgagaggagaggtggaagacgaagaagaataaaaaaaacaggcagcgaaaagcgataagaaacggaacacaacacactggaaaaaaattgcgataagaaacggggcggagcggagcggaaattgccaagactctgggatggattagcggcacagccggactctgaggttagccaacagtgggattaggaccaggaacagccatgtcctccgccgttaacatccagatcgtctctatgccgaatctggccaagatcgagagcttcctgaaggatgtcagctaccgggagacgatcgagtacagtgccaacttcaacacgcgcctgtgcagcgaacggcgccaccggctgcccttcctcgatccgcagacaggcgtcgcccagaaccactcgcagctcttcctggacaagcgacagcggatgcccggcttccggcagggccagatctacacgtatccggcggcccgctggcggaagagccgtcgtcagtacttgagcaagatgtacagccgctttcccgagcgtcccttccaggcgctacgcaaggagcacgaagctctggtggccagcggcgtcaatctgggactgagcagcctgaccagcggtgtgggctccatgcccggcagcaatagcctggccagcagctcctccctaacgctcaatatgcttacgggcggcggagccgcgccggccgtacttggttccctgcacagtgacactgcccacgattttaatggagccttcagcctggaggagtccagctcgctgggtgccgccggcggtgatacatccgacagcaaggacagtcaacagcaacaacatcagcagcaccagcaccagcagcaggccgtcaaagaggagcttttgcccaaggagtggttctacgatgacatggatatgaacgatgtggactcgctggaggagcccaaatcgccggcggatgatgagtacgattatgatccgcgctatggtaacaaaaaaaggcgcaagcggcgaccaggcaagcgaggtggagattccggcggcggtggtggtggaggaggcgccggcggtggcggcaattccggcggtagctccagctcgcggagacgcagtgcagcggccaggtcgcgtatcacaacgacggatgcggcgctggacgcatcgctggaggccattgaatctggcgagagtgtgccaggcagcaatggaggaccaatctccagcggaggcatcctaagcggcagcctgggagcaggcttagcgggagtttcgggatccggcggcggaggaggagcatcgggagcttcggccaacagccgcagatcgcggggagcgggaacacgtggcaggcgacgagccaaggggccaaatagcgccgttggagcgtcttgcgatccgacaagtcccggcatggtcatcgagccaccatccttcgagagtgccgctgctgcggtgggcgtggtcgaggacgcgaacgcccatctgcgcaactatcggaagtatctgtaa

SEQ ID NO: 4749 - protein, 428 aa, DROSOPHILA
MSSAVNIQIVSMPNLAKIESFLKDVSYRETIEYSANFNTRLCSERRHRLPFLDPQTGVAQNHSQLFLDKRQRMPGFRQGQIYTYPAARWRKSRRQYLSKMYSRFPERPFQALRKEHEALVASGVNLGLSSLTSGVGSMPGSNSLASSSSLTLNMLTGGGAAPAVLGSLHSDTAHDFNGAFSLEESSSLGAAGGDTSDSKDSQQQQHQQHQHQQQAVKEELLPKEWFYDDMDMNDVDSLEEPKSPADDEYDYDPRYGNKKRRKRRPGKRGGDSGGGGGGGGAGGGGNSGGSSSSRRRSAAARSRITTTDAALDASLEAIESGESVPGSNGGPISSGGILSGSLGAGLAGVSGSGGGGGASGASANSRRSRGAGTRGRRRAKGPNSAVGASCDPTSPGMVIEPPSFESAAAAVGVVEDANAHLRNYRKYL

SEQ ID NO: 4750 - DNA, 4583 bp, DROSOPHILA
tattgaattcaattctatgcaatcaaagcgaaaccacaaacccaaaatggctgtaaagaaaaatttaattaaatttcaaaggcttttggcatgctataaatattatatgtattttgcgattcacatgcttccttttcttcctttcaattgcatttcttacaaatcctctgcgatacacgtgattgaaggcgattgacatacatacatatgtatgtatgtaagtattgatcggtggtgcatcggccttttgttgctgctgttgttcgctcaagcttataacaggcaggcacaaacgtgtacagtgaacactcgaggaaacatgtatgagcacgctttcctcagttcgaaaagcaaaggtacagttgacgcatggagaaactaataagtatgatgacaattgcgaaagttcagcagcgtagacaacagaatgcctgtcgccctacggaggtcccactgtgctgggccgtagaccctggccacacatgtcaacaccttgacattgatggctgcggcatttggccaacggaagcggagagggggaaatggaaaagccgccggaacggaggaaaccacaaatggccaataattcaaattcaaatgcaacatttcaattggcggggtccggaagacgctcgtgtccatgtccgcgtccgcggcggtgaaggcaaaagaactggccaacggggcgggtacttgatgtgcgagcgcgtgtgagtcgcgtcgcttggggttcggctgcgtttttggtttggtttggtttggtttggttggttttggctgcggctttttggtatatcgcatcacaagtccaaatcgattgccgggccagctagtttagttaggcgtctccctgataagatacgaaagtacgagttgcgaacgcttgcgaagaattccgccagaagaaaagcacattcggccacctgagcttggagcaactgttcccggcggttatacaaccagacgacaactagtcaaaaactaaggaaaattgccgaaaatgtctaccctggccaatggtggaaaggaggaggatctaaaaattctggctcagctgaagagcatcgaacagatcaacgagcagcgccgcatatttctcaacagcacgatcaatgaggaggtgccggaggccacaaacggatcgacggttcgggaggaggacctggagaagaatctgaaggccatagacgagccgcagtctacgaagatgcccccggaggaggtggcgaagaaaacgcctgatgaggtcccagcccaggagcagcagaaggaacccgaaaaggtggagccagccaaaccagtgccccccaacacgctcaccctgaacgtgaaatacgccacgctgccaagtccgaatgtggtgaccctgcgatccccactttcgccgccccctaagccgccaatgctgggccgcacccgcagtacaggtcccgccgatggcaagggtccagcgagcaatggagctctctcgccggacagctccataatccgtcagagctttcccgaaggcgtcatcacgcccagcaagccggaaaagagccctgccacgcccagcgaggaaggcccgccgaccgtctccgcccgccactacgagggactgatcgaggagctgaggtgtcccggctgtgccggcgccatgaaggcgcccatccttctgtgcaagagtggccacagtgtctgtgaacagtgcacccgcattttgctcatgtgcccgctctgcaaggtaaaaattgacgtcagctcgccaaaagtgttgttcggttatcaatatcatattgccccaatgtgcgctccttatctagtgacgtgcaaatatacattggtatagactaaggaaaagctactcgcagattgccatcatcgacaggcgcaggacagaatgatctccggtggagattagtttattacccagccgagggtgtctaatcaattttcaagtgcagccccactatctgcactacaagtgtgactataaaaaataagccttgtcttgcactaggaaatgtgtggtgccaccagttcactcttctagggcatatttattagtgccatcttctaaatatccaaccgaatctgaaatctgcaagaaggaagtcgatattaacgtttgctcggacttttccatagataaacttgtatgctcgctaaccaatggacaaaataagtacatcgaaaagcccgtgtcatactatcactatgataagtatgataaagtgtatagtttcttcatcatcaagttctttccatcaatactaggaaatggggcatatgatatgggtaacacacatcacattcgaacttgcacactaaattgtatgccaatcccgatgtcaatgcaaataactttatgtttcaggaacccttcaccaactcccgatcgctgaccgtggaggcgctgtgcgccaaggcgcacttccggtgcggacacgcctccggcggctgccaggtgcggatgccggtcgtcctgctgccgtggcacgaacagcagtgcatgtacaagccgatgaagtgcttcatgggccgagtgtggggcgattgccgctggcaggggcgcgaggtgcagtggaaagagcatctggaggagcagcacgacgaccgcctgtttcggtcaagcagcgctgatctggaatggaatctaggcacgcggcggaaaccgttaaccggctactatgtcttccaggcgcacgacgaaatgttcaacttctacgagatccacgaccgccagcgtgtgctgttcaccatgacctgcacgtcgaaccggcgggacagcaagtacaacttcgcctacgaggtgacggtgctgctgccagacaacgaggcgctgtccatgacccagaagtttcccgtgcacagcgagtacgacaaggacatcctcatggagggcacatgtgtcagcattccgctgacggagcttaaccgctttctggaccaggacaaggtgagggagtacttagcaccaaatgtccagcattctaactaatccactcattcgacgaccacccggcaggttcttcattaccgcgtgagtgtgctggcggtcaagtcgccgcgtcgcgcaaaaccacctcgccaaaatctgccgcagccggcggacctggaacaggccccgaatggaggcgtcaacgtgaagagcgtgccgaccaacatgatcattacgcgcacctacaaggaggccatcggcgaggtgaccaaagcggatgtggccagtccggactcggaggaggatccggctgcagccgacggcgctggggccattggagccgacggagccggcggtgtggagctcgagcgcaagtggggcacaccgcagctgcacttcaatcggaaatatctgcggaacactctgaacgatgccacgcccgcggaggatgagctgcgtccgctggccgccgatctgcgcaatggaaatggcgacgataagctctcccagtgcagcaacagcacgagttacacgaaaaaggtgtcggattcgctgcgaagaagcttccgggcactcaaggcggatatcgtggagctgcgcccgttcagcaagaaggcagtcagggatggatcgacctctccggtccaaagcaatggcaagtagtgattccgtgtgtgtgccttttctaattcgtcaacagtcgcaagagttgaaagcatgtaaatatagcaaatgttttaatctattgtatatgtactaaaaccgaaataaataaaataaaaaataaaaaaaaaaaaacaaattatactccacacacgttcgttacttgaatctcagtccgtagcaagctgcgaatgaaacgagtttggtttggtattggtttggatgacacgttttatctaggacttagactactcagctaccactacgcgactccttttgcgtgctacagcaagccctgcatctcgttcatgaactgcagataggcgtcatccttggtgggcggcttgctgtgcgcctcggagtgggcgtggtgtccatcgttggccgcatgcctgggcctcgccgtgcgtcgctgatcctcgcgcttcactcgcaacgtggacggtacaaagcgggtgacatccgcactcagattcctaatgagtaagtttggaatgtttagtaatgggaattggttctactgcgccggaaagtcatcgaacccacctgatttgtggcttggctgtaatagtggccacacccttggctgactcctttggtgcacctgcgccgcctccctgcttattgtggtgcgcaaggcgcggaggcagacctggcggcggtcctggtggcatcctgatgcccatgcgcggtattggtcccaggccatgcggtgccctgggtcctggcggcggtccaggtggcatgcgtatgccaaagccggaacccgggtgaggaggtcgcatgggtggaggtcggtacattatgccaggtggcccaagattaggaattggcggtaggtgtggcagctgtggcggcgcaggcacagacgacgctggtggcagcggaatagtcggcaatgtgggcgctgtcggaggagctggcgcgggtgtcgctgtagatgatttgactgatgctggcttggtcggcacttcgggcatattttcatcctcatcctggt

SEQ ID NO: 4751 - DNA, 1881 bp, DROSOPHILA
atgtctaccctggccaatggtggaaaggaggaggatctaaaaattctggctcagctgaagagcatcgaacagatcaacgagcagcgccgcatatttctcaacagcacgatcaatgaggaggtgccggaggccacaaacggatcgacggttcgggaggaggacctggagaagaatctgaaggccatagacgagccgcagtctacgaagatgcccccggaggaggtggcgaagaaaacgcctgatgaggtcccagcccaggagcagcagaaggaacccgaaaaggtggagccagccaaaccagtgccccccaacacgctcaccctgaacgtgaaatacgccacgctgccaagtccgaatgtggtgaccctgcgatccccactttcgccgccccctaagccgccaatgctgggccgcacccgcagtacaggtcccgccgatggcaagggtccagcgagcaatggagctctctcgccggacagctccataatccgtcagagctttcccgaaggcgtcatcacgcccagcaagccggaaaagagccctgccacgcccagcgaggaaggcccgccgaccgtctccgcccgccactacgagggactgatcgaggagctgaggtgtcccggctgtgccggcgccatgaaggcgcccatccttctgtgcaagagtggccacagtgtctgtgaacagtgcacccgcattttgctcatgtgcccgctctgcaaggaacccttcaccaactcccgatcgctgaccgtggaggcgctgtgcgccaaggcgcacttccggtgcggacacgcctccggcggctgccaggtgcggatgccggtcgtcctgctgccgtggcacgaacagcagtgcatgtacaagccgatgaagtgcttcatgggccgagtgtggggcgattgccgctggcaggggcgcgaggtgcagtggaaagagcatctggaggagcagcacgacgaccgcctgtttcggtcaagcagcgctgatctggaatggaatctaggcacgcggcggaaaccgttaaccggctactatgtcttccaggcgcacgacgaaatgttcaacttctacgagatccacgaccgccagcgtgtgctgttcaccatgacctgcacgtcgaaccggcgggacagcaagtacaacttcgcctacgaggtgacggtgctgctgccagacaacgaggcgctgtccatgacccagaagtttcccgtgcacagcgagtacgacaaggacatcctcatggagggcacatgtgtcagcattccgctgacggagcttaaccgctttctggaccaggacaaggttcttcattaccgcgtgagtgtgctggcggtcaagtcgccgcgtcgcgcaaaaccacctcgccaaaatctgccgcagccggcggacctggaacaggccccgaatggaggcgtcaacgtgaagagcgtgccgaccaacatgatcattacgcgcacctacaaggaggccatcggcgaggtgaccaaagcggatgtggccagtccggactcggaggaggatccggctgcagccgacggcgctggggccattggagccgacggagccggcggtgtggagctcgagcgcaagtggggcacaccgcagctgcacttcaatcggaaatatctgcggaacactctgaacgatgccacgcccgcggaggatgagctgcgtccgctggccgccgatctgcgcaatggaaatggcgacgataagctctcccagtgcagcaacagcacgagttacacgaaaaaggtgtcggattcgctgcgaagaagcttccgggcactcaaggcggatatcgtggagctgcgcccgttcagcaagaaggcagtcagggatggatcgacctctccggtccaaagcaatggcaagtag

SEQ ID NO: 4752 - protein, 414 aa, DROSOPHILA
MKAPILLCKSGHSVCEQCTRILLMCPLCKEPFTNSRSLTVEALCAKAHFRCGHASGGCQVRMPVVLLPWHEQQCMYKPMKCFMGRVWGDCRWQGREVQWKEHLEEQHDDRLFRSSSADLEWNLGTRRKPLTGYYVFQAHDEMFNFYEIHDRQRVLFTMTCTSNRRDSKYNFAYEVTVLLPDNEALSMTQKFPVHSEYDKDILMEGTCVSIPLTELNRFLDQDKVLHYRVSVLAVKSPRRAKPPRQNLPQPADLEQAPNGGVNVKSVPTNMIITRTYKEAIGEVTKADVASPDSEEDPAAADGAGAIGADGAGGVELERKWGTPQLHFNRKYLRNTLNDATPAEDELRPLAADLRNGNGDDKLSQCSNSTSYTKKVSDSLRRSFRALKADIVELRPFSKKAVRDGSTSPVQSNGK

SEQ ID NO: 4753 - DNA, 3161 bp, DROSOPHILA
tttaatttggccactttgtaattcaaaaagcacacagaagaaacatttataaaatataataaaaaataaaaatagcgaggattaaattagcagactttaatttcgccaaactacacaataatatatatataatttttatcaattgaactctcgatatatgttgctagtcaagtgtctttacctgtgtaaaaattaattaggttacttaaaccaaaactgataaaacccatacaggcgcataaaaagaaaaatagaagaccaaaaaattcaacaaaccaagtaaaatgtacgttttttatatttatgagaagattaacttataattggtgaattattaatgtagcttattagcttatttaatcttgtggaactcctccatgcatagcttgcagctccaagaaccctctggtggagtcacaagcggtggtgacaggcagtacatatggtatccccggtcacaatcgtcacaaaataaaagttgatcgtcattatcagaggtcccacagatggagcagtacttgcattcaatgcattgccaacgataacgttttaccgatataatcatatttgccgtgaactgcagacacgatggatgaccggaacgaccacagtccgagcacgatactagctcttcgggcatattggtttttttattttctcgttgatctcccagacaaaagtcacaataaggtgatggttgcgctatgtcacgttctacacgttgtttgaccttattaccagtagcaaacaccgtttgatttgttcctgtttgcaccggatgcgcattgcaaacatttgaggttgtcaggcccgcgtttatggcaaccattgttgctaggggaattgagtcattggaagctccagcatcgcttgaagtcttatcgtacgacgacgatatgtttgttggcagtatgagtcctgactgtgaattgtcgtcatttatgggaataggcgaagctgagttggaatgagatgcatagagcccagtgctagcgacagcagctgcagtacatgctgcatgtgcgacagcggcggcagctgccgctgcggctgcggatgtatttgcactatttccaccggctctacgttttcgatcagattctccctcaacggcgttctttcgacgattgcctagggtatcaataacgtttacaattcatcagcttaataaacttgtactcaccaccacctttacgtccccgtttgggagtaccctctacgtttgcatttgttcgtctaggacgcgaacactttttgcgtttgccccggctggtgtaagactcatcaaaatcgttatctgaatcaaagtcatcctcaaattcatcgccatgatgaaaatgtgatgtgtccatttcatcgtggaaccattctttttcgacgtttgcatgtgagtccttactatcattatctcctgatgctcccatggagttgccatccgtagcagcaatggctgtaaataaaaacccataataaatataaatgtcagatgtataaaatattgactttcatccgacgataagctgcaattttttacctgcgctttcagctaagtgaggattttgtggtacagcaacgccagacgaaggtatatgatggtgatgctgatgcgtttgatggtgggagtgctgaaggttgtgctcgcgatactgataggctcggaaactttgattcgggttaagtaagtactgacgttttggtttgcgccaccgagacgatggataagtgtatatctgaccatgtcgaagacctggcattcgctgtttttttttcataaagagggagcaatgtgtctgtgcgacacctgtctggggatcgaggaatggcatgcgaagtcgacgttcaatgcatagacgagtgttgaaattctcgctgttttctagaatctccttgtacttttccttgtcatttaaaaagttctgaattttttcaaaattggcaatgtttactaccaaagttttttcgtacgcagatttggaagccatgttgatgccgagtggtagccgcaggaattatttggttaagcaatagctaaactaaagagctaaattgtcaacatatttttttgtcattgataaaatttatgtttcttcacacacaattcaagctgatacaaataacaaaatatagaattgttatggggcactaggcaagaagtacaaaattaaatatttagaaaaggtgtgaacgtatttctattttaaaatagatacaaaatgtatatcaaagttctcgaccatagttataataagttatttccacaagtgctccctaatgcgcaattcacaacttcttgatacgtaacaataagttaacattaacaataagttctgtagcaaaagttcttgatccagtgctaagaaataaacattgcattaaaagaatttatttatttttttttgtttttataccattgatgctatattttttaattccgaatttttatcgcattgaaggagaattttcggagtgtgaaagtctcttaatgcttaacggctggtcatatcgtctcgaattagtcatgttcaaaatgtactgagtttgacttttaaatagttattcaaaattttttttaagaatatatgttatttatccaatttagccatattgatgaaaatgataaacataaccctcttcatgaaaaccacttctttatttctattcacactggtgaaatttattcagtcgttttgaatttgacaattctatttgaattttttgatgtagatgtatagcaagtgtattaaaacaaatacaaaaacatttaaaacacgaaatcaacaccgcaggggtcgatagttaaatcgaagttttaaagtctgtatacattagatataaatttattaaagatcaatcattcgccagaagttaaaccataggcgttggatctcattaaattgtaccgcaaacttccttgacaaggataccatctgctccatttctaaacccgctactcgtagactaaaagggtacactggattcgttaaaaaataggtaacaacccgaaggaacggtttctgatcacataaagtatatatattcttgatccgattaatagccgagttgaattggccatgtccgtccgcatgaacgtcgaaagctcaggaactattaaagctataaggttgagattaagcatgcagatccagaagcattcacaaact

SEQ ID NO: 4754 - DNA, 1077 bp, DROSOPHILA
ttttgtacttcttgcctagtgccccataacaattctatattttgttatttgtatcagcttgaattgtgtgtgaagaaacataaattttatcaatgacaaaaaaatatgttgacaatttagctctttagtttagctattgcttaaccaaataattcctgcggctaccactcggcatcaacatggcttccaaatctgcgtacgaaaaaactttggtagtaaacattgccaattttgaaaaaattcagaactttttaaatgacaaggaaaagtacaaggagattctagaaaacagcgagaatttcaacactcgtctatgcattgaacgtcgacttcgcatgccattcctcgatccccagacaggtgtcgcacagacacattgctccctctttatgaaaaaaaaacagcgaatgccaggtcttcgacatggtcagatatacacttatccatcgtctcggtggcgcaaaccaaaacgtcagtacttacttaacccgaatcaaagtttccgagcctatcagtatcgcgagcacaaccttcagcactcccaccatcaaacgcatcagcatcaccatcatataccttcgtctggcgttgctgtaccacaaaatcctcacttagctgaaagcgcagccattgctgctacggatggcaactccatgggagcatcaggagataatgatagtaaggactcacatgcaaacgtcgaaaaagaatggttccacgatgaaatggacacatcacattttcatcatggcgatgaatttgaggatgactttgattcagataacgattttgatgagtcttacaccagccggggcaaacgcaaaaagtgttcgcgtcctagacgaacaaatgcaaacgtagagggtactcccaaacggggacgtaaaggtggtggtgagtacaagtttattaagctgatgaattgtaaacgttattgataccctaggcaatcgtcgaaagaacgccgttgagggagaatctgatcgaaaacgtagagccggtggaaatagtgcaaatacatccgcagccgcagcggcagctgccgccgctgtcgcacatgcagcatgtactgcagct

SEQ ID NO: 4755 - protein, 252 aa, DROSOPHILA
MASKSAYEKTLVVNIANFEKIQNFLNDKEKYKEILENSENFNTRLCIERRLRMPFLDPQTGVAQTHCSLFMKKKQRMPGLRHGQIYTYPSSRWRKPKRQYLLNPNQSFRAYQYREHNLQHSHHQTHQHHHHIPSSGVAVPQNPHLAESAAIAATDGNSMGASGDNDSKDSHANVEKEWFHDEMDTSHFHHGDEFEDDFDSDNDFDESYTSRGKRKKCSRPRRTNANVEGTPKRGRKGGGEYKFIKLMNCKRY

SEQ ID NO: 4756 - DNA, 28432 bp, DROSOPHILA
ttcttgacttttttggccttattaagtgtgggccaaaacagatacatatagccaaggtattggttatgggtgcatattctccacacatctgtatttagcttcaaattcgagctcaagttcccatataaccatgctcgcttggatgaaccggttttgagttttatcgaaccgcaggaacctcttgtattctgattagttcccacacatatcaacaggtagctgcagcttgggtcgcttgtgtgtgagcgaacttgccaccgcggacacatcggaagttgctgcccatctagccagccgccaaatgctgaaattcaaatacggaatctctgaacttccccagaagttcaaatgcacacactcacacacacagaaagaactcacattgtagcgcaacaagctccccacgcgaccctctctcttggtcccgctctcgaaaacctgctgccgctgcacagaaatcaaaagtgaacacactgcacgcggccctttcttctcctcttcaccctcagctcgtcggagagcccctattaaaacgaacggcagttcgttgccttcgttcttgcttcgcgtgcttcgtatcttgatttgtgcccggttctagttggctaagccattcggctggcactcggtccgccgcctcgcttctcgtcggctacctcttcgggtggggccgcagcgctcggtccactcccactccacttggccccactcgtcagtcagtcggcaggcagagcaagagcagcccgcagctttttcgtggggagatcgcagtttttcgcttgccaatcgatggcgtttcggaattcttagcttgcagtgcagcgcttcttagactttgtttaatttggttatactgcaattggcggctattaagagcagtgaccactacattaattatgaatggtacgcgcggcagacaagttggccccgcgataagtaaatcgctagtttgctgaggcacattggaatgcatttgattagattgcgatgtgtttgttcgcccgtcattgttgtcaataaacaaaagctggctcgcagtcacagcgactaggaggttaacctgacttacccgtttcggttttgaattcggtttcattgtcgctttcttgaacttgcgagcaccgcgtggccaatcttgcagaatgaatttcgggtgtgcaccggaaacaaccgacagtgaaataactactggccattcacaaatccataaagcacagtgtaacactttgtaacggatcgcaaatccaaccaccccacgcaaatcaaaaccgaacccgcgacgtcgattaattttatgatgatcaagtagtttctcgttgaaatatcaatcgaattgaaaaatgtgtgtcataagtgcagaagtgaagtgcagcttaatgccaaaagtcatacaagtgcaattgatttaaatgaatttttgtttaatttgtataaatatttttacttctcgtaactcgatagtccgacccacgaaagtcgtaaaatgcaagttcatggcgatatatatataccaatttgtgcaaactgatggggaaaatcggaatggtaacaccatttaagggcagtgcggctaaaaattgctgacgagcaactttcagattaatgcaattcaaattggctttccgtcgactaacaataagccgttgggaatagcagatgtgtgctaaagcagatccagagttctggcagcagttaacaccaattaaaagcgtcgttatagcaatagtgcagcaaacatagagggaaaatgtcagtcactcagccaaaggatacggcattaaagaccaaggagtcggcagctgaagtagcagcccctctggccccactctctgtcaaaacagcaggagcaacgggacggaaaactttaacctccagcgcggctttgtcactgtttgatcagctgaaaaatagcgtcaatacaaacagtttgacaattggcgccggcgtcggcaacaacagtagcccagaagccacaccacctataacagcaccagccagtacaaccaccgcctccccgatacttactcccaaaagcccaccacccacaccacccatcaacaaaagcccgtctctgtcctccaatattgaactgaagcccccggccaaacccgctcggccctttacctcgcccagcactattggaatcgtgcagggtaccaaacggggggtgggcggagtttttggcgggtttggagcccaagccgccaaattggatataaacgcattgcgatctcagctctaccagggcgccaggaagactgcaacaacatctcgagtgggagtcggcaaaacaacaacggtggcaacagccccaagaacaactggaggagaacgtggcacaaaggggtccaagaagagatgtctagatcggtacgactcgtcggagtcatcagacaggtgagtgcatgtcgtgggcacactactgaagtttggcattttgcagcgatagggaagtacgttgctcttcgacagttctaaattctagtcgtaatttgagattttttgaggtttatttaaatgcaaaggcaggcacgatggtcgtatctaatttatgaaatatattgaaaacttaaaatttttaaggaacacaataagacttatttaacaataataaaaaataaactttttgcataaacacctttagtatacgccataaagacattcaatagcagcttaccccgtccccttttcatcgacgtatttaatggcatcattaagcgtcttaacaatgcaagctgccaaatgtatttcttagatgcactgcctaactataaagggaaatgcaaaagtgtatctgcgaaccggctggctgtgccaagtctgagccaaagaaaattctctaaatatacacgcgcgctgtactgccaaaaagtgatccaaaagtgtgatccgtaagacacaaatagaatgcagcccatcccaatcatgataaacgtatgaaccaaatctgcaatgctcagcgagatctggaaaaagctaatagccgattgagctgaatttatctgacaggtaatcgttccgataattgtacagaacagcaaagtgccagtcttgtaaggggcctacgaggcacgtgcctcatagattgcaaatttatggcttacagatacatttgtatctactcaaatgggcagccacaaaacctcttgccgcaatgccaactaatttccgctcattaaaaatgcgcagcacagtagaggcagcagtggaatggaaacaaaggaagagcaaaggccgcaacgaactgcaggcatttgtatctggcagatacgcacaacatgcgttcatttatcagccgcaaatggcggctgatgcgccgcagtagcagagctgctgattttccatgcggcgcgtgggcggttgagcaaacgaaaacagcttcctggctgcatcgatgtagatatagatgcagatacgagtccgaaaccgaaaccaccccctcggggaaattaatcttgaatatggacggtgctctctgccgatctgctgcacaattgtcgattatgtttaagttatgtttcggttttcagaaatggttctgattccatacatatcttctaaacgccaatgtggcatttgtgtctggtttcgcagcagcatgtttcaaatgttttgtggggagcgttttgtcaattggcttggccttatcaccgtcctcgtatcacctccccaagatcgcgttccctcgttgactggtgagcgatttcggcgttgcttctttctcttcgttggcagtcggaaatcatttaaacttttggtcgttgaactccttttgatttatttattttgtttgtttctgtttctgtttttcttccctttttggtttttgtgtgtgtgtacttttttgtcgccgccaaaaagcactgcattttgttgtagctttgtgtttggctcggtttttatttcgatttcgttacgttttgtccgaatctttgcactgaatctttccagagctgtgcgcctaaaatttgaatcttgtcaaaatgctgattttttaaactaaactctctcgttggctggctcattttaacgtgttcctaaaccacaaaaaacaatcccacttccactgagcgtagtcattaaaatgtatttattttcgaaaagcaaaacaaaaaccaaaacatgtgcacgtatgcatttgagtataaccagcgagtaacatccgcagcttcgaagcggaggcatttaactttaattgtcgctcataaagctgaaacacaactgcaagagtaactgcctacttcagcaacgcaattgttggctgctgcaactgctggcgtcgtctttgctttttgcagtgtcgccggactgagcgagtgtgtgtgtgtgctattgattttgtcgactttggtcttacaggttttccacgtttttccacatatttccacgagaccccgagagcgacccactgctccaatggcgcgagtctttgcccatgcctttgcttttgctttgctttgctgattgtgggctgttgctggtgctcttgctgttgctgttgctgttgcacttttcgccaagtcatgcaaggcggtcagcgggtggcaggggacgacaatcaccctgagatattgtgtaatcgcccacgttgatttatctcgtttaagtgactccgaaacggcagcactgcaacagcaacagcatcagcaattgcagttgcaatgacagcggcaacatcgcgcgatgacatcgaaagtgtaatataataagttgcaattgccagtgtgtgtatctccgtttgttgccgcgggtcgtgcactcagagaggtcgtgcttccgatgctatttgccatgtcttggcataaccacttgcaagctcctttttggccttttatcaatttgagcctggcaagttgtgagggttgttgttttgatgatggtaaacgcgctcgatttccgaaatataaacttataaaaatataagtcgcttgaaactaccgcttagtgggcggtaatcgggaaagcaatcttgattcatcgtaatactgactctttcatagactgacaaagaaatgttctttccaggaggttgacatatgtatagatacctttagcagatttcataaatattaaaataacatctgttccttactttcgcatcggtaaggaaataaacatatagtccatgtctgtttgaaatttttaaattgaaatttatgttcagtgccagttgcaaatataaagttcgtgtaccaattcgttctttaaatgtcggccatatccactgtattgacgctaggagattaggctgaagataaagttcgttgtcttgcaactgaaaagccgaaaaagactcgatgagtaagtggaagaaaatgaagtaccgtaaacatgtagtgttggttgaatgaaaaaccttttgaacataaatcaaaatacgttttggtcgctctgctatttgcatgtaacatatacccacaggtatatgttattcgaggcaatcgtctttagaaatcgcgtgttttttttataagtgtacactgtgttttgatgctttagtgttttcttggcagattttgtatacgactgctgcagtctttcgcgtgttggttctctggcgggattcccggtcttctgcttgtttgtacatatatatgcgaacccccttttctcctcttacattctgtccttgtcgctgctgtcctcctgctgtcttcccttttcgtttttgttttccacttgcgtgctgcattccgctgatgtcggtgtcgtttatcgagagtttgttgcgatgcccaacatcaggggccaaatttccattgacttcgataagcggtataatttctaaaaagatgagttcaatagacaaaataagaatatgtacgaccagaaataagtgaggtgtattgttattaatacatacatatataatcaagtaaaagccctcttgatcatggcacacctaaattcgtattctttttgcttgcaacaaccatccgtgcccccgcatgagtgagtgagtggttgtgtgaaaagcagtttaaacacgaaattagagcctctccgaggttcccgattctccccgaagggagcgcattaagtcgtaataaatgctgcctggttgcatgctttgtacattgacctcaaaacggagcaaagccgccgtgtgcgcgccccttccccctgccacgcctctttgggctgtatctcttcagctgggatgctgttccctggttgttggcattgtttttgttgttctagttgttgttcgtgcacattttgctaaatagcttctatttacgttccatggaaaatgcaattcgcaattgtagaatgcagactcttttcgccgtttgcagttgttttccctgctcgcacgctactttgtctctacaaacaatggctatatggctggaggagggggtggtgacggcgggcggactagttgcagtacgtgcgcgacttttcggggccataaatcaaaaaggcaaaacccgaaccggtctcaagcagggattttttggctgaagtcggggttgggggagtgaaaacagctattaggaaaaattaggcgaatgaaatggcggaaaaagtgtgaaatagcagggatttagggacacatttttttccgcccctcaactttcgtaagttgaagtgtgcgattacactaatactattttgagtttttccgtacccaatgtcgtacaaaatatttaaattatatatgaaaataatgtatatgtattcgtgcctagttatggatagaagaaatcatatccgaccgatgtagatctaggcatctctgaccgtacaaatataaatttgtccgcatgaatattaaaattacgaatctcagtgttcctaaagccctcgttagttcatctttttacctatcacaaatcctgcaaaactcttctgcttgtagtctagaaactttaaatttacaattcttgaatctatcgatatgcaaataacatgtcaaatcacaaataaattatatcatattaaaatttttaaatagttttagtgcttcacaaatagagttcgtcggactgaatcttaattccaattaataaatctcactcttcagtagattattcaacactttaattagggctgtcgagacaggaagtgccatccagacggctgaaagtgccgagactccacgggctcgcaatccctccccaaatattccattcagggtctgccccagagcacatttgtgcaacagatgcataatttatgcatcgcttacacatctcatgtgcaaatcgacgcgccagaatcatagtgtacaagccccgttggaaagaaaaccaacaaaccgacaacttaatggcattctaatgccggccaccaaaatcaaaatcatattagccaaatgcctggatgcagcggcgcccgctgatgccgtgcccgattttgcatctatttcctgagcgcacttttgggccagccatcagccaacatcacatacactggaacgtggcgaattttcattaattataacgtcaggcggcgcgcgatggacaggcgtcgtttgctcccccttttcgcccttgcccattggccctttggtatacacttacagaaggacttcactaaacatataatttaaatattttgtaatccattctgtgaaaaaacgaaatgaaaaacatttgattttataaatatcgaattttacaatcattatgatacaagtttgggaattagtctatttttaattctttaattagctggcatacatgtctgaaatgtatactgttattagtaagaaccgattcaagagctcacagaaaccagcaaaattcaaaaattacgtattcggttgctttacagctttatgtgtgagtgtagtgtgtacttccgttcagacacaaggcatgcctccctgattgtagcgtacagctgaaacaacagcagcaaaccagtgcatcacatcgaaaaggtaactccagccccagccccatctatccccactgacatcactggtcagacaggcatccacagaaccaactgacggccatttcagactctggcttttttcgagctgtgtccaagcgaaaattagtcattaactttttaagcatcggctggacaaacatggcgtatgagtgatgtgccatggtggtcatgcggtgataagcccaacaactgcactcaattctgtggttcatgtggcaattattgtggcgctgcactggtgatgccaaggactatctgtgaaaagtatctgtacgcaataacattggaaaagccatcgttagaatatacagcagaaatttacaattaaagaacgtttgtgtagaagatgcatcactaggatagttaatttgaattcaatgctgtgaactcagattactttctatcaacactttgtaacaaatttgtaacacattgtaccaaattcagaaatcaaaaaaaccgaatccgaaggcttttgatatggttccttaccttgtcgttttgcagttttgttctaacgcgttcctccagcttccacttctcgcttttccctcttgacattgaccttgggatgtgccctgctccacttcgaagctcaaccgaaactcaaacataaacacacaataagaagcttttaaaaggaaaagtgtaactaaatggctcgattcgagttgcaaaaccctgaagaaagtacaagtcacaaagctaattaaaggaaataaaaagagctgacgagcggaaaatgcgtacagaaaaagtgaatgaagtatgcgtcgttcaaagttcgttagaagtcggaaacagaaaaaagcaatagcaataactgggttccgagcagacaatgcagaaaactctgggagtgatttggggcataaaagaggagggaagtgtgtggcattaaaccattagaccatcataatcggcttaaaaagtgtcagcctgacatctgatcaatgtgaattgaattgacaatcgaagctgaaatttgtacggtcgttcgtggactttattggcgatgttatgctcgttgtggtgctcgaccattgtttggttcattgattagacatgaaatgttgtgtcaaaatatattaattaatatatatccacagccaatgtcgcataaattgtgtgaagctgtgtacgcttttatttgcgttcacgcgtgcaattagtttgcggttaggaagggcaaagagtttgtgattctaattagctaaaataaaatcaaattgaacgcaaaaagactttattttaaaataaaattatatcaaattgcatggctcaccacgaccaggggcagtgcgagaaaaagccaaaccaaatggtcattaaaagtaaattaatatgatagggagtgacgcaaggtggttcaccgcttattttatttaaacagtcctgaaacctagcggtggtcatattaattggtaacctttttgaataaaaacccagtcacatttcacaagattaacgagcttgtaggagaatcttagctaagcctctttagtcctcgattttatagttcgcgacgtttatacgggcggacagacggacttcgttagaacgtcagctttacggtaaatatcttaaaggttgtgaaccagattagtattagtattatttaagtcaattagaagaaacgcaaacttttaagtaaatacagaatctgcagtcaggaaaaatatttatataccatataattggttattttcttttttttttttttatgaaaaactgttatgttaggtctgccgcttttcaccgcactaatttttgactttgatgttgttcattagaaattcaatttgccattttgccttttccgccacagcaagcagcaaaaacaataaaggttgcatcagtgcaaacgaagcgttgcaattaccgcactccaaaatgaaaaatccacgtctttaatggcgatcgccgtggacataactgctgttgttgtccattttttttttttacttttttaccaatgaagcacaaacgcttgtgcaagtaaactatgcttcataccgaatacaatcctgttaattttgtagcaattagtgtctagtcaagaattcaaaacttgtgcaagctaaaagcgcctagtcctttctgcatttgctgctttcttctacaagaatcttcccttaataccttgtttctgctatttgtctaccacgtccctgcatttcgcgcgctgttatcaacacgcgatttttggcacttttcgttttattttcattttaagaagatgtcgccatcgaagcgaagcgccgaagacggcgactatcgtgctgagctgtccttgtccttgcgctgttgttcctgcgagttccttgctgttttgggcgatggtgctgtctatatgtatatgtatatgcctgtctcattttcatgggccatttacgtagacaaagacgtgcggcatgtttgtgtatccgtaagatacattttcggtttggcttggttccgtctgactttagtccaggcttctccgtcgctgctgtctcttcatctgcgtctgtctgctgcagtcagccagtatatatgtatgtatactatctatatatgagaatagtgtggttggcaggggaagcaaaataccggttctctgaaaaagttttcaaagttcccgatggggtgtaaaaaaagtttatgaataaaataagaacaaatgcttttttatttccttcatattttctttcccttctgccttcgtgcttattgcaaaatacctttatggacaaaaacgaaatgcgaaatgtctgcttgttgaccaagatgagatggcccggcttaaagtcctcttggaatttctcaaatatttttagatccctgcgaacttcccttccacgtggaactgagcgttccgcaagtcccgaacatttatttttatttaattaaaacacgctcaaacgatttagtggaaaagtgcgtgagggaatttttcgttcgttcgtttcagtttcgcacacacagtcatatgtgggcggagtctgtgttttttcgttgggcgacagtcgtaaatgtctatagtaaatcaaaccattaaagtcgaagaaaatatacctaatttcgccggttgaccagggctcttttggccttttgggcgagtcttgagactctaaaatgtctaaaatgttaactacgctcattaaaattgacacacaaatgccggaaagttcaacgacagttcgaagtcagtgagaaaagtcggtgacagaaacaattaacaaatatttgtgtatttgcttaacttttactcgaccgatgtttgccttgggattttcgtttttccccttttttttgctttatcaaatgtttgccaagacataaaacaaaccaaacatccagaatggtgcacagtggatcgaggggaagctctgtcaccagctacatgctggaacttatcagatagttgcataagtcaggataagtgcggagcggcgtcaaagttcttatcacttttggtatacctcgaaccactatgagtaaagcaatgcgaaatataaaaataaaagtatcacacttttttttcactgagtggtatagaaatgtgacaaaccgggaatacgagggcagtacatgacgcattaatgtcccagtaacccacatttctacaaaatccattgttacttatcaggcgaataagatttccctacaaaccattccaagcgaatgggattcagtactgtaacttgttctgtattatattcataccacttctctcatttagtaaatacattatcgtcgagaagttttaatatatacgagatcaggatcaccgctgagtcgatctagactgccacctttccgtagaaacttgtaatgaaaataatgtacatttgttttgaagtcgacaatggttattcattaaattcgattagcccattctttagttaattttcattttgggcaagtacaaaattaagaaaagactaacttaaaacacagtaattaatcattaacaagccttccaattacgattcatggcatgccatccgcatatcctttttttagcccccttttatcccagagaagcgttcattagtggggactagatcgaaaaaaaatgaagaatgggcttttaagggagtgattccctcacattttgccagcctgtttcctcgcctcaccaaacaagtgtgagtgcgtgcgacaattgtctgtgacacaaaatgattttaatcataatgttattaaacacgaaaccagagaggaagagcaaaagggatccggctacgacaagggctaactagaacaggcccttaaccctcgacagacccccgctttgacacatgtgtagatcccaggaagatgataacttatgtcacttaattgccggggcttaaacattacaaaacttttgtatggccgttgtaaacataataaatgaattttttctgtttcccttcgctagcattatgagctgtgaaaaagtcatgtttggtctaatgagagagtctaaaataagccaaaaaggtcagaacatatacttccgtttggatatgttttgtttggagtaattgcgagtcgcttaaaatggagcgatataggtaattgcggatactttggcgaccattgagcgatcggaggcgttgccctggacttttccctttctccccacatcctcccttttatcacttcgccccactgggctgacgggtcacgcgatatgctgaaggaagcccctcagaaaaccaaaatgaagagttgtggtagaatcgtcgagggcgttgaccaaatgcaattgatgagcagtggcggtgactccgcataaaggcaacatcgagagggtgtctaacgaaagggttgttttcggtcgtcggactcttcggggcagatatcagtgaaggccttgattaaaaatcccaccatgtccctggatggttctctgatgagtgtttcttcgccgacaaatgactaagtttgtccacagatggcgccaaaagtactcaatatgcgtatgcccctgcatcctgcgatttcgatggctgcttaagcgcctttaagttttgcttttaaggggccttgcccacaagcccaaatcggcactaaaatgaatatgtgccacacagatgcagtagtaaatgccgtcgtatctctgtcgggtatcgcatgttgccaaatgtatcttcgcatctcgccgtgcccgcgacagcggatcttaatccttcatcatcgtcatcgcggccctcgtaatcatcataatcaagcggccaaaaaagtgtgaaattcgtggaatcgacgtggagagtttactcctctcgtcccccattcgggacagttcttgaactctgccaatgtcacggggaagcagcagcatcagggccagggatagccctctgcagttcgccagtcagatacattcgtatctgtatccgcctacctgtatctttggcacgtcgccgacgtcgacatgtgtttgccgttgtattttgtatacttcatggcgatttaatgtactggccgtcgtccccggctcgctggctgtgtggttttaggtttaggtccaccgtctgcaacgcccttccctacctgagtcgccgcagaatcgcaggggtctctccttgaagactgcccatatgcctttaaacttgtttcaaataatttcagactagacgtgcataaatctacttaacaacaaaacggagaaaagggaaggcagatgaatccgaatccgaaaccaaaacctaaaccaaagcccaaaacgaaactccaacttcgcgacgttgctgctgcctcagctgagatttggcttttgtcggcacttgttggtcgaaaggggcggagctggctgggggagcggctctagcgggctttctttgttgccaagtttgaagttgttcttgggccttgttgttgctcttgttgccgttcctgcttgcatgctaaataattaagttagcacttgtgcgcgtaagagtgtgtgtagctgtgtgtgtatatacaactgactgatggacagactacatggaacggtacactgggaaaagtggtccatttagaaggagacttctgagggcagcagatccaatgtagtccctggtttctgccagtggacgcccctttgacagttttgtccgcaacactccgctctacgttttccagcttgtctggtcaccatatctcagaccctcagtttcctatgaataagtgtatgccgaatacttgctcagcagacaagacaccatatttgttgttcctttggtttttatggctgcttctttggaacttttgagcgcacattacaaattcacagaaatccaatttattgtacccatctcgcagagatccccaagtggctcggagcgctttatctacggctatcagcctgttgtccccatattcgtcgcttttggcagagcagaagaaattaacggccagccgatattctctatcctggcaggacacttaagaattcattctcactcttaatacatatttcgggaattcacaagctctccggttcagctaaatgtatccaatgactgccatatcttgtgcacctttccccatgtcaacccgggcccaacccataaaccctgactgcgtccatcacccgggcagcattctttgcacccagccggtgagtcagccgctcttgggaactcgatttcctttcctttgttcgcggctgcagcctctttgtcctcgtcgtccgcattctgtggaagatcgggaacaggtatcgaggacggctcttagaccgggtgtaaatgatggttgtcgctggccaaatgactcaaatgcattcatattcgcccagccgactggctctctcgcactctttgcatacgcatttcattaagaccgggcttgaaagacaccgccagctgctgcagctgtggtttcagatacattgggaaactgcgttgcagtttattgctttaggttacttttgccaaagaaaactatattatgtagctatagaaatgatcggatcgctaaaagatccgaaattgtagctgatctaaggcatcctttaaagaaaaagcattaaagaagaattgtatgaaccagggaaaatgtaaaatgttacatttacaaaaaaaggttttaaatgagatcatctaatacttatataaactatacaattggctacaatttaaagttctagccaaaatacaatttgtatattaaaataaaacattaagttaactgtttatttcctttgaggaacatagagaacttatagcggttgaactacacactaggtcattatcctttcctgggatagggcagcgaagaacattcttggaatctttaaggctttgttgttggtgtgcgtcttctttcttatttatggcaagtacaagtttacagctcttcggctctcgaaactaattcacaagcgaatggggtactgtaattaaacataagccagtcaaggcggttccgacttaaaggcgaaaccgtggccgataaagtatctacaagatacccggtatctcggctctgcgtgtgtgttggcccggggcgcacaaaaacctattaaaagcagcaaaacgttaggcaggctggaattgggaatgggattgagcccgaaacggcgacaggtacagggggcagggccctggtgaggtaaaggggcaggggcaggggcagatacaggggtcgttgtggtggctgaaagatacagatactacagatacgcgtacttgcagatacccgtgctagtgcatgcactcacattcacaggcggagcgacgacacttaagtgcacgctgtgtggtagttagcgtggcgaaatggaaaaattactgaaactaacgtgaaatatggcacagagaacgcaaagcatggtggctagtactcggcaaacctgttggacgcatgaaattaacatcaaaaacagctgtggcagcttggacttggcttggttttctgcgagcatgttttatgtttttcgggcaggcttcctggttcggctttggcttatccatgggtccatctaaccccctccctcccgttgttagttatggtctgtttgaagatcattaacattcataattaattgtaacttacttgaacattccgaatgatgtgattctcttgcgggcacggcgcacaccagaaatttgtaataatcacggcagtcgaaaacgaaaattaataaatttaacaacagttgaagctgcttgggtcattagcagctggcctcaaattatatataatttgtaactgacccggggtgaaaattaaattaaattgaattcgaatggaaaattgccacgaggtaaaatgcttaaagttcttaaagtgtcgtttaaatagcaaatagcctaaaagcttcgattttccatttcttagcccaaaaaacaattcctctgtggctcacagtgttgtttctttgtattgtatatattaacttcaagtgcagtgcccaaatgcagtagcatcggcggaggtgtacgaacaaattgacgggtgagggaatacttgtcgaacgtattttattttgcttttattcggacaaccttcccattcgctcactgtttccgatgcacagatacaaattcgcggatacacgcgaacatctgaaaccgacatccaacctacaccacccaccatgtgtatgtatacatatacatacatatgaagccatatgtacaatctcccctgcgcctctggctgcttcacccacaataaatcttaatttctcactcgctcatgttgacattgccccccgcttgtcgacaattttaagtgacacatcaaattaaataaaaataaaaataaaaatacagcacgaataaaagcaagggatcggacagaagcgggcacacaagatacttggcgacgaattagccaaatacaaaatcagcacaataaaacttggtaatgcgattcactttttctttttattctgccgtcggtgatttgctcagatgccaatgagcggtacgagttcttttaagattctggtgtgcctctctgaatgttattcacctcttgagcttagcgagctgaaagtttccaaagtggattccccgaagcacacatcctttcctcaaggaatatggtcattatgtatatttgatgtaatacaattaatatataaatacgaaatgggaagtagtaagcactacgttgaaactagatttgttcgggatgcgttatttcataggcgaatgttaaatgcattttggccgcatcttggccacgaccagtcaactaaatcccgatcagtgtgactcacaacgccaatgtcaaaaccgattcgtttgccatttaaatttaaaatttaatgcgcactctactcatttcgaaaacttcccacattaattaatttcaaagagcgtcgaacgctaaaaattaaccgagttaattataaattcactttcaaaaccagagaacccgcaagcgcaaaaaagcaatataatagggaatcatcatcagtaacaacaaccacaacgggccataaactttcattggggcaacgctttgtggcaattgaaccgaggttttttattccttcgatggagaggggggctcgggcatgaggcgcacatacctgtcactgacaggtgctaatgaactacaacaactatccaacaactactgcctgcgtttcgtaataattgagtgcgacagagagcgggcgaggcgctcgggctcgtccatctctttcggcggtatctgaatatgctaaaatatgctaaacgattctgcgcttttttttttttttttttgttattcctacacgcttgttattctcgtttcccccgccacagaccccccaacgccacaagctgggagcgaaaaaactcatttaggcaaacgaaactcgtattgaggtagtcttgactacgaatccgtatttcgtatccgagccagagaaagacggaggaaacgttagacacagatagcaacagcagcgaaatgctataaatttatccgggcttagatttattgatagacagctcggcgaatttatgtaaacgattgagacagttttgccgtcggtacagaagttgtttttgcagctgttggaacgtgtgaaatcagccactaactgcgatacatgcgaaatttgttaacatttcatttgtggagatagcagtgcattaagagcacaagttacgaggggctggggatacgatggaggtcaagtagccatcagatttgacttgttaaagtgttcgattgtaaatagttaaagatgtacttcatcgtgtaagattttgataagctagaaatatagaaattacatctcattgatcactgaccatctttaaaactggctttttgttcggaaaactaaagtcatcatgtacttttcgtatagttttttatcttataaatggttattatattacttgtaattggtataagaaaatagttttagctcgaaaacctttgttttatattgtgaatacagaccttgagatatgttagtttatataatttacacactgtttggatattcatatagattttctgtacgcactaaataaattctgaactatccattagggttcccatttccttccgcacacccaggcatttcgaacgccaagatcattgccgtagacaagaaaacacaagttgcataaattagttggcaaaggaagtcgtctatataataaatacaagtaaagcaaaaatatgcgtctttaactggttttggatgccggttcggctgtttattaacctgttaaccgttctcgcagctctagcgcccagcccagttcccaccgcatcccaacccttcagatcgacaataccagtgccgtgccatggaaacacacttaatgcacataaataaaagataagtcgggcaaaaagcataacaaacgtttgcatttccggctaataaaacgggtgggtggaggagtgcagccgggggagtctactccgtttggggcattagcggctcttatgaatatgcatgagtatcgcataataaaatatatttacgaaaaagtaatacaatacaaatcaaaacgaaattagttcgcggggatttgcggccagcgaagaaccgactcaactgaactcaactcaactcgactcgacttaaattaattaaagcagcgcagtgtgtggaaacattttacgtgttgccgtgtgtggatggttgcagttggcttcctagtttccccagcccctcccagggttgccctgcctcggctaattattcattcatgacatgttgaatgcacacagcccgtcgtggcggtggtggggggagggttccccggtcgggcattatttacaaagttttgcagcacttgtgctaaagtatctgacagatacgacggcacaggcacacacgtaataggtacgtacacggaggcaaacgaacgagactcaacgaaaaaatatattgtagagggggcaaacttaagctcagattcggttttagaactcatttcccgaagattatgtaatagtaataggtgacgtacattttaaacagatttcattaaggatctgttggctattgtggtggtacttcttgcctggaattaagttaataggaatgtactttattaacctgatattgtagtagataatactcattccggacatcttttgctaatgagctgcattttttccagtgcagctgcagtagccgggttaatccgaacgaaaagcataaagcgtcaacgtgctgctcacgttcatcagagcccacggccagtcgaaatgctggaaaaaacgagttgtggccagaacaagaagcgcacatgcaggcagtcggcagaaggaggcgacacgccccttatcccgcccctcttgcaatcccccctcatgacgacactgtccccttgtcgcctgtgtgcaacctgctaatagcttgtttcgccgtcgctgcaaattaactttggctctgttcaccctgggctgcatttttgagccgctcagctctgttctgcgctgcaaattacactatttttcactcggccagaacaacgaagtgggtacagtgggtaaagtagacctttatcattgcaatgcacttgtacatctatctaataggaaataatcatcagaagggattaaaatatgtttcatcagtgctttacaatctttacaatctaatggccaacgcaaaataagcatctcttaataacactcggagatcacttgtttggatctagtaaactttatattgaaactttacattattaactttcactttaatataagtgtgtataatgttctagcattgagttatattaaataagttgcttcgaagataatcactcaagggagatatgcacaagacttgattaagggggtttaccctttaactgtctgtgataatggtttaatgggacccactgtgcccccttgcaatcgtgtgaaatattcaaagagctcggtagcaaaaccaaaccaatgtgcgcgatggcaaaaaagccaaacggatgtggatgatgtgtctcgctttggttttcgggctgggaaaactctctcgcacattcgggctgtcggaatcgcgcccaggaaatattgcaaacgggaaccggctgaaggaacggatggcagcaggggaagcggcattctcccttcgcagagtagagcaggataagagcgcttaaagtcgcacatttagtgacagtttgttggatttgcatggtgacgacgttgacatggcagagttttcatgattaatgcgtggcaagagggccggagccagccactccgggcgaaaagctgagtctccggatgtccaaaagctctgggctatgagtggcggcagatttcaaatgtccctgggaggggcagtgccttaagtgggtcaagctgtgcgccagggatgtcctgggaacaggcacacggtccttttccctttggaggagatgggattttaatagagggagctcagcttccttattgaaaagtctttttaaattcggaaattaagcgaactctgtgtggaatgtgtatgtgtgagcataagtaattaatcaataagtgttataaaactgaagaaagccaagcattttactactaaaagggaaattagatatgtacatagatcatacaaatcacatcacaataatttcgtttgcaaatggtacgaaatgaacgtaccgcttttgcctttaggatattccagggtagtactggtagtcacgctaaaactaccgtcctttcgtgctggaccttattactgagggaggcgtttatctgggatagattgaaaatgtatctgagagatatttttcgaccaccttaatgagctgcgttcgatgctaacttttgacatttgccaggtcgagcggcagaaaggctgccagcaaaaacaggcaaactaaatgtaatacaatgtaaaagtagcagtgcgtgttcggacttgtggacggggggcacggggagagctttggggcagcaaaacggctgaaatagcatgcaactgccacttgccccaccacaagcaccgagctctgcccctgcgtccattagcaatccaccatgtgtgccgaagttttttgctggtttattgcgagtttcgtgtttttattttattttccggtgctgccgctctcgacgttgctaaaagacagcgcattaaaatttaaattgcatttcgcccgacgcgaacaaatattctttttattttaatgcgacggcagcacccaaaatgctaatcagttgagtataacctatacaggcattcccgccagattgcgctgctggtgattttgtttcattaatcaaaagcaaagttcaatggacccgccgggccgggcaatttaaaatgattttataattgaaaatggaagaaaacatttcatccagcaaatgtatccagcatacatttcacacacttcacacccacactgtgttatgcaacagcagagtctggatttaagattgcaataaaataaagtacactcatcactcgagggcgcattgaaatcgagaaaaacagcagcggcggaaagaaaaaatataaaaatattcttaagttactgaaataaatgccaataaaagatatttctagaatgacaaaaaagataaggaaaatttaaaatccgaatgtacttcagtcacagtaaagtctccctctcccacatttctcatatggagaaaggctaaactcgagtgcttactgacagttcaagtgtttgaccatgctgaaataaatcctaaggccttgctgcaacaactttcaacactccattcgatttatatctgcttaaatcagcacagctttcatttagaagagaatgtgcaagtcgtgtagccagagaagttttcctgcaacaactagggacaccatccgcacctagagcaacttttaagttgtgctgtcctgtttgactccgatccggaaccagacaaattttaatcacattctaattagccaaactacgtcaaagagtccggatgccactccccccatcactccgcctttccagctccgtcagcgcagcgaggcttaataaggaaatcaattaataacaaacggtgcagcaagcttagaagttgacggggcgagccatcggatggtagtttgcagactgtctaatagatttgaaattaaagtctgtgccgcagtcaacaaagttggtcgaagaacgacattgacttgactcaacagcaagttgacttcaagcggcagatacacagatactcaggtactcggatgcgaagatacaacccagacagcgacggcaaaagcaaaagcaaaggcaaaagaaacattgaggaagacgacaatgaagttggtcgcctgtggaacatggcaatgcactcaggccaggagggatggacgaaaaaacttccgtaaacaacgcgcctcagcccgggccatcaagcaagcaagatttaaaattagaaacgagggaaatagatacaccgaaataaaaaaaataaacaggagagagaacgaaacgaagtcgaagaacgccaaatggaaaatgaaaataaaactgtctgcgagtgccttcctataagccaagtgcagacgactcccgagagtgtgtgggaaactcggggaacgttcaactgggaaatacatctagctacagtcgagggaacaaaaagaggagaggaggtgatctcagaataagtccaaagttggtaaggaacaactcgattagagcagctgaatgctctcttacccagctgtatatttgtttgctcgagaatcatacgcgagttctttagcaaaacaaaattaaagaacgacttaaagcccgatactactggcttgaatgcagctgtacctgcgtgatgggatggagagcattgggctatggggggatctatacaggcatccaccgccttgggggccaactgcaagcgagcagaggcaatcaaacaactgaggcatgacaactttatgccaggagcaggccatagaagttgttgccaatgatgatgatgctgatgatgatgatggtgatgcagcgtcttggtgggatgggtgcttggggcacgcttcaatcctagccactccactccattccactccccatgcccatgtgcccagggctccgttccccagtctccggcggcacatttgacgggcgagccaagacagacgtccgacaagcgacaagcgtccgaacggcccatgacataaaaattaaataaacaaaattatggaccaggccgtatgtggcccgaagttcccaaacccccaagttggccgtcccgttcgtcttggaagcatcatggatgaatgtagcgcatggtggtatagataaggcctcgagcctcggggtgaggatagaacaaatagcgcgtggggagtgagtacaaatcaaaataaacattctatccgtcggtacacaaaatgttgtttcccgaattggtgtgtttgttagataaacaactgagggagttttcttttttgggaaaactgaatcgcccaggagtggagtaaaaaccgcctcgaggcaaagatacaactaatttgaactagcagagccaaattcactggggcgtcaagggagagcagtcggttggcaaagagtgtaaacacttatcgcagaaagcaagattgccaatatattgccaaattatggcaaccatttagctcgccatactttatatattgtagttcttttaaattgccccgcatttttgactaagcccaatttaaaaccaaactgtaagctggacaatttattgttctgcagtagatgtgcagatggttctgaatgggatgtggaaacccactcaaattagatgaaattatcagaagcatcaagtcgacttgtagactgtttgatgttcccgtggcaaacgaagcgtgcccaaaacaactttcaagcacatttcccagtccccactagtccctcggttcgccgatagatggcaacaagctaactgccagttcgcagttttcacgaaacaatttccattactgcaactttttaatgccccacgatgactgcaggccattccgtccgcccttaacccgttccccgcgtgggtcatgtgttgccactctataaaaatatgctttatgaattaatgaaaagaaaatgtttgcaccagcagaagtccagctcaggtggctggaggggatttctagaggctcggggagaggcccacagataagcaaaaagccagtctagggatcatttaacttttacgacattgtctgtcggggcaggcttcgtttgcaacgcagacaaaaaatcacagattaaactttaaatgcgttaagccgatataatgtatgataattccggtttgcgttgaatgcgatctgattaccagctaatgggtaactgatatgatatcaactccattgctttatggcatgtgttctgaaaccattcctactctattaatttgagccgtaaaatcgtgcatgacgcaaagtccggttcttcgaattcttgaattcgcttctttgagtcaccatgattatttattagtgactacggaagaccaggattaaatataagtagtatttctatttttaggcaatcgaaatatcatgtttgtgctatctggagtattattactttagattgctacagacgcaagcctcgactgtaagataccccttactatgtgaaaagcgacacttgctaaacatgttcattatatacaatatctacagcagtgcgtttctatactgaatgctattgttgtcattcatctaagttgataaaggatagttatctatggtcggaaacaccctcaagacctgactgaccacttgacataaatcaaatcttaataattcaaatcttctaaatattactgcctcctaaacattccatttcctttatactcatataatcatataatctttgtaaataactaagataataggaatcgttaaaattgataccgattagattaagttgtccaagaaggataatagtacgctattaaataaaatagtttcgttaataaaaaaaaagaaattaaaaaacgtttcttgctacctgttgcgtactttccaaagaataccgtataccctgttagtaggcaggaaccgtctctagtgcagtttttctttttgctccttgtcggttttgtaaaacagtcctactcttatttaaggtatcttttgtttcccttctttctcttatgggtcaccatcacctgcagatcggaggccaataatcccactgaggaattttagaccttggccagatctcaccttcacccgtttctcgcagagggatcgcaatgcatccgctagcagccgatggtaaaacggaaattgatttctgccagagcattggcaatcagcatcgatatgcacgcaagagcggaaatgattgcatcacctaacacaaccacgtgccactcttttctgcctgccaactgagtttgcgagcggccagttgtgagttgcaagtggaaagttgcaagaagtcgctgtctggcggagtttgcatgcaaattgcgtcaaattgcatatttccggtgcctggctggccagtgcgtaaatattttatgcttcattctgtcttcggtctaggcaagtgaattatggctaattacaagcgcagtcgaaggggtttggacggtgtggggctggaagccccagactgaagacggcaaaaaaggcgcccatggccggtgggcgaaggggcaggagcccagaccatgaaccagccaggcacatcgccatcgaccatggaaatcatccccccagggcgccaaaatgcggtcgacgtcgtcgttgtgggccacacttctagggtaacaagttgagttaccattcggctttgccccatgccgcatgccgcttgtttattatatacctttggccactattgttgccgctgcggtggcccttgggcttccctttcgggcgtccgggttctgaggcccgcgctccatttgatttagagcacggtcgaggtaatttagatttgtggtcgccatttaagctgcacatggatttctatttctttagcttttccactttatcggactccgttcaggcggcaagatgttgccccttccggaatggtttttaatttccttttttacagttctttgtcgccagctttcttacattggggttgagcaactcagtttgtaggttgcgattaaatggaagtagagctcaaatcgcctacttcaaatcccagttttgaattacaaaacgtatagttggaaaagtaaaatgaggaatttgagcattatatcagtccctccgccctttaaacttaaagagacttcgcagaatctttctatccagatccttaattttctcagaatgccttttgtcagttcattcaacctgccatagagattctccaggggtaaacagcatgcaattagccagtcctggtcaagccaatttcttgagcaaataccaactttatccggctaatccgcactgcattctcacatcctctctttttctctcgttgcaggtaaatagatacttctgcctggccgcgttaattcggtctaatttgcaaggcatgcagtgcggctgtccctgcatcttggctactgtttaatggccttcggtggggcagtggtagctggacgcacccattgtcaatatcaacaggtaacgccacgaaaaaccactgaggtatttgcatttcccattattattactgctgctgcagctgttgcacctcggtccaactcctcgccctggagtgctaatggccatcagtctgagctggtcagaatatgcaccctgggagcgtgtgaaattttctgttgccgttttcggttccctggtctttgttctgttgcggagcaatttgttgctggccacgtgaaacaaggcccggcaaaagggtgttttcagggaaatgagcagcgcaatggcaatcgcagaggcaaaaggccaggggcaaattggtaattaagttgtctcccgaatgaggaactccgaacggggaggagccactcctggcccggtggaagcttcgacttccctaatgaagttatttggtccaggaagttgaatacgttgaatacgatcttcgtgcttcggattggaccacccgttccaaacaagcttcgtcttgttgtaaggagcttttgattattgaagaatttctttaattgtaaaagaatcactattttaataaaagaaactggtgatagtgttaatctatattataagaataatgaaaacggactgaaattgacccaacgaatctctaatcagatgcaaatactatgtagtttgtatgttcgaaactttcgtatgcaggtctattaaggttacattgataccaggggttcttttgtatctgattgccacagctcactcaaaatgtgcacccttcgcgtcccaatcgaaaaaccctcatccctcgctgaacaacccattaaaaatatttcgcttgatttgtctgaggcgatttgccagcgcttaatgccaatcaaatgaagcccgattcttgtttattgttgacttgctccttcttcaatgtgggccacacccttggggccctgtttgctcgaagattgcttttgggatatggtagtgggcgtgcatcctgtttataattctatttgccaacctagttaccccttcccaagtgacctgcctccgctggccaactagtacagcatccatccatgcatctctgttgcccataataaattcattttcaattacgcgtgtgcccagaggtggggtggctgtatgtgtatgtggcttcaacgccaaaggtcgtgtgcaacacagtccaaaaatctgtttagtctgcggtggcagcagtccctattattgttgctctcccctttctttggctgccgctccacggggcctgcaaatggatggagggtgcaggggatgcactgccggctaactgcaggcatgcatgacatatgaaatatttatatagctaaaatacgtaattaactcaaattataatggggcgactaggttggttgcctatctcgcttgctcccccgctgtcaccctccctttcatgacaatagccgctaatgccaatgtcagtcaaaacactgaaaacaaatttaataactggggcatttgggacaccactgatgaatctgatatctagatctgtatataaacctactggctcatttaaaattcttgggacaatgtgtggaattacccatataaaaatgtggaaaatgtattgtc

SEQ ID NO: 4757 - DNA, 1852 bp, DROSOPHILA
cccgtcattgttgtcaataaacaaaagctggctcgcagtcacagcgactaggaggttaacctgacttacccgtttcggttttgaattcggtttcattgtcgctttcttgaacttgcgagcaccgcgtggccaatcttgcagaatgaatttcgggtgtgcaccggaaacaaccgacagtgaaataactactggccattcacaaatccataaagcacagtgtaacactttgtaacggatcgcaaatccaaccaccccacgcaaatcaaagcttaatgccaaaagtcatacaagtgcaattgatttaaatgaatttttgtttaatttgtataaagtcgtaaaatgcaagttcatggcgatatatatataccaatttgtgcaaactgatggggaaaatcggaatggtaacaccatttaagggcagtgcggctaaaaattgctgacgagcaactttcagattaatgcaattcaaattggctttccgtcgactaacaataagccgttgggaatagcagatgtgtgctaaagcagatccagagttctggcagcagttaacaccaattaaaagcgtcgttatagcaatagtgcagcaaacatagagggaaaatgtcagtcactcagccaaaggatacggcattaaagaccaaggagtcggcagctgaagtagcagcccctctggccccactctctgtcaaaacagcaggagcaacgggacggaaaactttaacctccagcgcggctttgtcactgtttgatcagctgaaaaatagcgtcaatacaaacagtttgacaattggcgccggcgtcggcaacaacagtagcccagaagccacaccacctataacagcaccagccagtacaaccaccgcctccccgatacttactcccaaaagcccaccacccacaccacccatcaacaaaagcccgtctctgtcctccaatattgaactgaagcccccggccaaacccgctcggccctttacctcgcccagcactattggaatcgtgcagggtaccaaacggggggtgggcggagtttttggcgggtttggagcccaagccgccaaattggatataaacgcattgcgatctcagctctaccagggcgccaggaagactgcaacaacatctcgagtgggagtcggcaaaacaacaacggtggcaacagccccaagaacaactggaggagaacgtggcacaaaggggtccaagaagagatgtctagatcggtacgactcgtcggagtcatcagacaggtgagtgcatgtcgtgggcacactactgaagcatgcagtgcggctgtccctgcatcttggctactgtttaatggccttcggtggggcagtggtagctggacgcacccattgtcaatatcaacaggtaacgccacgaaaaaccactgaggtatttgcatttcccattattattactgctgctgcagctgttgcacctcggtccaactcctcgccctggagtgctaatggccatcagtctgagctggtcagaatatgcaccctgggagcgtgtgaaattttctgttgccgttttcggttccctggtctttgttctgttgcggagcaatttgttgctggccacgtgaaacaaggcccggcaaaagggtgttttcagggaaatgagcagcgcaatggcaatcgcagaggcaaaaggccaggggcaaattggtaattaagttgtctcccgaatgaggaactccgaacggggaggagccactcctggcccggtggaagcttcgacttccctaatgaagttatttggtccaggaaaatttctttaattgtaaaagaatcactattttaataaaagaaactggtgatagtgttaatctatattataa

SEQ ID NO: 4758 - protein, 217 aa, DROSOPHILA
MSVTQPKDTALKTKESAAEVAAPLAPLSVKTAGATGRKTLTSSAALSLFDQLKNSVNTNSLTIGAGVGNNSSPEATPPITAPASTTTASPILTPKSPPPTPPINKSPSLSSNIELKPPAKPARPFTSPSTIGIVQGTKRGVGGVFGGFGAQAAKLDINALRSQLYQGARKTATTSRVGVGKTTTVATAPRTTGGERGTKGSKKRCLDRYDSSESSDR

SEQ ID NO: 4759 - DNA, 5905 bp, DROSOPHILA
tatttgcagctggttgaatcacgtggtacacacgaatgtggcccttttggccattatggacctgtttacctgcttccgccgctatccgagtcgattggcaggcatcacgggcaacgtctccttcatcctgctttacatcatctggctgcacattgttcgctacttcagtggcgagtgggtgtatcccattctggaagtgctgcccgcatacctgcgctacgtgttcttggcactacttgtggggttcaacctggtttgctatctgctcggggagttcgccaacaacgtcgtttggggtccggagtttaagctcctaaatcaacagaaattaaagcaaggctaggactcgaggatttaaaatcgtttattagttacacaaattattatgtataattttgtaaacttgaaggcactttctgaggtacgatttgtgtgcccaagaggcttatttatatcgtacttaaatctataatctacaatctaaagtcctgtacccacggcaaagaaaaataatgaaaataaattattatcctctttggcatttactttggcgtgagtaccaggattaaggaaacagtcattcacaaacgtacacagagattcgaatgcttacaagctagatggggtgatgaatctgtaaaataaagttgcagcctaatgactatgagtattcgtaattcgtagttctagtttcgctcagtctgttccagtaatcgattaagaagaatctaaatgttcatcgcatgtaaactgctctggcttgtgtactacaatttcgtatttgtttgttttaaatatcatttgggtttccaattctagtgaagcgatatattcttataaatcgttgaacagtgaacataacaatattacgatttcgtaaaatagataagattgtacgattattttcagcgctaacaatttgatttcttagaacaaaaactacaatattgtaagagtttttgaaccttaagtaaatgcatcaattgcttatttagtcttgctattttgaaggcagcaataacattttgagtttgtccgactcgctcataaacgtgggctccctttgatgccgatgggaatgacccaacaagccctgcagctccgttcctccgaaatcctcattggctgcttcagttctttgtctgctggctgcgtttaggagtcgcatggcctgctgcagttcgtcttctccgtaactgggaactagctcgaaaggattagcctgtatgcccacatcgcagctggttttgctgtttctactatgtggtttgcccatggatattccagaaaaagagctgttaagaaggcttcctacgtccaaagccacatccagctcttcagaggagcagctaagtgagtcattagaccgatactttacacagtccttcctgaaatctagatcagcagcagggttcttgagatgtctcttttgggacttttttgactgacttcttgcggaatttcgggaatgtcggttagaattggattcattagatttttttatgtttttaagaaagttctccaatgccacctgtttgctatttggcagttcttcaatctttattccgtcgtgatcatcctcacttatttcctgctgctttacaaccacgttaagatcctgaatcttttgggatgctctggaattatcctcctccgaactagagctcatatcttgattttggaggaatgggaatataaaatcgccatttttctgcaggaattcattaagaatagagggatccaatccggcattagcagtccttcgcttcatggagctggtgtaattgtgttgtttcttggagctgtgatgagcaaacacgcccactttgtgactagcattgggataggtcgttttcttgagcgcgatgacctgcgactccactgaagtactgctttcccttctcctactgctttttccagtggcagctgctatataatcccttctcctttgggttcttctgttgctggaagagcctccgtgttttccccttgatctggacgccactttggtcttcatttcagctattttcactgatacctgcgagtccaccgaatttctgcgggattcaacggaaacatgtcgaacactcacacttatctcggaatccaatgaattttttcgcggtccatggcttgacgagttacctgtcgctgctcccgtcaaagccatgcgacgttttacgcactgcgggaggtatgcagcccaagttgatgagatgtcattcgtctcagaagagttcagatcgttcacatcgaagttgagccccacgggatctgtgtgggtgttgtagagcgttatggagagcctgcccttgtcctcgaaatccttgcgcttggcccatgtctgggcaatgaccttgtgcttcggcattttcacttcttcgaccacctctttgccacactttctgcaaaggttataaaatcgatagtacagataactttaatgcaacttttggtaggatggtaaaacatacttccttatataacgcttccaagtctcaattgaagaaggtgtccagcaccaggtggacattacgattccagagctaaatagacacagcaaatgcaattgaagaacgccaacactaggtcggttttcaattcgacaggaactcttttcttcaaaaactgaagaaattttgcagctaaacaaaagaattatctagttgaggcgtatggaaaaagttataaacgagtatttacacttacattataaactgtctgaagctctgggcccattcgtctgcatgcctaaactccgtaacgtggcacgcaatggccactagtatgaaaactaaagtgagcagagcacagactcccatgcgcatgatgatcaaatggattttgttgctcgccgaagttgatttaatgtcattagcgaagtgtttcagtccaaaaagcatcaccatgccgcgggtgatgaagtatccaccaatgaggatgaccccgcagagcggaccaagaagtagtcctgccctcatagaatgattgatatagcctacgaagcagatgcccacaatactatttccatccacctcactgaaagccatcgtggtaatggtaagcacaaggggtagtgaccacgccacgaggtgaaagtaggaacctttcttatctatccgatcttggacgtggcccatggccctccaatgccaggcgtaggtgaggaacacaaaccaaaccattccagcggtgagaaaataatagaccagcacaaagatcactatgcaagaaagattttcaccggctgtaggctctgagtggcgaagtgttccatccttacgacatactatgtcctctcgcgagccagaagtaaactgaagcaaccagctgcatagtaaatacgtggttgattaagaatacaaatgcaaaatagtgctcaaaacttacccgacgcaagcaattagaaagcaaagatttatgtagaacacaattactgccggatacttgttggcattcttccagtcgatgaagaaggtggacaccacgaaaaggttagacagaagacatatgctgccagcccatccgatcagtttgtggatctgccgatgctcatcatcggtatagagtggatccttgcatcgcacgccgcagccctcgatgccaggataatagctggctgacgtatctgtcggaaccaaaggacttaaacactggccagttccgttgaatttcattcctcgtgctccgtttgtgcatttcgtcggaaagagtgtttcgttgcagcgaaggaattttgggaaaaacgtcgtgttgtacaaaatgcgacagggttccatggtaattcggcacatctcgtaagatggcaggtagaccatgtcctcgccgttgattttttcacacttcggcttaaagacggcgcacaaaaagggctataaacatgtaaaaatgggtgtgttgagctaatccggaatattgaagaaatggatttgaaatactataatatctacagaaaaccttgagccacaactgaatatgtatatatatctgaatcttcccaagataaagcaattcacatattactttcactgcttgaacacaaagcgtaattaagtaatcacagttgtgcgcttaacttgtttctaatgcacctccttatcagaaaataatgcgacaatctgtattttcatacagactcggccccaccttttgaaatcattaggtacattagatgttattaagattcctcacctgtatagctgcccaacatttgggcacgtgcttcagggcatagtagtcgttcagcttatcgttcagctccttttcggtgtggaagtcggtgagatctaggctgctcagctcatagggcaattttgagccgaaacaggtgttggttgcgttcgaggtggggtagcaacgggcacgtcggacacactggatgtgcctgctgtctaggccatcaaaccagggtttgtcgtccctgcccttcttggcgtacagtcggtaattgagagtcccattgatgggctccagttccacatccgactgctgcgcacttgcgggcgttgtgctgccgaacttggccgaactggccgatgcgtctgcgaccacccacaggcataagatcgcaacctccaggaacatcctgcggtttgtaaataaccaagttattttaattgcccacaccatttgccagaggcgagtcactcacataatgtttggcatgcgcggaaagtttaagtactgcatccgcttataaaaatcattaaatagctgccttgtgtgaattttaatgggctgaatgcccgtttcttgctcagcggttcgtcagtgcatcgtgaaggcgctttcgttggactcgggatatcctggtttaattgttccctttgaaggattgcagtgtttttaaaaaagagaaaaaaaaaacaagaaccaaggaggaaaacaaaaataaacgcgactcaacgtgaagctgaagcaacaaatgtgcgaccattcagggccagtttaaatatacccatgttatcggtcagcgagatttgcatgttatcggtcggcatcggttattatcggtcatagctgcaacaagtcgaatgatatgcaaacaaatcggatttattttgttcgatcgtaacataagataacatcaacataaaataagaaatatgatcatatgtagaaatgcatcagcaaacgaaaaaggtgttccccgcaacattttgactatatggcaatgctggccgctggcttatttatttatgccatgcgctcgacggtcacactgggtgcggagtatcgataacaccgcgatagtagcgcaccaagcatcgatgtagtttttacatccctattctgcaatattatttcacggcacggtccaaaaacacggataacagggcttggttggagtcgcgcaaacgcaaatagaagccatggacgttgcccccgcaccgcccgccagttccggcggcgatcatagcacccagcaggcgccgatcagtccgaatcaaaatgcaaaccaagcgccggtcgcactcgcaaaggcaacaacaatcgaaaatggtgtacaaacaggaggagcgaaaaagccagagagctgcggtgagaaagcccccggttagcaaacttgctcgaagctagtctagtttcctggttaacgtttaccttttagccgtagagccgacacattccactgatgctagccagaaggacgacgacgagggcaagccgaagaccgagctggctgacaaagtattgattaccatatgcagcgccgatcgcaagatcaagaagaccttcatgtcgttgcccactcgaaaggatgtaatcgacaaaggtaaggaacgtccgacgaattgggtatctattcatccagtattccgaatgaacgttgcccagttggaagttattaaccagtagacagtctttaataagaatctattgggtttaagcttagagcatttct

SEQ ID NO: 4760 - DNA, 3327 bp, DROSOPHILA
ttgagtcgcgtttatttttgttttcctccttggttcttgttttttttttctcttttttaaaaacactgcaatccttcaaagggaacaattaaaccaggatatcccgagtccaacgaaagcgccttcacgatgcactgacgaaccgctgagcaagaaacgggcattcagcccattaaaattcacacaaggcagctatttaatgatttttataagcggatgcagtacttaaactttccgcgcatgccaaacattatgatgttcctggaggttgcgatcttatgcctgtgggtggtcgcagacgcatcggccagttcggccaagttcggcagcacaacgcccgcaagtgcgcagcagtcggatgtggaactggagcccatcaatgggactctcaattaccgactgtacgccaagaagggcagggacgacaaaccctggtttgatggcctagacagcaggcacatccagtgtgtccgacgtgcccgttgctaccccacctcgaacgcaaccaacacctgtttcggctcaaaattgccctatgagctgagcagcctagatctcaccgacttccacaccgaaaaggagctgaacgataagctgaacgactactatgccctgaagcacgtgcccaaatgttgggcagctatacagccctttttgtgcgccgtctttaagccgaagtgtgaaaaaatcaacggcgaggacatggtctacctgccatcttacgagatgtgccgaattaccatggaaccctgtcgcattttgtacaacacgacgtttttcccaaaattccttcgctgcaacgaaacactctttccgacgaaatgcacaaacggagcacgaggaatgaaattcaacggaactggccagtgtttaagtcctttggttccgacagatacgtcagccagctattatcctggcatcgagggctgcggcgtgcgatgcaaggatccactctataccgatgatgagcatcggcagatccacaaactgatcggatgggctggcagcatatgtcttctgtctaaccttttcgtggtgtccaccttcttcatcgactggaagaatgccaacaagtatccggcagtaattgtgttctacataaatctttgctttctaattgcttgcgtcggctggttgcttcagtttacttctggctcgcgagaggacatagtatgtcgtaaggatggaacacttcgccactcagagcctacagccggtgaaaatctttcttgcatagtgatctttgtgctggtctattattttctcaccgctggaatggtttggtttgtgttcctcacctacgcctggcattggagggccatgggccacgtccaagatcggatagataagaaaggttcctactttcacctcgtggcgtggtcactaccccttgtgcttaccattaccacgatggctttcagtgaggtggatggaaatagtattgtgggcatctgcttcgtaggctatatcaatcattctatgagggcaggactacttcttggtccgctctgcggggtcatcctcattggtggatacttcatcacccgcggcatggtgatgctttttggactgaaacacttcgctaatgacattaaatcaacttcggcgagcaacaaaatccatttgatcatcatgcgcatgggagtctgtgctctgctcactttagttttcatactagtggccattgcgtgccacgttacggagtttaggcatgcagacgaatgggcccagagcttcagacagtttataatctgcaaaatttcttcagtttttgaagaaaagagttcctgtcgaattgaaaaccgacctagtgttggcgttcttcaattgcatttgctgtgtctatttagctctggaatcgtaatgtccacctggtgctggacaccttcttcaattgagacttggaagcgttatataaggaaaaagtgtggcaaagaggtggtcgaagaagtgaaaatgccgaagcacaaggtcattgcccagacatgggccaagcgcaaggatttcgaggacaagggcaggctctccataacgctctacaacacccacacagatcccgtggggctcaacttcgatgtgaacgatctgaactcttctgagacgaatgacatctcatcaacttgggctgcatacctcccgcagtgcgtaaaacgtcgcatggctttgacgggagcagcgacaggtaactcgtcaagccatggaccgcgaaaaaattcattggattccgagataagtgtgagtgttcgacatgtttccgttgaatcccgcagaaattcggtggactcgcaggtatcagtgaaaatagctgaaatgaagaccaaagtggcgtccagatcaaggggaaaacacggaggctcttccagcaacagaagaacccaaaggagaagggattatatagcagctgccactggaaaaagcagtaggagaagggaaagcagtacttcagtggagtcgcaggtcatcgcgctcaagaaaacgacctatcccaatgctagtcacaaagtgggcgtgtttgctcatcacagctccaagaaacaacacaattacaccagctccatgaagcgaaggactgctaatgccggattggatccctctattcttaatgaattcctgcagaaaaatggcgattttatattcccattcctccaaaatcaagatatgagctctagttcggaggaggataattccagagcatcccaaaagattcaggatcttaacgtggttgtaaagcagcaggaaataagtgaggatgatcacgacggaataaagattgaagaactgccaaatagcaaacaggtggcattggagaactttcttaaaaacataaaaaaatctaatgaatccaattctaaccgacattcccgaaattccgcaagaagtcagtcaaaaaagtcccaaaagagacatctcaagaaccctgctgctgatctagatttcaggaaggactgtgtaaagtatcggtctaatgactcacttagctgctcctctgaagagctggatgtggctttggacgtaggaagccttcttaacagctctttttctggaatatccatgggcaaaccacatagtagaaacagcaaaaccagctgcgatgtgggcatacaggctaatcctttcgagctagttcccagttacggagaagacgaactgcagcaggccatgcgactcctaaacgcagccagcagacaaagaactgaagcagccaatgaggatttcggaggaacggagctgcagggcttgttgggtcattcccatcggcatcaaagggagcccacgtttatgagcgagtcggacaaactcaaaatgttattgctgccttcaaaatag

SEQ ID NO: 4761 - protein, 1036 aa, DROSOPHILA
MQYLNFPRMPNIMMFLEVAILCLWVVADASASSAKFGSTTPASAQQSDVELEPINGTLNYRLYAKKGRDDKPWFDGLDSRHIQCVRRARCYPTSNATNTCFGSKLPYELSSLDLTDFHTEKELNDKLNDYYALKHVPKCWAAIQPFLCAVFKPKCEKINGEDMVYLPSYEMCRITMEPCRILYNTTFFPKFLRCNETLFPTKCTNGARGMKFNGTGQCLSPLVPTDTSASYYPGIEGCGVRCKDPLYTDDEHRQIHKLIGWAGSICLLSNLFVVSTFFIDWKNANKYPAVIVFYINLCFLIACVGWLLQFTSGSREDIVCRKDGTLRHSEPTAGENLSCIVIFVLVYYFLTAGMVWFVFLTYAWHWRAMGHVQDRIDKKGSYFHLVAWSLPLVLTITTMAFSEVDGNSIVGICFVGYINHSMRAGLLLGPLCGVILIGGYFITRGMVMLFGLKHFANDIKSTSASNKIHLIIMRMGVCALLTLVFILVAIACHVTEFRHADEWAQSFRQFIICKISSVFEEKSSCRIENRPSVGVLQLHLLCLFSSGIVMSTWCWTPSSIETWKRYIRKKCGKEVVEEVKMPKHKVIAQTWAKRKDFEDKGRLSITLYNTHTDPVGLNFDVNDLNSSETNDISSTWAAYLPQCVKRRMALTGAATGNSSSHGPRKNSLDSEISVSVRHVSVESRRNSVDSQVSVKIAEMKTKVASRSRGKHGGSSSNRRTQRRRDYIAAATGKSSRRRESSTSVESQVIALKKTTYPNASHKVGVFAHHSSKKQHNYTSSMKRRTANAGLDPSILNEFLQKNGDFIFPFLQNQDMSSSSEEDNSRASQKIQDLNVVVKQQEISEDDHDGIKIEELPNSKQVALENFLKNIKKSNESNSNRHSRNSARSQSKKSQKRHLKNPAADLDFRKDCVKYRSNDSLSCSSEELDVALDVGSLLNSSFSGISMGKPHSRNSKTSCDVGIQANPFELVPSYGEDELQQAMRLLNAASRQRTEAANEDFGGTELQGLLGHSHRHQREPTFMSESDKLKMLLLPSK

SEQ ID NO: 4762 - DNA, 6820 bp, DROSOPHILA
cttgatatcgttattgttattgctgctatcgatgtttgttgttgttgttgttgctcgccgggagagcgttagctggctaacgggacaaagtaagagtccaagtggccaacaaggctgcgacttttgcctgcgtcaacgcttcttcttcttgctcttatttgccgtcgtcttcttcttcttcgtgccctgtctatttgttgctatttttagcaacaacaattcctcctcctttttcagctctttttcgctgtcctcttactcgctctctctctctctctctctctttccctcagccacagccgctctttcactggattcctgctcctgacgttttttgttttatcaattatattacagttacagttcttgcctctcgctcactcacacactcgcgctatctctttttttctcttacacgagtgggtgcctgcacatgtgtgtgtgtgtgcgccttgctcaattgttattgttgcgtggccaagtgttttgcattgtttttctggtcccactgtcacttgcattcaatggcttaacaatgtcactgttgcacgttaacaaaaaaacactattttgcgcactatttgcggacgctgtttctatttgcttcttctatttttcaacttgttgcacagagctgccagaccggccacgtacgttatcgacattcctaaggggaatatcgataacaggttggtgtgttagctaatttgatatcgtgtggtgtatagcttgggtggaaattcaccttgaaataatcaacacacccccactagtatttttaaatcttttaatcaaaaaatatattttttatatttgggaaacagatatttatgcttattcaaaagcacacaactagtttgtggtaggtagcagagcagaactagccaggactgcaattcaaagtggggaacttgattagaaatttacaacggtacgtcatcgagttttgatcagccattcgatagcagtttcgattgtcagttctatcggtcgagcggggacactggttcgcacgtgttgcgatttgcgtgcattgagtatttctgtttctttcgagcatttctcgcgtgggggatcatgggcaaattccgatcgaagctaaagcgcaatggcaagggaaagacatggagcagaggcgaatcggccacctccaatcccacccagatgaagcaccgcatgaaggccaaatcgcgattctttcagcccaatttaagtttgggtgagttcttccttacttgccatcttatgttagcacctgtaaccaaattccttacagctgcagccacgaccaccggcctcaccatggaggcggtccacaagcatgagcagagtcaggcctttaatgcggaaaccacaacggttaacgatgtggccggcagtttgagaagtttcaaactggatgacgatgatgacggaatgtccggttccggcaccgctcccaccggcaccgcccccaccggcaccatcaaaaccttccagaccttcgcctccaactacagcggttgcagcaacacatgcttccagaaactggtcaccagcttccggtcctcgtccgctcttcacaaggagatgctggccattctgagcgccctcaccgaaataatccgcgagaacggcggtggcgagtcgtctacagagtatttcctgctgctcatggagcagatcgaggccgctaccgaggaacgggacattgtggccggcgtaacactgcttgccatgggcattaattcggtgccggctccggttctcaaaaagcgattcgcccagaccgctgacaccatgcagagactgctccagcgctttatggagtccactaaccagtcggtcatccgacatgtaagtgcaaaatgtgtttaccagaaagctgttaaatacgtatttaacgtcgatgttcgtgtttttccatttacaggtaatcggctgcctttctgtcattctgcgcgcccaggattacgcggcatggtcatacagctcgacgttccaatactttgatgccattctggcgttcagcattcactcacagccgaagatccgcaaggcagcccagcatgcaattgccttaattattcacggcagctgtttcatgctgccggctatcaaatcagatgacaatgaaatggatgaagcggttgagcagccaaaggttaagcatcatccggctagcagtcgcgtggccaagttctgtttggctcagttcaagccggaggtactggccaatgcacagacgacagtgctgcacactttggagcttctcaaggacacgttatacggtttcaagacggaggacatacgcagtgtctgcgagcatctgctttccattatgacggcggccaatgtgctggttaggacgaactgtttccagacactgtactcccttttcctcaaaaaaagccccaatttaaatgcctcactctgcgccaaactgctggcagcgatacacgagtaccggccagacaaaagcgacatccggcagacgatcgcctgggtgacggtcttaaaggagggccacctccatttggcgaccatgcagctggatctttgtatgcaggccttgccgcgtctgatcgatgtctgcaccacggatctttggctctcggaccaaaaggagctggttgccggtgtctcaaattgtatcaaggagctgctgcaagactgtgtttcgcgcgcttgtgctacagcggaggatgcacagtgcaacaggcaaagtgtgtccaggataattgcttcactgcacaagatgctaaacgctccattcggagagatctccagattcgtgatcctcatcttctcgttcgtctttgaggcctgtggaaagctattcgggttggtctgcaatgtgtgccataatatttaaatgcttaataatattataatgctttcagttcggaactcacacccccgctgatgacaatctgcaagcgctacgacacccagagtgcacatcgtctgcagatcgagcacactgtgatcagtgccatcaaggctttgggacccgaattggtactaacagctataccgcttgccgatggcaagggcgtcatgcagcttgagcgatcctggctgctgcccctcctccgtgagggagccaacggtgccagcctgcagttcttcaaggagaagattgtagcactggccatggactgccaactgaagtggaaggagttcgccgaggcgaagaacaattcttcatcacacatttacgagctattgtgctgccagttgtggggcttgttccctggcttctgtcgtcagccaagggatcctgaatacttgcggtacctagctcccactttgggtgcggctgtggaaaagaacccggaatttaggcctcccatttacgatggtctgatggagctgctcggtgacaaccaaagtgcggaatgccatcaggcaattggccagtatgccaagaactttttgcctcgcctcttcaatatctatacgcagaaaccgaatggaacctacgaggccgatcagcgcaagcgtgttctggaagtcattcgtttgtatatttcccgggcgccggctgatgtccaactggagctctttgagaacgcccaagagcaattggctgccagtgccttggccagtttcgaatacgacgctttctttgacattaatgctgccatagtgcgcgtgcaaacatgcaagggaatcaaagcatatttcgataagtacatggctcccattctgaggaacgataaatcgaaattggtcgccaaagatgagcagaaactgaaaaagcagcaaaggaagacctacgagtatgtacacttgttgttagtcatagtcacactgcagtgtacttatgagcccttcttatttatagactacttcgcgaactgatgacctcggagctgccatcatgccagaagtttacccgcaagaacagcattgtcctgcagcaaatccttctcgattcatttaacaccagctgcaacgtttgtcaggcatcgcgtttgcagtaagttaaagtgctaaatgatcgctaaagtgtaggctaaactattatttttcaatcatcagctgcctgaagtccctgatagactgccacagcaatctggcgtacaacgatcaacttgtgatgaaggccattccggaggcagtgctcaactataaggaattctccaattacaaggaacaggtggccgagcagctaatcaaatctattactcaactttatcacgatgccggcaagattaacgactttgttgatatactgacggcaggatttgccggcgatgaaatgctggtgacgaacacaattttggcctttagggctgtgctccagcagcagggtgagcacttgacagtggccactctggagtttgtcctgcagcaggtctctgttttcctcgtccagaagtcacgcaagcaagcggaggcagccattgcctttctgattacattcatcaaagtgatgcccataccactggtggccaatcacctggaggcaattgtgagcacatccgccgacatttaaattaggcacttgaaccgaataattagttctttcccctcctttagatgcgttccttgtcggccatgaccaaggatacgaagcgatactgccgcatccagatcggttatttgcttaagaagctctgcattcgttttagccccggggagctggccggcttcgttcccggcgatgacgatgtaatccatcgccggctgaagatgatccgcaagcgtacgcgcagggatttgcgcaagaaacagaacttggaagcgcaggaggatagctccgatgatgagctggtcagcggtctgcaggaaaagagctacacgtaagcgtttttcatacacagtaattacccaaataactaaaaaaaatcccttccacagcattgatgatatgctagctgactccgattcggatctgcccgaagatatggacgctaaggatgaggccggagctgcagccgcagctagcaagcgtagcaagaatgctaagcaacagaagagcacttacattcgcgaggatcccgatgagatagtcgatttggccgatctcaagtccattggcaatgtgctgagtaagttgaagtcgtttgaaaatcgcacaaatcatcactttttttgtttctttgcctttgccccactccagccagtggctccgctcaaacggccacccctgcccagagtcaaaagacgaaagctcagctgccgaacggtggcttcaagactgccgacgatggacgcctgatcatcagcgacaaggcacttcgtggccagggcggtaacgatcagtccgatgacgactcggattccgatgcatccatggcgtatggcactgtagccaagcagcccaaggttaagcgtggcatggaagacgattcgagcgacgaagataaactgcagcagaagctagtacccaagcgtgtacgcaagggtgatgatgcgatgagcatgaaatcgggcaaaaccactgccagtagtcgctacactgccggtggcaagggcattcatcgacagctgacagctggaaactcggatgccatgtccgtgaagtcaggcaaatccaccagccgcccagcgggcagtgagtacggcagcaagaaggccaagggtgatatgaagaagagcggaaaactggatccatatgcgtatataccactcactaggaataacctgaacaagaggtgtgtatccaaaatgtttaatattattaatatacccgtccctatctaatactccatctctttcgcccccagaaaacgttcaatgaattcgcgaaaattcaagagcgtattgcgaggagctggcgctgaaaatggaggagccggcggtggccgggtgtccaagaaatacaaatagggcagacgattcaagccaactggctaacaggctcgtaaagctatagagatatagagatgtataataacactgggatagtgcggtctgttgataaggaagctaagacgttgatgattatttcccctgttactttgcttaaatatataaatataacttaatatatatatatgaacatgtggagacgttgtaaatgccacagataaagaaaaacagaaacagaatagttatgtatttttttttttttttgttttgatctgcaaagactttgaataaagaattttgaaagcaacatagttcgatgcgtggcagaaagaagagcagtaacgttagattaaatccacacaagctttatgttctttaaagatatagtaaatatgactatttattatcgcaaatgccagagtcaaaatacagattggtagaatattagccaattaggttattctacaaaagaggaaagtcttcgaacgagatagttgcgtcaagaagttgcgtcatcctgtccgtggtcaaacgccgttttgaaaatccttttcaatgtgggtcttgttccattcgccgtgcggatccaatccagtcattgtctcctcaatgaagtgcatcttattctcgctgtccaccaggacaacggagtgtgtacggctgccataggcatgctcttcgatatggacgtttagggaactcaatccctcgccccagttgggcgcacgtgtctttagctcgtcgtccggccagaatttgtgcttgttgcggagcaactgcatcagctgggcggacagagtctccacgctggcttccccatgagccttaacgatcgcctcgaactcctgtttgccatgacgcaccttctcgaacggagagtgcggcagactgttgccaaatccgtagcactcgccgttctggaaatcctccagcgtgggcggcacattgctcagcagcttcacgcgagcgggctgggatgcagatctgttgagaacgaaggcgtgcagtagatggtatc

SEQ ID NO: 4763 - DNA, 4181 bp, DROSOPHILA
acactggttcgcacgtgttgcgatttgcgtgcattgagtatttctgtttctttcgagcatttctcgcgtgggggatcatgggcaaattccgatcgaagctaaagcgcaatggcaagggaaagacatggagcagaggcgaatcggccacctccaatcccacccagatgaagcaccgcatgaaggccaaatcgcgattctttcagcccaatttaagtttggctgcagccacgaccaccggcctcaccatggaggcggtccacaagcatgagcagagtcaggcctttaatgcggaaaccacaacggttaacgatgtggccggcagtttgagaagtttcaaactggatgacgatgatgacggaatgtccggttccggcaccgctcccaccggcaccgcccccaccggcaccatcaaaaccttccagaccttcgcctccaactacagcggttgcagcaacacatgcttccagaaactggtcaccagcttccggtcctcgtccgctcttcacaaggagatgctggccattctgagcgccctcaccgaaataatccgcgagaacggcggtggcgagtcgtctacagagtatttcctgctgctcatggagcagatcgaggccgctaccgaggaacgggacattgtggccggcgtaacactgcttgccatgggcattaattcggtgccggctccggttctcaaaaagcgattcgcccagaccgctgacaccatgcagagactgctccagcgctttatggagtccactaaccagtcggtcatccgacatgtaatcggctgcctttctgtcattctgcgcgcccaggattacgcggcatggtcatacagctcgacgttccaatactttgatgccattctggcgttcagcattcactcacagccgaagatccgcaaggcagcccagcatgcaattgccttaattattcacggcagctgtttcatgctgccggctatcaaatcagatgacaatgaaatggatgaagcggttgagcagccaaaggttaagcatcatccggctagcagtcgcgtggccaagttctgtttggctcagttcaagccggaggtactggccaatgcacagacgacagtgctgcacactttggagcttctcaaggacacgttatacggtttcaagacggaggacatacgcagtgtctgcgagcatctgctttccattatgacggcggccaatgtgctggttaggacgaactgtttccagacactgtactcccttttcctcaaaaaaagccccaatttaaatgcctcactctgcgccaaactgctggcagcgatacacgagtaccggccagacaaaagcgacatccggcagacgatcgcctgggtgacggtcttaaaggagggccacctccatttggcgaccatgcagctggatctttgtatgcaggccttgccgcgtctgatcgatgtctgcaccacggatctttggctctcggaccaaaaggagctggttgccggtgtctcaaattgtatcaaggagctgctgcaagactgtgtttcgcgcgcttgtgctacagcggaggatgcacagtgcaacaggcaaagtgtgtccaggataattgcttcactgcacaagatgctaaacgctccattcggagagatctccagattcgtgatcctcatcttctcgttcgtctttgaggcctgtggaaagctattcggttcggaactcacacccccgctgatgacaatctgcaagcgctacgacacccagagtgcacatcgtctgcagatcgagcacactgtgatcagtgccatcaaggctttgggacccgaattgcgatcctggctgctgcccctcctccgtgagggagccaacggtgccagcctgcagttcttcaaggagaagattgtagcactggccatggactgccaactgaagtggaaggagttcgccgaggcgaagaacaattcttcatcacacatttacgagctattgtgctgccagttgtggggcttgttccctggcttctgtcgtcagccaagggatcctgaatacttgcggtacctagctcccactttgggtgcggctgtggaaaagaacccggaatttaggcctcccatttacgatggtctgatggagctgctcggtgacaaccaaagtgcggaatgccatcaggcaattggccagtatgccaagaactttttgcctcgcctcttcaatatctatacgcagaaaccgaatggaacctacgaggccgatcagcgcaagcgtgttctggaagtcattcgtttgtatatttcccgggcgccggctgatgtccaactggagctctttgagaacgcccaagagcaattggctgccagtgccttggccagtttcgaatacgacgctttctttgacattaatgctgccatagtgcgcgtgcaaacatgcaagggaatcaaagcatatttcgataagtacatggctcccattctgaggaacgataaatcgaaattggtcgccaaagatgagcagaaactgaaaaagcagcaaaggaagacctacgaactacttcgcgaactgatgacctcggagctgccatcatgccagaagtttacccgcaagaacagcattgtcctgcagcaaatccttctcgattcatttaacaccagctgcaacgtttgtcaggcatcgcgtttgcactgcctgaagtccctgatagactgccacagcaatctggcgtacaacgatcaacttgtgatgaaggccattccggaggcagtgctcaactataaggaattctccaattacaaggaacaggtggccgagcagctaatcaaatctattactcaactttatcacgatgccggcaagattaacgactttgttgatatactgacggcaggatttgccggcgatgaaatgctggtgacgaacacaattttggcctttagggctgtgctccagcagcagggtgagcacttgacagtggccactctggagtttgtcctgcagcaggtctctgttttcctcgtccagaagtcacgcaagcaagcggaggcagccattgcctttctgattacattcatcaaagtgatgcccataccactggtggccaatcacctggaggcaattatgcgttccttgtcggccatgaccaaggatacgaagcgatactgccgcatccagatcggttatttgcttaagaagctctgcattcgttttagccccggggagctggccggcttcgttcccggcgatgacgatgtaatccatcgccggctgaagatgatccgcaagcgtacgcgcagggatttgcgcaagaaacagaacttggaagcgcaggaggatagctccgatgatgagctggtcagcggtctgcaggaaaagagctacaccattgatgatatgctagctgactccgattcggatctgcccgaagatatggacgctaaggatgaggccggagctgcagccgcagctagcaagcgtagcaagaatgctaagcaacagaagagcacttacattcgcgaggatcccgatgagatagtcgatttggccgatctcaagtccattggcaatgtgctgaccagtggctccgctcaaacggccacccctgcccagagtcaaaagacgaaagctcagctgccgaacggtggcttcaagactgccgacgatggacgcctgatcatcagcgacaaggcacttcgtggccagggcggtaacgatcagtccgatgacgactcggattccgatgcatccatggcgtatggcactgtagccaagcagcccaaggttaagcgtggcatggaagacgattcgagcgacgaagataaactgcagcagaagctagtacccaagcgtgtacgcaagggtgatgatgcgatgagcatgaaatcgggcaaaaccactgccagtagtcgctacactgccggtggcaagggcattcatcgacagctgacagctggaaactcggatgccatgtccgtgaagtcaggcaaatccaccagccgcccagcgggcagtgagtacggcagcaagaaggccaagggtgatatgaagaagagcggaaaactggatccatatgcgtatataccactcactaggaataacctgaacaagagaaaacgttcaatgaattcgcgaaaattcaagagcgtattgcgaggagctggcgctgaaaatggaggagccggcggtggccgggtgtccaagaaatacaaatag

SEQ ID NO: 4764 - protein, 1367 aa, DROSOPHILA
MGKFRSKLKRNGKGKTWSRGESATSNPTQMKHRMKAKSRFFQPNLSLAAATTTGLTMEAVHKHEQSQAFNAETTTVNDVAGSLRSFKLDDDDDGMSGSGTAPTGTAPTGTIKTFQTFASNYSGCSNTCFQKLVTSFRSSSALHKEMLAILSALTEIIRENGGGESSTEYFLLLMEQIEAATEERDIVAGVTLLAMGINSVPAPVLKKRFAQTADTMQRLLQRFMESTNQSVIRHVIGCLSVILRAQDYAAWSYSSTFQYFDAILAFSIHSQPKIRKAAQHAIALIIHGSCFMLPAIKSDDNEMDEAVEQPKVKHHPASSRVAKFCLAQFKPEVLANAQTTVLHTLELLKDTLYGFKTEDIRSVCEHLLSIMTAANVLVRTNCFQTLYSLFLKKSPNLNASLCAKLLAAIHEYRPDKSDIRQTIAWVTVLKEGHLHLATMQLDLCMQALPRLIDVCTTDLWLSDQKELVAGVSNCIKELLQDCVSRACATAEDAQCNRQSVSRIIASLHKMLNAPFGEISRFVILIFSFVFEACGKLFGSELTPPLMTICKRYDTQSAHRLQIEHTVISAIKALGPELRSWLLPLLREGANGASLQFFKEKIVALAMDCQLKWKEFAEAKNNSSSHIYELLCCQLWGLFPGFCRQPRDPEYLRYLAPTLGAAVEKNPEFRPPIYDGLMELLGDNQSAECHQAIGQYAKNFLPRLFNIYTQKPNGTYEADQRKRVLEVIRLYISRAPADVQLELFENAQEQLAASALASFEYDAFFDINAAIVRVQTCKGIKAYFDKYMAPILRNDKSKLVAKDEQKLKKQQRKTYELLRELMTSELPSCQKFTRKNSIVLQQILLDSFNTSCNVCQASRLHCLKSLIDCHSNLAYNDQLVMKAIPEAVLNYKEFSNYKEQVAEQLIKSITQLYHDAGKINDFVDILTAGFAGDEMLVTNTILAFRAVLQQQGEHLTVATLEFVLQQVSVFLVQKSRKQAEAAIAFLITFIKVMPIPLVANHLEAIMRSLSAMTKDTKRYCRIQIGYLLKKLCIRFSPGELAGFVPGDDDVIHRRLKMIRKRTRRDLRKKQNLEAQEDSSDDELVSGLQEKSYTIDDMLADSDSDLPEDMDAKDEAGAAAAASKRSKNAKQQKSTYIREDPDEIVDLADLKSIGNVLTSGSAQTATPAQSQKTKAQLPNGGFKTADDGRLIISDKALRGQGGNDQSDDDSDSDASMAYGTVAKQPKVKRGMEDDSSDEDKLQQKLVPKRVRKGDDAMSMKSGKTTASSRYTAGGKGIHRQLTAGNSDAMSVKSGKSTSRPAGSEYGSKKAKGDMKKSGKLDPYAYIPLTRNNLNKRKRSMNSRKFKSVLRGAGAENGGAGGGRVSKKYK

SEQ ID NO: 4765 - DNA, 7465 bp, DROSOPHILA
aaaagtgaaaaagtatcatctatttgtatatcttttcgagcaccaaaatagcagaccgaattcaaaaataccctttttgtgtaaccagaggattttttgtatacttgccgacgtttatcccgtttcacatgtacatgtgtttaaccgaaaccgcacaaacacacacgcgacttggggctacctgaaactgaaattttcccgcattagattgcggcccttgccttccatgcttcgtcttcttcttcttctttctcatcgttgtttctgtaaataaagaaagatgtggagagggagttttttcttcctttacgttcgctctttcttccagttttttttgtttactttttattacttttcatgttctcttccacgaaaattagtgcgaaacagaaacgaattgcttagcgtttatcgacccgttttgtgttctcttattctgttgcgctcttctccttctcttgttcgctctcttgaaacaataatttccctatttctcgtgtaaaatgaatacatgttttttacagttattcaaaattaaaatattttgtatcacaaacacggagtaaatcgattattttaagattaattttaaaaatgttttgcgcgcatgttgttgaatttaatttcgcagctgaatgccttgtgagttctcttattctctttagctcttctccttctcttgttcggtctcttgcaaccatattttccttatttctcgtgtaaaatgaatatatgtttttttacagtttctctaaattaaaataatttctatcacatcatcgagtaaatcgattttttaaagattaattttaaaattgttgcttgcgcgcctcttattgaatttagtttcatagctgcttgccttttactgcgggttgttttgggaaatttatcagctgttagccgcgctgttagaggtaacagcgcttgcgacggacattctctaacacagccgggaaataaacatccaagaataatttgagtggccttccaacactgccaggcaaataaacaatcaaagaaaaaaagatataaaaaggcgtgtaaaaaaagacaaaagcataaacaaaaacatattaaaggtgcaatgcaatgtaattgccgagttggtgaattaaaattaccaggcaatagtcctcctacaaacgattcaatctacttccccttcccttggcccgcgtccaaaaggtgtggctgtaaccgaggcagctataaccacagtaggggccagcgaaatccctcagagtatcagtagtgtagccccagcacaagataacacccgtatacttatcaacttccccttctcctttttgcagcggcgttgccacctcactgagctgcgcggattccagcacgggctccagtgaggatgcgtccgatcccggctccccgtacagtgcgcactcgcaactgagcgacccgcccgacccgctggccaaaatgccgccacacatccttggaagcgccagcggaagcagctcgacagcggccgcctctccgcccaccagcagcgccagccagacgcctccatcgccagccatccaccacagtcatcttagccagcacaacgcaaccagcgccatgtccaagccgacgacgcctcagcgccacggcaaccccagcctccttcccacgctccagtggccgtggaacaccagcctgggcagcacctccactgccgtgcccgccgcctcggccaacaaaaacaagcggacggcggccggatctggagcggcattaggattgagcggtgaagggtcctgtttaaccggtggaggagccgcgtcggctaagaaagcgcgcagcgatttgcccggctcctttgacgcaagcaaaagactgaaagtggccgctatggaggagtcacagaccaagattaccggtttttttaaatcccaaatgaagccgtctcctggcggcggtaagctatcgccgcagcccggccagcaaagcaatccggccaacacgctgaccatgagcacgcccgcaactaccgcctcgctgaacaagtacttcaatatcctgtcgcagctgaaagagcagaaggcccaacagcaacaacagcagcagcaggcatccaagaccttgcccactccagctccagtcgccccagtcccatctgcgccccctgtcgcgcccgtggtcgtcactcccagtcccagtttgcccgtcccggcgctgaaaaagatcgaacgcagcaacaagcagcctgccaagatagcgcaggtggcacccaatctgcgcaagacgcccagcagtggatcttcaggcagctcctcgtcgtcctcgtctagctcctcaaatggctcgaatacgggaaaatcgccaacgaagaaacacgtggccatcgcacccaggacgccggagatgaaacagcagcagcagcagggaaaggcggccatggtctaccgaccgccagtaacaagcaccgctttgaagcaaaagcagatctcaccacccgcccccgttgcggcccacacacccgccccagcgccagcattaaatccaacgcccgcccccgccaatcccacgctttaccagctgcccgtacagcttcctaatctagtccagcttccgcctcagctggcggctgccgccaatattatgcagcttaataacgtggccaaagctgcagtggctgcggcggccaccaacaacgcggccgcgcaagcggcacaggctgctcaggcagctgctgcccagtacttcctgaacggcactgtctttaagctgcaacaggtgactacggccacgacgacgacggccaccacggccacagcagcggcggccccagctggcaatccctttggactgcttaacttagccacggcgggcaatccctttggcttacccaatgccaatgggcaattccccattgaagccattccgggagctggaagctatctccatcatcagctgcttttggccagacagaacaacatgagtttaaacggtaagtatagtatatttttagtttaattaaatgaactccgaaagtaggaatagctaagcttctagttcgacataacttgcagaggcataaaacactaaagaactcgaaaaagtcggtcaataagcttgcgtttccttacagatcggacggctttgattctcggagttttcgcttatgcttacttttccattacagaaactatggcttccaattcttgcggcaacatgaactttgttaatccacttaacaatcagcaagttggactcaaagataacaaattatatattgtaaactcggccgagtacctaggatacttaatgagtctgcagatagctcttaataaccaacagcaccagcaacaacaaatcatatctgccacacagccgccaccactggcagccacaaacaataacagtacgaacactgccactcagccgccgccattggcagctacgaacaataccaattcgaacactgccaacaattcgactgccagcaacagtatcaaccataatgcctcgaataatctaagcaatatcaacaacactgccatacagcctcagcgggcgattgtgaagccgccattgcacagttccacgcaaccgccgccgcttgtgacgatttcctccatgcccgcgtgctcaccggctgccgcatcttcgccagcggccaaacggtcactgcccgccgccaagccttaccagaagcggctgacagcaaagggcagagtggggacagcaccgataatcgcaacgcctacaacgccgcctcctctggtacccacgtctgctactaaggagctgggtcagttgcgcaagagtacgggaaccacgggaacccctactggcacacccacaccaacgccaccgctagtaagcatcgcaccctcgaagctgaccccaacgctgagcgtttcgaagcaaggaccgacaatgaagcttgcaaacagcgctcccgatctctttgacctggtgaagaactcaaagctggtagccaaggtttcgcaaccgttgacgccgcttcccttcagttcccccagcagcagtagcaacggaagccacggtagccacggtatgcgatcctcgccggccctctccacgtcaaactcctgcaccctgtctgcatttagcaagatcaaggtggaaacaacggagctggcttcccagacgggctccctgacctcttcctcaatacctacaatatcacttaagcctcagagcttcgccgggcagctgcccaaaagggaaccggaatcggaaaccgacacgctgaagcacgaccttttgccagactgcacaaacagtaactcaaactcaaattcctgtagcagcagcacctattcgcactcggttagttcggcagctgatctctcattagaggcctctacgcccgctccatcaccttcaccttcagcatcgccttccggcttgggatcaccctcgccggcggccagcaacttgagtgccagcagccggcgagctgcaagccaaactgatatgctaagtgaactggtcacttcgtcgtgcatctccagcggcggcgatgactgctctcaagccacagactcgcctccaatgccggcactccctctggccaagagtgaggatgctaccactcccatttccacggtcagcggaggaagcagcagtgggagtagcaattacgatgaagaggacgacaagtcggtggcctcgctggaaactcatcagacgcacaagcggctaagggacctgcccacgcccgagtcaggaatcggtggaagtctgagtaacagcgagagcagtaactcaattgccgatgccatgttagtacagtttataattgtaatattaagaaatgttgactaatcttaaaacatttccttactagttcctccaaatccgcctctgtgggaccacccactactgcagcgagcagtgcttcttcctccgcatccgacagcaactcactggctagcaatgcaccatccccagcctctccggaggattgttcagccgctccttcgcccgcctgctccgcctccactaccggatccattccgcctagcactgtggtggacattgcgatggtggaagccaccagcaagagtctgccaaagagcgctatatctccaatcctctcgcagccaaagaccatccgctttccggctggagcaggtgcgagtggcaaaggtggaaagcggcatgacggcgtctgctactgggacaagtgcaacaagaagcatgagagcaactccaagttgttggaccacatgcagacgcaccacgtcaatacacaaacaggtcccttcgcctgtctgtgggtgggctgcaaggtgtataacaaggagtcatgctctcgtcgctggctggagcgccacgtgctctcccatggaggctccaagcaattcaagtgcatcgtggagggttgcggcctacggttcggctcacaggtcggtacaaatcgaaaacaatgcgagtgcaacgtctataacccgatttttgtatcattcccttccagttggcgttgcaaaagcatgttaacaaccactttaatgccactgacaatgcaagggagagcaccagcaagcgcacctctgatccgccagtgcccaaacaactccgtaagaatggcaagaagctacgataccgtcgtcagcctttctcaggtgaacataattcatgttcagcaaaacataaaacattaagtaaaaccttaagatcagcgcaaagaccatacttgaatggaattgtacaatatatcttaaaagcattgaaaaatattttttgttttcaccctaaacataaaatgcaatttatctaatttaacaccttaaattacagctcgcatgtttgacttcttcgacacgggcataatggagggactacagcaccgcctgcgccagattagcacactcaccaacggtgcccaggccatcgagttccaggggcagtgcatgatgcgacgccgcaatagccaaggcggctacgagtgcttcgtgcgatggtccccgcgcgagatgtaagtcaacccgaaggtatctctattttgcagatgctaattccttctcctccccaaacagcatttccgacgagtggctgccggagtgtcttaaccgaacgcgtcagcacactaaagtactacacatcaagcaaatgcggccagccgaaaaaactcgcgtggatagcctgctcagcacggcttttcgcttacgctatgactcccacttgttcgccgacgattataatgtcaacgagcagcaggtaggcgaggcgagcggtagcgactgcgacgaggatggggatggggatcaagaggaggaggatttagaggatcaagatgaagatgaagaggaagacggaagcagtagttcgcgcagtgcgagttgtgagacggtgtccagctatcagcaggtacttagcatcgccaagctgcagatgcaacagcggcgtaagcatccgcgaaaaccacccaaagtgacaccgccggcgagggaaaagctggttccaacggacgcactggtgcccatttaggggcatatcagatttatagtattttctaagtaattaaaccgaaaaacaaacgacaaacgagtaaacagtgacaagtagtctagttagtgtaagaccaaagtaaattactacatgcatccattaatgtatagaaatgatgagtactcccgctttgtttgtttttgttttgtttggtgcgcgtaaccagccgtttagtttttgatcccatcgaagtttcgtttatcgatcgttgtacatatattcggttggaatcaagagtaaaagtcagaagcatttagtggccacctaatcacaacccacccacgcgttctagcaagtgctgttatgaacaaatgtcctagttcttagttctaatttaatttctaaaatgtatacttagtagagattcatgtgggaatggccgactggacagcacttgtttgtaagccaagtttatgttaatctattgacaaaattaaagttacattttgttttctttttgttgcccccctcgtattgcattgtactcttagaaactggccaaacttacactgaaagcggaaaatctacgcacacaactgagcagttaatgtttaagaatagcaaagtgacgtggaagaacacaagacttgaagcatttaccgctagaatacgagaaatatttgtataacattttgtactcaactcgaacagcaatgcaacagttttagcttaagttaactagacccaagcccaagacgattatccattaatttagtgcaaatcaaatgcaactttcgccaactcatcagcgtctctcaatcgatttgtgaaaagttgaagagacggaaaagcatcatgcatactgtatataaaatagcattaactagtttcgcgtttaaacttacattaaactattcatttagaaattagccaaggcaaaaccaactaaaatatgctaaataaagttttcggaagaagatcacaacaatctacaagcgaagtataacacaaaatcccatgtatttatcttttattattt

SEQ ID NO: 4766 - DNA, 4667 bp, DROSOPHILA
caggcaaataaacaatcaaagaaaaaaagatataaaaaggcgtgtaaaaaaagacaaaagcataaacaaaaacatattaaagcggcgttgccacctcactgagctgcgcggattccagcacgggctccagtgaggatgcgtccgatcccggctccccgtacagtgcgcactcgcaactgagcgacccgcccgacccgctggccaaaatgccgccacacatccttggaagcgccagcggaagcagctcgacagcggccgcctctccgcccaccagcagcgccagccagacgcctccatcgccagccatccaccacagtcatcttagccagcacaacgcaaccagcgccatgtccaagccgacgacgcctcagcgccacggcaaccccagcctccttcccacgctccagtggccgtggaacaccagcctgggcagcacctccactgccgtgcccgccgcctcggccaacaaaaacaagcggacggcggccggatctggagcggcattaggattgagcggtgaagggtcctgtttaaccggtggaggagccgcgtcggctaagaaagcgcgcagcgatttgcccggctcctttgacgcaagcaaaagactgaaagtggccgctatggaggagtcacagaccaagattaccggtttttttaaatcccaaatgaagccgtctcctggcggcggtaagctatcgccgcagcccggccagcaaagcaatccggccaacacgctgaccatgagcacgcccgcaactaccgcctcgctgaacaagtacttcaatatcctgtcgcagctgaaagagcagaaggcccaacagcaacaacagcagcagcaggcatccaagaccttgcccactccagctccagtcgccccagtcccatctgcgccccctgtcgcgcccgtggtcgtcactcccagtcccagtttgcccgtcccggcgctgaaaaagatcgaacgcagcaacaagcagcctgccaagatagcgcaggtggcacccaatctgcgcaagacgcccagcagtggatcttcaggcagctcctcgtcgtcctcgtctagctcctcaaatggctcgaatacgggaaaatcgccaacgaagaaacacgtggccatcgcacccaggacgccggagatgaaacagcagcagcagcagggaaaggcggccatggtctaccgaccgccagtaacaagcaccgctttgaagcaaaagcagatctcaccacccgcccccgttgcggcccacacacccgccccagcgccagcattaaatccaacgcccgcccccgccaatcccacgctttaccagctgcccgtacagcttcctaatctagtccagcttccgcctcagctggcggctgccgccaatattatgcagcttaataacgtggccaaagctgcagtggctgcggcggccaccaacaacgcggccgcgcaagcggcacaggctgctcaggcagctgctgcccagtacttcctgaacggcactgtctttaagctgcaacaggtgactacggccacgacgacgacggccaccacggccacagcagcggcggccccagctggcaatccctttggactgcttaacttagccacggcgggcaatccctttggcttacccaatgccaatgggcaattccccattgaagccattccgggagctggaagctatctccatcatcagctgcttttggccagacagaacaacatgagtttaaacgaaactatggcttccaattcttgcggcaacatgaactttgttaatccacttaacaatcagcaagttggactcaaagataacaaattatatattgtaaactcggccgagtacctaggatacttaatgagtctgcagatagctcttaataaccaacagcaccagcaacaacaaatcatatctgccacacagccgccaccactggcagccacaaacaataacagtacgaacactgccactcagccgccgccattggcagctacgaacaataccaattcgaacactgccaacaattcgactgccagcaacagtatcaaccataatgcctcgaataatctaagcaatatcaacaacactgccatacagcctcagcgggcgattgtgaagccgccattgcacagttccacgcaaccgccgccgcttgtgacgatttcctccatgcccgcgtgctcaccggctgccgcatcttcgccagcggccaaacggtcactgcccgccgccaagccttaccagaagcggctgacagcaaagggcagagtggggacagcaccgataatcgcaacgcctacaacgccgcctcctctggtacccacgtctgctactaaggagctgggtcagttgcgcaagagtacgggaaccacgggaacccctactggcacacccacaccaacgccaccgctagtaagcatcgcaccctcgaagctgaccccaacgctgagcgtttcgaagcaaggaccgacaatgaagcttgcaaacagcgctcccgatctctttgacctggtgaagaactcaaagctggtagccaaggtttcgcaaccgttgacgccgcttcccttcagttcccccagcagcagtagcaacggaagccacggtagccacggtatgcgatcctcgccggccctctccacgtcaaactcctgcaccctgtctgcatttagcaagatcaaggtggaaacaacggagctggcttcccagacgggctccctgacctcttcctcaatacctacaatatcacttaagcctcagagcttcgccgggcagctgcccaaaagggaaccggaatcggaaaccgacacgctgaagcacgaccttttgccagactgcacaaacagtaactcaaactcaaattcctgtagcagcagcacctattcgcactcggttagttcggcagctgatctctcattagaggcctctacgcccgctccatcaccttcaccttcagcatcgccttccggcttgggatcaccctcgccggcggccagcaacttgagtgccagcagccggcgagctgcaagccaaactgatatgctaagtgaactggtcacttcgtcgtgcatctccagcggcggcgatgactgctctcaagccacagactcgcctccaatgccggcactccctctggccaagagtgaggatgctaccactcccatttccacggtcagcggaggaagcagcagtgggagtagcaattacgatgaagaggacgacaagtcggtggcctcgctggaaactcatcagacgcacaagcggctaagggacctgcccacgcccgagtcaggaatcggtggaagtctgagtaacagcgagagcagtaactcaattgccgatgccatttcctccaaatccgcctctgtgggaccacccactactgcagcgagcagtgcttcttcctccgcatccgacagcaactcactggctagcaatgcaccatccccagcctctccggaggattgttcagccgctccttcgcccgcctgctccgcctccactaccggatccattccgcctagcactgtggtggacattgcgatggtggaagccaccagcaagagtctgccaaagagcgctatatctccaatcctctcgcagccaaagaccatccgctttccggctggagcaggtgcgagtggcaaaggtggaaagcggcatgacggcgtctgctactgggacaagtgcaacaagaagcatgagagcaactccaagttgttggaccacatgcagacgcaccacgtcaatacacaaacaggtcccttcgcctgtctgtgggtgggctgcaaggtgtataacaaggagtcatgctctcgtcgctggctggagcgccacgtgctctcccatggaggctccaagcaattcaagtgcatcgtggagggttgcggcctacggttcggctcacagttggcgttgcaaaagcatgttaacaaccactttaatgccactgacaatgcaagggagagcaccagcaagcgcacctctgatccgccagtgcccaaacaactccgtaagaatggcaagaagctacgataccgtcgtcagcctttctcagctcgcatgtttgacttcttcgacacgggcataatggagggactacagcaccgcctgcgccagattagcacactcaccaacggtgcccaggccatcgagttccaggggcagtgcatgatgcgacgccgcaatagccaaggcggctacgagtgcttcgtgcgatggtccccgcgcgagatcatttccgacgagtggctgccggagtgtcttaaccgaacgcgtcagcacactaaagtactacacatcaagcaaatgcggccagccgaaaaaactcgcgtggatagcctgctcagcacggcttttcgcttacgctatgactcccacttgttcgccgacgattataatgtcaacgagcagcaggtaggcgaggcgagcggtagcgactgcgacgaggatggggatggggatcaagaggaggaggatttagaggatcaagatgaagatgaagaggaagacggaagcagtagttcgcgcagtgcgagttgtgagacggtgtccagctatcagcaggtacttagcatcgccaagctgcagatgcaacagcggcgtaagcatccgcgaaaaccacccaaagtgacaccgccggcgagggaaaagctggttccaacggacgcactggtgcccatttag

SEQ ID NO: 4767 - protein, 1486 aa, DROSOPHILA
MPPHILGSASGSSSTAAASPPTSSASQTPPSPAIHHSHLSQHNATSAMSKPTTPQRHGNPSLLPTLQWPWNTSLGSTSTAVPAASANKNKRTAAGSGAALGLSGEGSCLTGGGAASAKKARSDLPGSFDASKRLKVAAMEESQTKITGFFKSQMKPSPGGGKLSPQPGQQSNPANTLTMSTPATTASLNKYFNILSQLKEQKAQQQQQQQQASKTLPTPAPVAPVPSAPPVAPVVVTPSPSLPVPALKKIERSNKQPAKIAQVAPNLRKTPSSGSSGSSSSSSSSSSNGSNTGKSPTKKHVAIAPRTPEMKQQQQQGKAAMVYRPPVTSTALKQKQISPPAPVAAHTPAPAPALNPTPAPANPTLYQLPVQLPNLVQLPPQLAAAANIMQLNNVAKAAVAAAATNNAAAQAAQAAQAAAAQYFLNGTVFKLQQVTTATTTTATTATAAAAPAGNPFGLLNLATAGNPFGLPNANGQFPIEAIPGAGSYLHHQLLLARQNNMSLNETMASNSCGNMNFVNPLNNQQVGLKDNKLYIVNSAEYLGYLMSLQIALNNQQHQQQQIISATQPPPLAATNNNSTNTATQPPPLAATNNTNSNTANNSTASNSINHNASNNLSNINNTAIQPQRAIVKPPLHSSTQPPPLVTISSMPACSPAAASSPAAKRSLPAAKPYQKRLTAKGRVGTAPIIATPTTPPPLVPTSATKELGQLRKSTGTTGTPTGTPTPTPPLVSIAPSKLTPTLSVSKQGPTMKLANSAPDLFDLVKNSKLVAKVSQPLTPLPFSSPSSSSNGSHGSHGMRSSPALSTSNSCTLSAFSKIKVETTELASQTGSLTSSSIPTISLKPQSFAGQLPKREPESETDTLKHDLLPDCTNSNSNSNSCSSSTYSHSVSSAADLSLEASTPAPSPSPSASPSGLGSPSPAASNLSASSRRAASQTDMLSELVTSSCISSGGDDCSQATDSPPMPALPLAKSEDATTPISTVSGGSSSGSSNYDEEDDKSVASLETHQTHKRLRDLPTPESGIGGSLSNSESSNSIADAISSKSASVGPPTTAASSASSSASDSNSLASNAPSPASPEDCSAAPSPACSASTTGSIPPSTVVDIAMVEATSKSLPKSAISPILSQPKTIRFPAGAGASGKGGKRHDGVCYWDKCNKKHESNSKLLDHMQTHHVNTQTGPFACLWVGCKVYNKESCSRRWLERHVLSHGGSKQFKCIVEGCGLRFGSQLALQKHVNNHFNATDNARESTSKRTSDPPVPKQLRKNGKKLRYRRQPFSARMFDFFDTGIMEGLQHRLRQISTLTNGAQAIEFQGQCMMRRRNSQGGYECFVRWSPREIISDEWLPECLNRTRQHTKVLHIKQMRPAEKTRVDSLLSTAFRLRYDSHLFADDYNVNEQQVGEASGSDCDEDGDGDQEEEDLEDQDEDEEEDGSSSSRSASCETVSSYQQVLSIAKLQMQQRRKHPRKPPKVTPPAREKLVPTDALVPI

SEQ ID NO: 4768 - DNA, 4103 bp, DROSOPHILA
gacatcctcatggagggcacatgtgtcagcattccgctgacggagcttaaccgctttctggaccaggacaaggtgagggagtacttagcaccaaatgtccagcattctaactaatccactcattcgacgaccacccggcaggttcttcattaccgcgtgagtgtgctggcggtcaagtcgccgcgtcgcgcaaaaccacctcgccaaaatctgccgcagccggcggacctggaacaggccccgaatggaggcgtcaacgtgaagagcgtgccgaccaacatgatcattacgcgcacctacaaggaggccatcggcgaggtgaccaaagcggatgtggccagtccggactcggaggaggatccggctgcagccgacggcgctggggccattggagccgacggagccggcggtgtggagctcgagcgcaagtggggcacaccgcagctgcacttcaatcggaaatatctgcggaacactctgaacgatgccacgcccgcggaggatgagctgcgtccgctggccgccgatctgcgcaatggaaatggcgacgataagctctcccagtgcagcaacagcacgagttacacgaaaaaggtgtcggattcgctgcgaagaagcttccgggcactcaaggcggatatcgtggagctgcgcccgttcagcaagaaggcagtcagggatggatcgacctctccggtccaaagcaatggcaagtagtgattccgtgtgtgtgccttttctaattcgtcaacagtcgcaagagttgaaagcatgtaaatatagcaaatgttttaatctattgtatatgtactaaaaccgaaataaataaaataaaaaataaaaaaaaaaaaacaaattatactccacacacgttcgttacttgaatctcagtccgtagcaagctgcgaatgaaacgagtttggtttggtattggtttggatgacacgttttatctaggacttagactactcagctaccactacgcgactccttttgcgtgctacagcaagccctgcatctcgttcatgaactgcagataggcgtcatccttggtgggcggcttgctgtgcgcctcggagtgggcgtggtgtccatcgttggccgcatgcctgggcctcgccgtgcgtcgctgatcctcgcgcttcactcgcaacgtggacggtacaaagcgggtgacatccgcactcagattcctaatgagtaagtttggaatgtttagtaatgggaattggttctactgcgccggaaagtcatcgaacccacctgatttgtggcttggctgtaatagtggccacacccttggctgactcctttggtgcacctgcgccgcctccctgcttattgtggtgcgcaaggcgcggaggcagacctggcggcggtcctggtggcatcctgatgcccatgcgcggtattggtcccaggccatgcggtgccctgggtcctggcggcggtccaggtggcatgcgtatgccaaagccggaacccgggtgaggaggtcgcatgggtggaggtcggtacattatgccaggtggcccaagattaggaattggcggtaggtgtggcagctgtggcggcgcaggcacagacgacgctggtggcagcggaatagtcggcaatgtgggcgctgtcggaggagctggcgcgggtgtcgctgtagatgatttgactgatgctggcttggtcggcacttcgggcatattttcatcctcatcctggtcatcgtcgtcctcatcgtccgtactgctggcggttctcttatcggagtcagatgttcgttcctctatcttatctatatctttcccatcgtcctcctcccgctttttgtcggcctcgtcctctttagccgccagttttcgatgcttacgcttgtgcacatgctccatttccttcatgaagtcgtcgatattttggttatttggctcggtggcctcgctgttcttgtccttctctttatccttgcccttcttcaatggctctggctcctcctcctcgccctcaccatcgtagtcagtatttccctcggcatcggaattgagttcggaaaaggcaaacagatctggcggcggtcccggcgggacacccagccaatccttttgctcgttctccttcgatttctccacttgcgcctcgctggctaaatcgctatttctggacacgcctggtggagcgcctggagcataaggcggcagtgccattgtcatgggcggtgggggaaggcgtatgacaacggatgcgccgaatcccgcaaccaccgatccgccagtcgtttcggtagaaccgcctgacacggcagacaccggagcgggcagtggaatttcgtcaatctggacgctctgggcgtgcttaacgctttcgtagtactgctgcttcttcaggcgcttcttctcatactccacctccttgcgcttgaggtccgcccagtgctccggctcgtcattgtgctggaagatggatatttcagttgttaggtggactacactattatcgtgccgagttggtcttacatagagtcgcattacgcggtcgaatgtttccttcagctttttgcgcttgtcgcgcagcaccttctcgttcagcggcgatggttgcagaacgttgtactctgcaaattgtagacgctgcatgagtggctgacgcgaatcctgcaggctcgatggactactcacccatctcgtcgatcttctccatctcctcaagtatctgtgaaggatccttgttcttcaaaacggcggcccgcaccatttggcgctgtttcttgttcttcttgagctccttcttgcgggcctccttgcctgaaaggtgcagcatggtggattcaacatatcgagctaaaaaggatcatacttacgcgcctggtccgtgggattcatgtactttccactcttcgtggtgtttatggagcggcgtcccatcttgctggctatttcttgttgctgcaactaaacgaatgacttcacctaaacgccggcgctgcaatattgttaccggcgtttttttcctgcccaacgtcctaatttgcttttataatatcactttcaattgatttatttatatttttatttatttattcgtttgcagctcgataggccgatacacgcgcaggctgatatcgataaaaacagaacagtaagcactagagctcgaagtgtgaccaacaaaatttggcggggaatagctaacatcccatacgctcaaaagttttctccgatgtttttcatcactagccaggattagaaaaacgatagacgattattaccgccacataggtaacgcggcaacagacgcgaaattgccagtacgatggcattcgagagctctgcacagcagttaaagattccggacgaaaggatgaatgcacagttgaacaatagtggcgtacaggtaggatgtgaaccagtcgccagccaggtcagtcaatcctaagcccatttggttgatttcatgtaaccgcgtgcaaggcgtcgcaatcccatgtcctattcacacccaatcagataccgggcgcgctgataaggatttcagacgatttccttacctccacgccgggagagggccagaaggacgtgcccaccacggagagcacaaaattgcagaacctgcacagccgcaagctgtgggacataggtaataacaatgttatctacttgacacctgcattttcatttcgttttcatgatgcaggtcctggttccattcatggcgaggggaagacaccgaagttggccgtgaagcgtctctggccaggctgcggggacgacgagccgaacgccaaaaaaggtaagtgggtctggttatgggaatatgggatatcgggcagcccaagctaaattcatgcaggcaactagctgtgcttgtgctttttaagtcatcccaataaccggcctcaaactttcccgctatcagtcaacattgccgtttacagagcttctcgtgccgttgtttttcagcactggcattcgagcaatttgtgtcgatatacgataggaaaataacgccgctacctcaaatcgaaaaaagtcaaagccgcaaacaaaataacgaattcgatttcgcattcgaaatgtccgcgaagccaagtgccaattcggaggacatccttctgg

SEQ ID NO: 4769 - DNA, 1850 bp, DROSOPHILA
cctgcgcgtgtatcggcctatcgagctgcaaacgaataaataaataaaaatataaataaatcaattgaaagtgatattataaaagcaaattaggacgttgggcaggaaaaaaacgccggtaacaatattgcagcgccggcgtttaggtgaagtcattcgtttagttgcagcaacaagaaatagccagcaagatgggacgccgctccataaacaccacgaagagtggaaagtacatgaatcccacggaccaggcgcgcaaggaggcccgcaagaaggagctcaagaagaacaagaaacagcgccaaatggtgcgggccgccgttttgaagaacaaggatccttcacagatacttgaggagatggagaagatcgacgagatggagtacaacgttctgcaaccatcgccgctgaacgagaaggtgctgcgcgacaagcgcaaaaagctgaaggaaacattcgaccgcgtaatgcgactctatcacaatgacgagccggagcactgggcggacctcaagcgcaaggaggtggagtatgagaagaagcgcctgaagaagcagcagtactacgaaagcgttaagcacgcccagagcgtccagattgacgaaattccactgcccgctccggtgtctgccgtgtcaggcggttctaccgaaacgactggcggatcggtggttgcgggattcggcgcatccgttgtcatacgccttcccccaccgcccatgacaatggcactgccgccttatgctccaggcgctccaccaggcgtgtccagaaatagcgatttagccagcgaggcgcaagtggagaaatcgaaggagaacgagcaaaaggattggctgggtgtcccgccgggaccgccgccagatctgtttgccttttccgaactcaattccgatgccgagggaaatactgactacgatggtgagggcgaggaggaggagccagagccattgaagaagggcaaggataaagagaaggacaagaacagcgaggccaccgagccaaataaccaaaatatcgacgacttcatgaaggaaatggagcatgtgcacaagcgtaagcatcgaaaactggcggctaaagaggacgaggccgacaaaaagcgggaggaggacgatgggaaagatatagataagatagaggaacgaacatctgactccgataagagaaccgccagcagtacggacgatgaggacgacgatgaccaggatgaggatgaaaatatgcccgaagtgccgaccaagccagcatcagtcaaatcatctacagcgacacccgcgccagctcctccgacagcgcccacattgccgactattccgctgccaccagcgtcgtctgtgcctgcgccgccacagctgccacacctaccgccaattcctaatcttgggccacctggcataatgtaccgacctccacccatgcgacctcctcacccgggttccggctttggcatacgcatgccacctggaccgccgccaggacccagggcaccgcatggcctgggaccaataccgcgcatgggcatcaggatgccaccaggaccgccgccaggtctgcctccgcgccttgcgcaccacaataagcagggaggcggcgcaggtgcaccaaaggagtcagccaagggtgtggccactattacagccaagccacaaatcaggaatctgagtgcggatgtcacccgctttgtaccgtccacgttgcgagtgaagcgcgaggatcagcgacgcacggcgaggcccaggcatgcggccaacgatggacaccacgcccactccgaggcgcacagcaagccgcccaccaaggatgacgcctatctgcagttcatgaacgagatgcagggcttgctgtag

SEQ ID NO: 4770 - protein, 552 aa, DROSOPHILA
MGRRSINTTKSGKYMNPTDQARKEARKKELKKNKKQRQMVRAAVLKNKDPSQILEEMEKIDEMEYNVLQPSPLNEKVLRDKRKKLKETFDRVMRLYHNDEPEHWADLKRKEVEYEKKRLKKQQYYESVKHAQSVQIDEIPLPAPVSAVSGGSTETTGGSVVAGFGASVVIRLPPPPMTMALPPYAPGAPPGVSRNSDLASEAQVEKSKENEQKDWLGVPPGPPPDLFAFSELNSDAEGNTDYDGEGEEEEPEPLKKGKDKEKDKNSEATEPNNQNIDDFMKEMEHVHKRKHRKLAAKEDEADKKREEDDGKDIDKIEERTSDSDKRTASSTDDEDDDDQDEDENMPEVPTKPASVKSSTATPAPAPPTAPTLPTIPLPPASSVPAPPQLPHLPPIPNLGPPGIMYRPPPMRPPHPGSGFGIRMPPGPPPGPRAPHGLGPIPRMGIRMPPGPPPGLPPRLAHHNKQGGGAGAPKESAKGVATITAKPQIRNLSADVTRFVPSTLRVKREDQRRTARPRHAANDGHHAHSEAHSKPPTKDDAYLQFMNEMQGLL

SEQ ID NO: 4771 - DNA, 7831 bp, DROSOPHILA
acgaatctccagaggccggtcctttccagccagattctcgcctccagcgctcaacgaggtgtaccgaaatttctccagcgcatcgcttgcattcgaaataagctcgcgcacaaagacctcgtggtcggagtataaggaacgagccacaatgtcaagtagctggcgcgtctctgcctggaactcatgcttgtccaccactgatcctgatgcctgcttggtctccgtggagtagcgacggagcgagagagctgcaagtgaaaagatgagtgttatgtaaacataagaatccctccggggagccggttgcttatattcagtgcttaccacccggcgaatgctgcgatccaatggtgatattgaacgctgctggggcggatcggtgactctgcctcaacacttgggcacagcgaccgaggcggcacgcctggcccagcactcccatcgctcgtacagacatcttgttgttttaatgttttgcccaactttaatgttacccaactacgaagtttgttccagcgcacatgtgtgcacagtgtagccaaatcaatcgattgtaagtattcgataatagtaaactggtaaaaccctactcataacggtgttttcttccaaatttctgggctgtaatgaattttggactcaaatgcttagttggtttgaataagagttactacatgtaatggagagttcagtttcatcacattattcagctcaaaactgaagcaaactgccagctgactagttctctaaagatttcgatcagcaagagagagagagagagatagagatgtttcaactgtgaacaacaaaccgtaaattctgaaggaattaagaacagattacgtttcattgtttagccaatgtagattggatgctgatttttgagttatgaaataacaaatgtcttcaaagaagacagtaaataaaagaaagttaaatcaaatccaatattgaaagacatcgatacctcatatcgatatacggtccaattgctgacagccctgctcgtgaatgcaactctgctgtagcgcgtcagcgtcgcgttgtaatttttgttgagttttttaaataattttaattagcatctgcgtgtcttactattagaatatcatgtgttaagtgtttcccattcacgccaccacacaaaaagatccaatcatgagcgccaccaccatcgacaacgtacgggtgctgcttcagtcgctgcctgctgccgccgtaaacagcgccactcagccgggcgatctacagacgccgggcaagattgcggccccagcgactccccttcgcgccaagaatcccgcccaattacagatcatgccggagaaggtcgaggagatgccgccgtcacctccggaggagttctggagggacctgcagcagtttcacgaacgacgcgggtgagttgccgcggctctcctgtatttggagacgacctaacccactttccctctgcccaaacagcactccattgacacagcccgccaggatcagcggtaagcatgtcgacctgtacaagctgtacaacgaggtaaccgaacgaggcggctttaataaggtgaccatgcgggacgagtgggacgaggtgtacagcgccatggagacattgcgggagcgctgcgttaacggaacggctagtatcaagcacatctacagacgctacctggacaagtacgaacggttgaacttctttggcgaggatccagacaagatggaggctctggaggcggctattgagattgtagaaatgggcggtggacgctcgcgatctcgttttttggctggcgccggtggtggcctaggaagcatttttggatcagcacactctacgttgccggcggtgccaatggcctacaaccagcgccagcactctgttaatgtggaacgacgccgacagtacaagatgtccacgcagttgcaccgacacagcagctacgagaagctgctgttgtctctgctttctccgctgcccaatgagcaggacttcgccataaacgtgtgcacacttatggccaacgaggcgcgccacaccctacagctgtccgagtgccccaaactgcttgatgtgctgcttgctcacctgggagtctacgctgacttcaccatgcgccagctgttccagcacagttacaccgaggttcgacaccattcgcagctcagtttctggcgcgacctgctacacgacaagccacaggtcctagagctctacacggatgagcaggcctggctggacaacggtctgataagtaaggaggacggtgagaactctgccgctcgaagtgaactgctggcggcctgcgacgagttgcacttccttaatctgcgccggagcaacgggactgatgagcgcatgggccagcgagtgcttcagattgtccagctagtccgtacactcagctttcatcaggagaatcatgcactcttggcctccaaccgcacgttgtggcgatatttggtcatgggagcaaacgtacgatggagtaagttttttttatctgcttagaaattatattttttggcgctttgaatgtacgaagtatcaaggtgctatcataaatacactgcaaggaaattgactattgcgtagcatagcaatcccgaaagaatcaatttaaaataaaataactgaaacacgtttcgctcgttctaggcaacattcacatccaggccctcgagaccgctggcaacctggctcaacaatttgagctgctagaccccaccactgacgagctatcgcggaatcttttagctactctctgcgagggtattgactctaacgaccgcgcggtgatcatgagctgtctggagatactctataagttgtgcggacgagaaggcaattcgcagcacatcaatcgttgccttggcctggacttttaccagcgagccatgttgctcctctcgcttaccgacgtcatgatgattatctttacgctggaggcagtttacgcactaagtgctcttggcgctcggccatgttcgatgctgatgcaagtacgtggcctaatagaccagctggtgacccttatcacagtggaggctcagtcatatggcacaggcggttgcatattaatgcgtgtcgtagaggttttccccggaaacatggctgcctcgctggctcagaacatgcccgccattcttgctccaggtcccacttccctgactacacttccaacatcgctgcaagtagctgttaaaccgccagcagttttacccacgcctacacccgcccagacgcaagtgctgcctcacggagagcaaacacccttggttacagctctccccggtctgccaatgcccagtctgccacaggttcaattgcctgtacccagtctgccgcaggtacaattgccaccaatcgctgccaccgtgacccttcccagtctgccctccgcctcccagagttttacacacgaggacgaacagtatgcgctggcttggctgggagccacgtatgaacgggctgggaacggtaacgatctccgtgtggaacaagcggaactatacagaatatatttatcgcattgccagaaggcgggtaagctttcagtggttaatcacatgcagtttcctcgtctagtgcggcttatatttaatcaatcggtgggaccagtaattgtacggcacctggacggaatagagctacctgggacgtactacgtaggcattaggatgcgagctcagccgctagccatgcaacagagacccacccccagcattgttcctgttaaaaaggacacgccaatattgcccaagcaaccatttagtgatcctgttcaaacggaagtggcgtctgaggaaagcgtttcttctgcagtcacgccacccccaagctcctcgctcatcaaaagcttgttggccaacaaggtaactgaacgccaacagaagcagaaggcccaagctcagacgccgcagccgccagcccttgtggctaccacggcatcgggcacaaatgctacccagcccatcaaggtaacctcaacagctataagcgccttcgtgaacaacccgctaatgcagcacacaccggtgaaggtgggtcagactaccattaagccgttgcacccccagatggccatcgaaaagaagccaatcactgattcggccccgccacctctcgctccattgagtggtgcaaacgtagtgacgaaagacgccagcgggcgcactctcatcattgcatcagcagctgccaaacgaaaattaaccattgacgaggagcagaataagcgtctggctttagatgccgctgccagcagttccagcagctcatcttctggcggcaaggaagaagcgcaggtgactccctcgaagaatgcagccaatctctatgcggatctggcggcatctattttggaggatgaggatatggatgacgttccaccgctggccaaaccaagccaggagcaaagccagcagcacccgcaacaggcacagcagcttcaactcattccggctaaagtgcaaccaacccaacgtcaacttgttttccccggtagcaatgtggtttctccagctccgcattcccaactaaaacttgccaccacggccaccataaagacggatcagggcttgcaaactgtgccagtgatcctgcagcccaagactgcaatggattccacgccagctccgcagacgcaatatgttctggccaccaaccagcaaggccagacgtatcttgtggcccagcagccgactattccgacatccacgcagtcggcaccacccactctgctggtgacgcaaacaccacaacaacaaacgaagaccataataatcctgcagcagccaggaggagtctctgcggcgaacgtggctggcactcagaaaatgataatgacaacggcgcagggccagcaggtcctggttaccaccaccacagctccacaactggcccaaccgcgtacttctaccccccagcagcaaatctttatcgcaccccagcgaccagttccggcgttgggtgctggccaaatgtcgccttcactgctgtcgcagttgaaccagatcccggctactataaagcttcatcagccccaaccacagccgcagctcgtttcgccgcaattagcaccccagcagcgattagttgccgcaaagccgggcgcttcattgcccattcctcagctccagcaacatcagtctatcatccagcaacacataatctcgggcccctccactcctacttccacagttggcggtacggttggtggggaaaagaggcaggtaattctgggcggaatcaaggagaccacgctaattacccagacgtcggccacaccggctcccctgcagcaaagccagcttaactcgcagacgatcatcactcagtcacctaccagcacggctatcgtaggaggcgtggctcttcagcagcaacatcacattcgatctgtgttggaccagcagcagcagcatcatccatccatcatccaacagaagataaccatgccggcagtaagttgggaactggggccgaaattaaagaattattatttttttttaagtatatatacaagggtcattgaaaagtatgtaaacagcttaaaatttgatttcataatatgcccatgcccgttctaaatcccataaatcgcatcacattcacattccccatttttaaatgtttccatcgcgttttcactacttgagtggcgggttttacaggatctcttttctaaatagccaacaggtgtatggtaataagaattgtgctaagatgactaaaacaaatattttaatatattattttagatttccgaagcgaccaaaccgaaaatagcacccgttccagtttcaccaactgtaactctcctagcaaaaaagccggcgccgccacaacctgctcaagtatctagccccaagccatcagtcacccaggctgttgtggtaacgacgtcaggaactagtgattcaacggaaggcggcaaaacagttgtcttagcaaccagcgaggccaagccagcggaatcagaggtagtagcacagacggttgtcccacctgctgtcgtaactacaggtcccagcagcagttctttggttgtcagtcagagcgtctacgctgcttctggcccgaatgccaaccccacgccctctcccatgcccgtggatgcaaattggttgtacatctgcgactggcggaactgtccccgcaagaaattcaagtctcttaacgagctgcagtaccacgtgtgcagtgtccactgtccagatcaccttgattctgatgccgacatttattgtcagtggggcagcggacccaacttctgcgacaacagagcgcgcaaacggtactcattgatgacgcatctgattgaccggcacctgacaacggagaacttgcgcgccagtgtgcaacgtcgcctggcaactgggattcacaatgtggcgcccacccaggctcccgtgaccatagtgcgcaacgagggtcatgcccaacgattggcgggaggcgctactggttcaccttcgggtcctgcttcagcggttccagtcgttggcagcgccgcaatgcaagctatgaaccgacacacgactgattacacgaacgctaaagagctgatggacgaaaatgagggtccagtcaccaagagcatccgtctgacagcggcgctcattatacgcaacctggtcacctactcggctacggccaagagaagcctgaaacgctatgagtcacgcttggccaatgtcgcctttagcaatgtggaggctagcggagtgctctcccacatcatgtacgaattgagccagtaagccgatatagcttaccatcaatatgattatttaactgacttgtaagaacgacactaaaaaaatgtgaaaagcaaaccataccttgtttgtctaaatgattcataccatatagcaccaaaatatgggagattcgggagtaagattttaatttgacttctacaattctacgaggcttagaattaaagagctatggtggacattatcagatatactcctggttagcaaataaacgttttgaattaatcgttcaaaacatactttgatttacattgttcttataaaatattaattaacacatctgagttataatccgttaaaagaatccgaaccgaagagtccgctaaatcttcgtgtactacagtgaaacactttttatcgcctaacgtaagatattagaatgggatgaaatcaggttcatcatacaatagcttctccgttcttcaaaaagttttcatcgtccaaaatcgtatacttgttgctcctgtacgtgtccaattcaaaaatgtacttcttgccgcagtccttcattagcttgtggataactggcttgatgttctcgatgcccgcgatactggccagttcattgtagtagacaaactgaaattacagataaaagattgttttatatatgttctctgcttgtaaaagtctttaacaaataagtctacataagctaatatttttaatttcttatacagggtattgtgaacactcacctgtcgctcgcccatctgatgtgctttcttctggttgcgcacgccgcagccccaccgctctccgatctcctgctccagatcggcaatcatctgctcccgggagggaaacttccgctgacctgtgaagaacttcagcgtgaagcgcacctgcatgtcgaagatgtgggtgggaatcacgttgaagggcaggcccacaaaggccatggtcgggtggttgatgttgatgcagtgcttccacagtggctgcacgaagttgtctatcacctggacacccacatcggtgctgaggcaggggaatgtgtacttgtagccggtgcagaacatcacgtggtcaaagctctccgtgctgccgtccgtga

SEQ ID NO: 4772 - DNA, 5300 bp, DROSOPHILA
cctgctcgtgaatgcaactctgctgtagcgcgtcagcgtcgcgttgtaatttttgttgagttttttaaataattttaattagcatctgcgtgtcttactattagaatatcatgtgttaagtgtttcccattcacgccaccacacaaaaagatccaatcatgagcgccaccaccatcgacaacgtacgggtgctgcttcagtcgctgcctgctgccgccgtaaacagcgccactcagccgggcgatctacagacgccgggcaagattgcggccccagcgactccccttcgcgccaagaatcccgcccaattacagatcatgccggagaaggtcgaggagatgccgccgtcacctccggaggagttctggagggacctgcagcagtttcacgaacgacgcggcactccattgacacagcccgccaggatcagcggtaagcatgtcgacctgtacaagctgtacaacgaggtaaccgaacgaggcggctttaataaggtgaccatgcgggacgagtgggacgaggtgtacagcgccatggagacattgcgggagcgctgcgttaacggaacggctagtatcaagcacatctacagacgctacctggacaagtacgaacggttgaacttctttggcgaggatccagacaagatggaggctctggaggcggctattgagattgtagaaatgggcggtggacgctcgcgatctcgttttttggctggcgccggtggtggcctaggaagcatttttggatcagcacactctacgttgccggcggtgccaatggcctacaaccagcgccagcactctgttaatgtggaacgacgccgacagtacaagatgtccacgcagttgcaccgacacagcagctacgagaagctgctgttgtctctgctttctccgctgcccaatgagcaggacttcgccataaacgtgtgcacacttatggccaacgaggcgcgccacaccctacagctgtccgagtgccccaaactgcttgatgtgctgcttgctcacctgggagtctacgctgacttcaccatgcgccagctgttccagcacagttacaccgaggttcgacaccattcgcagctcagtttctggcgcgacctgctacacgacaagccacaggtcctagagctctacacggatgagcaggcctggctggacaacggtctgataagtaaggaggacggtgagaactctgccgctcgaagtgaactgctggcggcctgcgacgagttgcacttccttaatctgcgccggagcaacgggactgatgagcgcatgggccagcgagtgcttcagattgtccagctagtccgtacactcagctttcatcaggagaatcatgcactcttggcctccaaccgcacgttgtggcgatatttggtcatgggagcaaacgtacgatggagcaacattcacatccaggccctcgagaccgctggcaacctggctcaacaatttgagctgctagaccccaccactgacgagctatcgcggaatcttttagctactctctgcgagggtattgactctaacgaccgcgcggtgatcatgagctgtctggagatactctataagttgtgcggacgagaaggcaattcgcagcacatcaatcgttgccttggcctggacttttaccagcgagccatgttgctcctctcgcttaccgacgtcatgatgattatctttacgctggaggcagtttacgcactaagtgctcttggcgctcggccatgttcgatgctgatgcaagtacgtggcctaatagaccagctggtgacccttatcacagtggaggctcagtcatatggcacaggcggttgcatattaatgcgtgtcgtagaggttttccccggaaacatggctgcctcgctggctcagaacatgcccgccattcttgctccaggtcccacttccctgactacacttccaacatcgctgcaagtagctgttaaaccgccagcagttttacccacgcctacacccgcccagacgcaagtgctgcctcacggagagcaaacacccttggttacagctctccccggtctgccaatgcccagtctgccacaggttcaattgcctgtacccagtctgccgcaggtacaattgccaccaatcgctgccaccgtgacccttcccagtctgccctccgcctcccagagttttacacacgaggacgaacagtatgcgctggcttggctgggagccacgtatgaacgggctgggaacggtaacgatctccgtgtggaacaagcggaactatacagaatatatttatcgcattgccagaaggcgggtaagctttcagtggttaatcacatgcagtttcctcgtctagtgcggcttatatttaatcaatcggtgggaccagtaattgtacggcacctggacggaatagagctacctgggacgtactacgtaggcattaggatgcgagctcagccgctagccatgcaacagagacccacccccagcattgttcctgttaaaaaggacacgccaatattgcccaagcaaccatttagtgatcctgttcaaacggaagtggcgtctgaggaaagcgtttcttctgcagtcacgccacccccaagctcctcgctcatcaaaagcttgttggccaacaaggtaactgaacgccaacagaagcagaaggcccaagctcagacgccgcagccgccagcccttgtggctaccacggcatcgggcacaaatgctacccagcccatcaaggtaacctcaacagctataagcgccttcgtgaacaacccgctaatgcagcacacaccggtgaaggtgggtcagactaccattaagccgttgcacccccagatggccatcgaaaagaagccaatcactgattcggccccgccacctctcgctccattgagtggtgcaaacgtagtgacgaaagacgccagcgggcgcactctcatcattgcatcagcagctgccaaacgaaaattaaccattgacgaggagcagaataagcgtctggctttagatgccgctgccagcagttccagcagctcatcttctggcggcaaggaagaagcgcaggtgactccctcgaagaatgcagccaatctctatgcggatctggcggcatctattttggaggatgaggatatggatgacgttccaccgctggccaaaccaagccaggagcaaagccagcagcacccgcaacaggcacagcagcttcaactcattccggctaaagtgcaaccaacccaacgtcaacttgttttccccggtagcaatgtggtttctccagctccgcattcccaactaaaacttgccaccacggccaccataaagacggatcagggcttgcaaactgtgccagtgatcctgcagcccaagactgcaatggattccacgccagctccgcagacgcaatatgttctggccaccaaccagcaaggccagacgtatcttgtggcccagcagccgactattccgacatccacgcagtcggcaccacccactctgctggtgacgcaaacaccacaacaacaaacgaagaccataataatcctgcagcagccaggaggagtctctgcggcgaacgtggctggcactcagaaaatgataatgacaacggcgcagggccagcaggtcctggttaccaccaccacagctccacaactggcccaaccgcgtacttctaccccccagcagcaaatctttatcgcaccccagcgaccagttccggcgttgggtgctggccaaatgtcgccttcactgctgtcgcagttgaaccagatcccggctactataaagcttcatcagccccaaccacagccgcagctcgtttcgccgcaattagcaccccagcagcgattagttgccgcaaagccgggcgcttcattgcccattcctcagctccagcaacatcagtctatcatccagcaacacataatctcgggcccctccactcctacttccacagttggcggtacggttggtggggaaaagaggcaggtaattctgggcggaatcaaggagaccacgctaattacccagacgtcggccacaccggctcccctgcagcaaagccagcttaactcgcagacgatcatcactcagtcacctaccagcacggctatcgtaggaggcgtggctcttcagcagcaacatcacattcgatctgtgttggaccagcagcagcagcatcatccatccatcatccaacagaagataaccatgccggcaatttccgaagcgaccaaaccgaaaatagcacccgttccagtttcaccaactgtaactctcctagcaaaaaagccggcgccgccacaacctgctcaagtatctagccccaagccatcagtcacccaggctgttgtggtaacgacgtcaggaactagtgattcaacggaaggcggcaaaacagttgtcttagcaaccagcgaggccaagccagcggaatcagaggtagtagcacagacggttgtcccacctgctgtcgtaactacaggtcccagcagcagttctttggttgtcagtcagagcgtctacgctgcttctggcccgaatgccaaccccacgccctctcccatgcccgtggatgcaaattggttgtacatctgcgactggcggaactgtccccgcaagaaattcaagtctcttaacgagctgcagtaccacgtgtgcagtgtccactgtccagatcaccttgattctgatgccgacatttattgtcagtggggcagcggacccaacttctgcgacaacagagcgcgcaaacggtactcattgatgacgcatctgattgaccggcacctgacaacggagaacttgcgcgccagtgtgcaacgtcgcctggcaactgggattcacaatgtggcgcccacccaggctcccgtgaccatagtgcgcaacgagggtcatgcccaacgattggcgggaggcgctactggttcaccttcgggtcctgcttcagcggttccagtcgttggcagcgccgcaatgcaagctatgaaccgacacacgactgattacacgaacgctaaagagctgatggacgaaaatgagggtccagtcaccaagagcatccgtctgacagcggcgctcattatacgcaacctggtcacctactcggctacggccaagagaagcctgaaacgctatgagtcacgcttggccaatgtcgcctttagcaatgtggaggctagcggagtgctctcccacatcatgtacgaattgagccagtaagccgatatagcttaccatcaatatgattatttaactgacttgtaagaacgacactaaaaaaatgtgaaaagcaaa

SEQ ID NO: 4773 - protein, 1688 aa, DROSOPHILA
MSATTIDNVRVLLQSLPAAAVNSATQPGDLQTPGKIAAPATPLRAKNPAQLQIMPEKVEEMPPSPPEEFWRDLQQFHERRGTPLTQPARISGKHVDLYKLYNEVTERGGFNKVTMRDEWDEVYSAMETLRERCVNGTASIKHIYRRYLDKYERLNFFGEDPDKMEALEAAIEIVEMGGGRSRSRFLAGAGGGLGSIFGSAHSTLPAVPMAYNQRQHSVNVERRRQYKMSTQLHRHSSYEKLLLSLLSPLPNEQDFAINVCTLMANEARHTLQLSECPKLLDVLLAHLGVYADFTMRQLFQHSYTEVRHHSQLSFWRDLLHDKPQVLELYTDEQAWLDNGLISKEDGENSAARSELLAACDELHFLNLRRSNGTDERMGQRVLQIVQLVRTLSFHQENHALLASNRTLWRYLVMGANVRWSNIHIQALETAGNLAQQFELLDPTTDELSRNLLATLCEGIDSNDRAVIMSCLEILYKLCGREGNSQHINRCLGLDFYQRAMLLLSLTDVMMIIFTLEAVYALSALGARPCSMLMQVRGLIDQLVTLITVEAQSYGTGGCILMRVVEVFPGNMAASLAQNMPAILAPGPTSLTTLPTSLQVAVKPPAVLPTPTPAQTQVLPHGEQTPLVTALPGLPMPSLPQVQLPVPSLPQVQLPPIAATVTLPSLPSASQSFTHEDEQYALAWLGATYERAGNGNDLRVEQAELYRIYLSHCQKAGKLSVVNHMQFPRLVRLIFNQSVGPVIVRHLDGIELPGTYYVGIRMRAQPLAMQQRPTPSIVPVKKDTPILPKQPFSDPVQTEVASEESVSSAVTPPPSSSLIKSLLANKVTERQQKQKAQAQTPQPPALVATTASGTNATQPIKVTSTAISAFVNNPLMQHTPVKVGQTTIKPLHPQMAIEKKPITDSAPPPLAPLSGANVVTKDASGRTLIIASAAAKRKLTIDEEQNKRLALDAAASSSSSSSSGGKEEAQVTPSKNAANLYADLAASILEDEDMDDVPPLAKPSQEQSQQHPQQAQQLQLIPAKVQPTQRQLVFPGSNVVSPAPHSQLKLATTATIKTDQGLQTVPVILQPKTAMDSTPAPQTQYVLATNQQGQTYLVAQQPTIPTSTQSAPPTLLVTQTPQQQTKTIIILQQPGGVSAANVAGTQKMIMTTAQGQQVLVTTTTAPQLAQPRTSTPQQQIFIAPQRPVPALGAGQMSPSLLSQLNQIPATIKLHQPQPQPQLVSPQLAPQQRLVAAKPGASLPIPQLQQHQSIIQQHIISGPSTPTSTVGGTVGGEKRQVILGGIKETTLITQTSATPAPLQQSQLNSQTIITQSPTSTAIVGGVALQQQHHIRSVLDQQQQHHPSIIQQKITMPAISEATKPKIAPVPVSPTVTLLAKKPAPPQPAQVSSPKPSVTQAVVVTTSGTSDSTEGGKTVVLATSEAKPAESEVVAQTVVPPAVVTTGPSSSSLVVSQSVYAASGPNANPTPSPMPVDANWLYICDWRNCPRKKFKSLNELQYHVCSVHCPDHLDSDADIYCQWGSGPNFCDNRARKRYSLMTHLIDRHLTTENLRASVQRRLATGIHNVAPTQAPVTIVRNEGHAQRLAGGATGSPSGPASAVPVVGSAAMQAMNRHTTDYTNAKELMDENEGPVTKSIRLTAALIIRNLVTYSATAKRSLKRYESRLANVAFSNVEASGVLSHIMYELSQ

SEQ ID NO: 4774 - DNA, 3529 bp, DROSOPHILA
ccgcttctgtctgccactagttttgctcagtgtaaaaagactttgagcaggcagctcgtgcagaacgaccgtcatcgatgctcgcaatttgtggctttcgccacgcttaatgccaatctcggtggctccaccgccatcgccccccatttgctcgccatggaaagtgccacccactggaccgcccactcgactccacctgcccccatcagccccctcagccattcagctatctgccgcattacaattcactgacataatgcaaaaatcgcagcaagtcaggcgcaactcgttgataggcgtgttctgcaatttcagtctgattgggaaaggatgaaaaggtggaatgggtagatggggtggaagtggggtggggcattgtattgtcgcataaaaggattcaaggaattcgccgaatagtgaacaggctaattaatgtttgcgtgcatacgcccaaaaatcatggttacttttcagtttgtggttgagctaaagttaggtttaaatttatgcttaaatttatgaacagtaatattacagctttttatgagtcgaagtaaacaaacaggttcagcgattttattaggtgttagcccaatggtgcttaagtcgttaaataagtgaattaatgaggcagctctaaaatatgattatatcatgtgcttccacttggggacctgtgttgctctcttaattgtttaaatttaactcaagtcttacctaccttcgagtacccagtaattgcattaggtttattgcttttaaaagcaataaaataattaaactcaaccacccccttgggcgagcatatcgatttgcgataatcgccttgaacaagccgaatggacagcgaaaagtatataaatcttggaatcttggatttacgcgacgcttttctggtatcaaggaaacactaataaatagccccacttcagattagattcaactaaacttgatcaatagctatttgcgcacacacttagtcgcacgaccgtcctcgcagccaaaagttcagccagaaatgctggccaaagtgctaactatcttggccatcgtggcttcagcaggagctgctgacgactttgatcctttcatagatatacccttcaaacggctcaagacttcggtgggttactgaatcactgaattggaccatctaactaagttttaaagatatttgtgcccagttacgtaacttgatgttactatcaatttgaagtcaaacacataaagcatggagtttcttgatgagaagtgcatagtgaaatttaaagctatgcttaaattgcacacccatttggagcggcgattcaagttgcattttcattgcaggcggagcgcattgcggagcacggctacccggccgaatcgcattttgttgagaccccggacggctatgtgctgaatgtgttccgcattccccactcccccaagctgaatagcaatggcaacgagggggagtcggaggcatcgcgcccggtggtcctcatcatgcacgggctgttcagctgctcggattgcttcctgctcaatgggccggaggatgcgctgccgtacaactacgcagatgccggctacgatgtctggctaggcaacgcccgtggcaacatctattcgagaaacaacacccggctgaacgtgaagcatccgtacttctggaagtttagctggcacgagattggctccatcgatttgcccgccacgattgactacatcctggctgagacgggtcaacagtcgctgcactacgtcggccattcccagggatgcacttccttcttcgtgatgggttcctaccggccggagtacaatgccaagatcaagacggcgcacatgctcgcaccgcccgtctacatgggcaactccacagagggactcattgtgagcacagctccgctgtttggtcaccatggcattggctccacgctgctggaaaaccaggttttgctgccccagaacgcgttcatccagcgagtactggacaccacatgcagcaatcagccgatcatgctcagctactgcaaaaccttggccatcctctggggaggtcccgaaatcggcaaccttaaccaggtgagtgatggagttaccatggagtgaactttatatgaatccaactaattgcagactctgctcccgcaaattgccgaaacccatcccgctggagtctcctcaaaccaggccattcactacattcagtcctacgcctccaacgatttccgtttgtacgattggggcagcaagagaaacctggaatactacggcgtgtcagagcctccggcatatgatctcaccaagatcacctccgagctgtacttatactatggcttggctgatggatcggccaataagcaggacatctcccgtctgcccgatcttctgcccaatttggcactgcttcacgaggtgcccgattccacatggggtcacttggactttatcttcgccacggaggtcaagagagtgattaacgatttggttttggattacagtaaagcctacgatgcgcgagaaactaacaatgagatttgagatgataagattttgagcaaaataaatgttttttccaaattaaggattccactgtaagttagtaaacttgtgagacacttttggccagaatgacaaatgtgcagagctaattaccagttaacaagtgtctgctggtctggttgtctcgattttatcacccgtctggctgcttctcttaacttggccgtggtcacgcccctgcgatgtacaactttttcccaccggtttgttgacaaacattatcgctggctggatatcgtggctagctggcttcatcttcacttacgtaaccctttccgactcctccccaaatggccgtaattagcactgaggtctccgcgagttggtctgcaaatatgcttataatgatgatttatgtggttaagtgggcgtttatgactcggttggaagggcgaaaaatgcattgataaaaatagataaaaaaatgcacttcggaattgttgggaatttgatacatatcttatataagaaatggtaaattcttatggaagttgtcatatacttaatacatttgagtaaagtcttatttttaacctttatttatcgcacttataatgcgtctaacttattctaatcaatgagttaacactttaatccctaatcttgtgcaacttttttatgactcgcatataaaacatttatcaaatagctgaaatttcctatcgctgttgttatcagcctgttaactggttggatttaagtccaaacgcgcttagctggtgaacaacctggataattaagtgactctagttaatgcccgttcagtgctcactcagcagtgcttcgcacttcgccaggcttcactgtaccccctagcccggcgaccgtttaccattaaagtcagctcgctggcaattaaaccgcatgcctttattaatcacaaaccgctgatgtggaagaggataatgccggtgacaaggctcaagtgcgtcgagtgaattcgcgaaaaagtttacggcgcaaggaaatggcagatcat

SEQ ID NO: 4775 - DNA, 1269 bp, DROSOPHILA
ccaaaagttcagccagaaatgctggccaaagtgctaactatcttggccatcgtggcttcagcaggagctgctgacgactttgatcctttcatagatatacccttcaaacggctcaagacttcggcggagcgcattgcggagcacggctacccggccgaatcgcattttgttgagaccccggacggctatgtgctgaatgtgttccgcattccccactcccccaagctgaatagcaatggcaacgagggggagtcggaggcatcgcgcccggtggtcctcatcatgcacgggctgttcagctgctcggattgcttcctgctcaatgggccggaggatgcgctgccgtacaactacgcagatgccggctacgatgtctggctaggcaacgcccgtggcaacatctattcgagaaacaacacccggctgaacgtgaagcatccgtacttctggaagtttagctggcacgagattggctccatcgatttgcccgccacgattgactacatcctggctgagacgggtcaacagtcgctgcactacgtcggccattcccagggatgcacttccttcttcgtgatgggttcctaccggccggagtacaatgccaagatcaagacggcgcacatgctcgcaccgcccgtctacatgggcaactccacagagggactcattgtgagcacagctccgctgtttggtcaccatggcattggctccacgctgctggaaaaccaggttttgctgccccagaacgcgttcatccagcgagtactggacaccacatgcagcaatcagccgatcatgctcagctactgcaaaaccttggccatcctctggggaggtcccgaaatcggcaaccttaaccagactctgctcccgcaaattgccgaaacccatcccgctggagtctcctcaaaccaggccattcactacattcagtcctacgcctccaacgatttccgtttgtacgattggggcagcaagagaaacctggaatactacggcgtgtcagagcctccggcatatgatctcaccaagatcacctccgagctgtacttatactatggcttggctgatggatcggccaataagcaggacatctcccgtctgcccgatcttctgcccaatttggcactgcttcacgaggtgcccgattccacatggggtcacttggactttatcttcgccacggaggtcaagagagtgattaacgatttggttttggattacagtaaagcctacgatgcgcgagaaactaacaatgagatttga

SEQ ID NO: 4776 - protein, 416 aa, DROSOPHILA
MLAKVLTILAIVASAGAADDFDPFIDIPFKRLKTSAERIAEHGYPAESHFVETPDGYVLNVFRIPHSPKLNSNGNEGESEASRPVVLIMHGLFSCSDCFLLNGPEDALPYNYADAGYDVWLGNARGNIYSRNNTRLNVKHPYFWKFSWHEIGSIDLPATIDYILAETGQQSLHYVGHSQGCTSFFVMGSYRPEYNAKIKTAHMLAPPVYMGNSTEGLIVSTAPLFGHHGIGSTLLENQVLLPQNAFIQRVLDTTCSNQPIMLSYCKTLAILWGGPEIGNLNQTLLPQIAETHPAGVSSNQAIHYIQSYASNDFRLYDWGSKRNLEYYGVSEPPAYDLTKITSELYLYYGLADGSANKQDISRLPDLLPNLALLHEVPDSTWGHLDFIFATEVKRVINDLVLDYSKAYDARETNNEI

SEQ ID NO: 4777 - DNA, 5023 bp, DROSOPHILA
ccgccagtcgtttcggtagaaccgcctgacacggcagacaccggagcgggcagtggaatttcgtcaatctggacgctctgggcgtgcttaacgctttcgtagtactgctgcttcttcaggcgcttcttctcatactccacctccttgcgcttgaggtccgcccagtgctccggctcgtcattgtgctggaagatggatatttcagttgttaggtggactacactattatcgtgccgagttggtcttacatagagtcgcattacgcggtcgaatgtttccttcagctttttgcgcttgtcgcgcagcaccttctcgttcagcggcgatggttgcagaacgttgtactctgcaaattgtagacgctgcatgagtggctgacgcgaatcctgcaggctcgatggactactcacccatctcgtcgatcttctccatctcctcaagtatctgtgaaggatccttgttcttcaaaacggcggcccgcaccatttggcgctgtttcttgttcttcttgagctccttcttgcgggcctccttgcctgaaaggtgcagcatggtggattcaacatatcgagctaaaaaggatcatacttacgcgcctggtccgtgggattcatgtactttccactcttcgtggtgtttatggagcggcgtcccatcttgctggctatttcttgttgctgcaactaaacgaatgacttcacctaaacgccggcgctgcaatattgttaccggcgtttttttcctgcccaacgtcctaatttgcttttataatatcactttcaattgatttatttatatttttatttatttattcgtttgcagctcgataggccgatacacgcgcaggctgatatcgataaaaacagaacagtaagcactagagctcgaagtgtgaccaacaaaatttggcggggaatagctaacatcccatacgctcaaaagttttctccgatgtttttcatcactagccaggattagaaaaacgatagacgattattaccgccacataggtaacgcggcaacagacgcgaaattgccagtacgatggcattcgagagctctgcacagcagttaaagattccggacgaaaggatgaatgcacagttgaacaatagtggcgtacaggtaggatgtgaaccagtcgccagccaggtcagtcaatcctaagcccatttggttgatttcatgtaaccgcgtgcaaggcgtcgcaatcccatgtcctattcacacccaatcagataccgggcgcgctgataaggatttcagacgatttccttacctccacgccgggagagggccagaaggacgtgcccaccacggagagcacaaaattgcagaacctgcacagccgcaagctgtgggacataggtaataacaatgttatctacttgacacctgcattttcatttcgttttcatgatgcaggtcctggttccattcatggcgaggggaagacaccgaagttggccgtgaagcgtctctggccaggctgcggggacgacgagccgaacgccaaaaaaggtaagtgggtctggttatgggaatatgggatatcgggcagcccaagctaaattcatgcaggcaactagctgtgcttgtgctttttaagtcatcccaataaccggcctcaaactttcccgctatcagtcaacattgccgtttacagagcttctcgtgccgttgtttttcagcactggcattcgagcaatttgtgtcgatatacgataggaaaataacgccgctacctcaaatcgaaaaaagtcaaagccgcaaacaaaataacgaattcgatttcgcattcgaaatgtccgcgaagccaagtgccaattcggaggacatccttctggccggcctgctccaggactggaaactagaggaccatgacaacgcacagattggctgcgacccagcgcccatgccggccagtcaatccgaattggcactggttcatttgaagttgccgtgcaagacgccccaatcccagccccaggtggaagcccatcaaaatgcttcagttgcgaccgtcaacagcgacagcggaagcataatactagtgtccgatgattcctcagctacggcgtgcagcttccttcactcgtccgagctctgtaactcctccgacttcgaagaactgcgcaaggagttcaccgaggactcctcatacatcgatctctcacttgattcgggcagcagcagtgagtgccgatcaatcagtaataacaataataattataacactgcgaatgcaatagatcctagtgccattgaaaccgacatgaagacacacaaactgggcgcgaagcgcagatcgccgcagaccaagggcgatgtgttggccaaaaagatttgtgagtaagaggtcgaattgatctgcaaccttaggggcacctgctctagctaaaccatttactaaattgctactacgcagcttaccagaatctgaacgagatgaacatctcctcgaatcaacccgtggtgacgcgcagtggtcgtgttgtggtctcacgtccgaaccagcagtttgactactcctcctcctcccagtcgaagggcgatggcgaggaggactccgacgaggtgtcactggatgccgacgacgatgagtatgagggagaagatttcgatcagctcaagtggacggagcgcaaacggcgtagctttagaaacaccagcttagccttcagccccgatggcagccgctcgtcgccggaggcaacacctccgatggtctatgtcgaattgggcggcaaaatcgtgatcattagggataaaccacagcccaatatcgttctggaagacgataaggaactcaagacgcagatgcacaagtttttgggtctgattccatcacgtcgcaagctcttcgatccgtcggaatacaatatggatcggggggatattgagatggatgtgtacgtaccgaccagtcttgttaccaatccatcacctaggtcctcaccaagcccagttactccatcggccaggtcacgaatatggcaggaaacaacgccgacatccatttgctccaacttgaatttatcgcatacctacacaccgaccgtgaatgagctccagactaagcacatggatgactctataatccaggtgaatttggactgctttcagaagaaaacaccagactctgtcaaggagcccattgatctaagcgagcttcccagccaaaagcaactagccaccaactgccgccgccacaagagctgtgtagcccgcctggagcggcacccacatttctacggtttcgtccagtcgctcagaccgtcagtctcgctcaacatgtgccatccgctggccctcaccttccggcggaccaatttccagcaatctaaggtggcactggccaaggttctgttcaacatgttcaatcacgcggtcttccactgtggcctgcaggtgcccattgtttggaagcacgcaatgaagaagcgctggaaatgcgagcttggcttcgacgcctccggcaggcgcacagcacagatcctgcttctgcacagcatagacactgcggccgagcttatctatctcctgctgcacgagatgtgccatgtggcggctttcctgttcaaccgggagttgggtcacggcgacaactgccgcagatggtaagatcattactttctatacatttaatgtgtcatcacttatctgtgcccattcctcaggacctaccaggcgaagatggcctttccggaggtgcccgccctcatggagtgcatagctagcttcatgtatacgtgcagcatgtgcagccgttcctcctacggcttggccgacttgaaatcgtacaacatacgctgctactactgccagttcgaggtgagcgtgaagcccgttagcaaggcgaacatgcacgagggcgcccgttccgatcggacgatgacaccgttcaagtgtttcatccgtgacaagtatttgaagctgggcgcggaggggggcgtcacacactcctcgaagatggcgctactcaacgaaatgttcgcgaagatgacagccgccacggaatagctggcagctgtctagcggctagcacacaacttgaagaatatattttataagtactatatgaacaaccatggaaggcggccccatcaaaatggagcagcctccagtgaaaacgaacacgctgtgacctactttatatacctacctacattttatacaaacttctataacctgtacaatggcgctatatgggatggggggctccacggagccccagaatcccgagaaggcgttcgtcagctagtctacgtgttaactagtatatacttttatgtttaactaacaaattacatgtgaatactactacagtaagtctcgtcggaacgctggtggctattgaaatagcatgtcgctgttttttttctacggaatcaaatgagaaatcaaaacaatttaatatgagaaaccatcatagtcgcatgtttgaagaaatggaaggcattgtttgtttgtttttgtgagaattttctgtttgccaacttcttgttaatggcaccccaaaaatgaaaacgacaattatacaaatgcaaatacagatacaccaattttagataattttatttcaatctaaatcccctctatcgagctgcgctgcgcctaacccatcatgcccttgctgcgcttgaaggctgctcctgccttgcgattatgattggcacgagtggacttgtgggcctccttttggccacgactgcgctgcgtctgctgggactgcccctggcccttgggtgctccgaccacagagggactcgctccatgtccaccactcttttggccgtatttggataactggcgctgctcgtagcgggcgcgtatcacctctggattctcgcaaaagtctctgttggtgcgcatcgacggctccgggtccgaatggccgccggagctctcctcgtcgtcgttctccagctcatcctgtgcgttgtacgccgaactggaggcggcttcctggagccttccgcgcagcagactcacaggcggcgcttgaccctcgttttgagcc

SEQ ID NO: 4778 - DNA, 2599 bp, DROSOPHILA
cgccacataggtaacgcggcaacagacgcgaaattgccagtacgatggcattcgagagctctgcacagcagttaaagattccggacgaaaggatgaatgcacagttgaacaatagtggcgtacaggtaggatgtgaaccagtcgccagccaggtcagtcaatcctaagcccatttggttgatttcatgtaaccgcgtgcaaggcgtcgcaatcccatgtcctattcacacccaatcagataccgggcgcgctgataaggatttcagacgatttccttacctccacgccgggagagggccagaaggacgtgcccaccacggagagcacaaaattgcagaacctgcacagccgcaagctgtgggacataggtcctggttccattcatggcgaggggaagacaccgaagttggccgtgaagcgtctctggccaggctgcggggacgacgagccgaacgccaaaaaagcactggcattcgagcaatttgtgtcgatatacgataggaaaataacgccgctacctcaaatcgaaaaaagtcaaagccgcaaacaaaataacgaattcgatttcgcattcgaaatgtccgcgaagccaagtgccaattcggaggacatccttctggccggcctgctccaggactggaaactagaggaccatgacaacgcacagattggctgcgacccagcgcccatgccggccagtcaatccgaattggcactggttcatttgaagttgccgtgcaagacgccccaatcccagccccaggtggaagcccatcaaaatgcttcagttgcgaccgtcaacagcgacagcggaagcataatactagtgtccgatgattcctcagctacggcgtgcagcttccttcactcgtccgagctctgtaactcctccgacttcgaagaactgcgcaaggagttcaccgaggactcctcatacatcgatctctcacttgattcgggcagcagcaatcctagtgccattgaaaccgacatgaagacacacaaactgggcgcgaagcgcagatcgccgcagaccaagggcgatgtgttggccaaaaagatttcttaccagaatctgaacgagatgaacatctcctcgaatcaacccgtggtgacgcgcagtggtcgtgttgtggtctcacgtccgaaccagcagtttgactactcctcctcctcccagtcgaagggcgatggcgaggaggactccgacgaggtgtcactggatgccgacgacgatgagtatgagggagaagatttcgatcagctcaagtggacggagcgcaaacggcgtagctttagaaacaccagcttagccttcagccccgatggcagccgctcgtcgccggaggcaacacctccgatggtctatgtcgaattgggcggcaaaatcgtgatcattagggataaaccacagcccaatatcgttctggaagacgataaggaactcaagacgcagatgcacaagtttttgggtctgattccatcacgtcgcaagctcttcgatccgtcggaatacaatatggatcggggggatattgagatggatgtgtacgtaccgaccagtcttgttaccaatccatcacctaggtcctcaccaagcccagttactccatcggccaggtcacgaatatggcaggaaacaacgccgacatccatttgctccaacttgaatttatcgcatacctacacaccgaccgtgaatgagctccagactaagcacatggatgactctataatccaggtgaatttggactgctttcagaagaaaacaccagactctgtcaaggagcccattgatctaagcgagcttcccagccaaaagcaactagccaccaactgccgccgccacaagagctgtgtagcccgcctggagcggcacccacatttctacggtttcgtccagtcgctcagaccgtcagtctcgctcaacatgtgccatccgctggccctcaccttccggcggaccaatttccagcaatctaaggtggcactggccaaggttctgttcaacatgttcaatcacgcggtcttccactgtggcctgcaggtgcccattgtttggaagcacgcaatgaagaagcgctggaaatgcgagcttggcttcgacgcctccggcaggcgcacagcacagatcctgcttctgcacagcatagacactgcggccgagcttatctatctcctgctgcacgagatgtgccatgtggcggctttcctgttcaaccgggagttgggtcacggcgacaactgccgcagatggacctaccaggcgaagatggcctttccggaggtgcccgccctcatggagtgcatagctagcttcatgtatacgtgcagcatgtgcagccgttcctcctacggcttggccgacttgaaatcgtacaacatacgctgctactactgccagttcgaggtgagcgtgaagcccgttagcaaggcgaacatgcacgagggcgcccgttccgatcggacgatgacaccgttcaagtgtttcatccgtgacaagtatttgaagctgggcgcggaggggggcgtcacacactcctcgaagatggcgctactcaacgaaatgttcgcgaagatgacagccgccacggaatag

SEQ ID NO: 4779 - protein, 673 aa, DROSOPHILA
MSAKPSANSEDILLAGLLQDWKLEDHDNAQIGCDPAPMPASQSELALVHLKLPCKTPQSQPQVEAHQNASVATVNSDSGSIILVSDDSSATACSFLHSSELCNSSDFEELRKEFTEDSSYIDLSLDSGSSNPSAIETDMKTHKLGAKRRSPQTKGDVLAKKISYQNLNEMNISSNQPVVTRSGRVVVSRPNQQFDYSSSSQSKGDGEEDSDEVSLDADDDEYEGEDFDQLKWTERKRRSFRNTSLAFSPDGSRSSPEATPPMVYVELGGKIVIIRDKPQPNIVLEDDKELKTQMHKFLGLIPSRRKLFDPSEYNMDRGDIEMDVYVPTSLVTNPSPRSSPSPVTPSARSRIWQETTPTSICSNLNLSHTYTPTVNELQTKHMDDSIIQVNLDCFQKKTPDSVKEPIDLSELPSQKQLATNCRRHKSCVARLERHPHFYGFVQSLRPSVSLNMCHPLALTFRRTNFQQSKVALAKVLFNMFNHAVFHCGLQVPIVWKHAMKKRWKCELGFDASGRRTAQILLLHSIDTAAELIYLLLHEMCHVAAFLFNRELGHGDNCRRWTYQAKMAFPEVPALMECIASFMYTCSMCSRSSYGLADLKSYNIRCYYCQFEVSVKPVSKANMHEGARSDRTMTPFKCFIRDKYLKLGAEGGVTHSSKMALLNEMFAKMTAATE

SEQ ID NO: 4780 - DNA, 24235 bp, DROSOPHILA
tagcgagtcagttagattcaaacacccgaattgaactcattaaatgtacgcacaagtttatagtgtgaacaattgttctatgtgtggactgcagagccgtgggtttaatgagaagggtgcgtttgtacatacatgcgatttttcagctctttgtagacaataaaaccatgctagttcgctgtgttgtttgctgtaaaaaattatagaatgaaaaaaattcaaaaattgagtgagcctgaaaggattgggcggtttgtggtcgttaaagtggaagtggaaaaacgcttttaggcaaattgatagaaatttacaaaactcataaaaatatgacaaaatatcaaaacattttcaaaagtgtgagagagacagttttacgcggtttacgggcgttagagtgcggcgtggcaacatgcatcaacaaaatggcgctgctttattgtcgtttaatctgttcctgcgatctcgacgttcatacggacagacgggcatggctagatcgactcggctgttgatcctgttccagaatatatatatatgttcactattcacgttattgtctgagcaacgttttatggcggttgagcgatgcatgtctgttctgcgcaatgatcgaaaactaactgactcaatctcttttcacaaaatcagaattatgcgtagttcttaactttacacgtattaccaacaaattttggagaaccactccagtccacatacatcaatactaatgcacaccgcatttttctgtacgcttccgttatttctggagaccccctcttaaaagagactatgttcggcagaaactctaacggtcctatgccgcgcatcaaaagaatagaattcatgtgttccaactttgtcatcatacctcattatcttcttgtcatatcagctatatctatacgactattcaacattttttttaatttttcttttatattctgaaataaatttgtcagtaacaatattccgtgccatatttatatttttatatgtccttcttattatatatcgtataactttattcataaaaagtaacatcttattaataatttttaaacgaaatagggtatgcagttttgctttatacatagaagtattagtcatatgtgttacatacgagctacttaaaatgttgctttttatattaaaattatatgaatatctcttgattcccatgtccaaatcgcaattgacattataaacgttttttatactgctgaaatgtggtccggaagttctccattttcgtatttttcccacattcgtagaaacaatttttctaatcctttggcatactgtgagcaatcaaagagaggactctctacgcgggctttccatacttttgcccgtaaggctttcaaatattctttttttgttcccaggcgtatagcaatattttgatattcttctcttgtacgcgctattaactctggacatccaagggtagccagctgagaggcagccactctgaaacgaaaagaaatgcattcaaataatatacgtttatatttaaaccaaaatttggaatagcttaagaaaacataatgaaataggtgtctttttgtgttcttctttattctttactgttgtaatttaatttgattaggtaaattttattgttttatggttttaattaattgcatgtgcaaaatgccttgccacataattctatacaaacatttgggtttcgcttccatttccttaggtatattgaaaaatgttttaaaaattatatattactaaacacatatgtttattttatatctttaaaacggtataataatgtataattttgatttcttaatacaaatttcggtgttttattgtgcaattaatagaaacatttgtgggcagttatactatgcaaaataaatacaaataatacacaaaaaaaacacagaacaatgaaatttaaactattgtgactaagaatgaatttgcaattttcaaaagcaaactttagttgtgtaggtcactatttatattttagtaggtgcgaacaacataataatgcggtttaagcaaccagtgaaatattaataatctttcgacaaagatcgatagaactttacaagagtaatacaaatatgaaaagattttgaaaaagtgtgggcgtgcaaatttttggcagtttgtaggcgttgaaaaaaattaaaagcgtcgaataaaatttacaaaactaataaaaatatcaaaacatctctagaatctgaatgggaaatctcaacctctagttcctgagatcttgacgttcatacggacggacagacagacggctcggctattgatcctgatcaagaatattatacttcatatggtcggaaacgcttccctctacctttcacataattctcaaagagcctttttacgagtaacgggtattaaaatgataggtataggggtattggggtgatagaaaatcttttgtagagaattccatgaacataccgtgaggctaacgtctctcctggcaaagttacgacaggggtacccgtccacaaaacgtccatagatgttgtatgcccattgcataaaggagtatcaagacatatatcagctaattgaccccgtcgtacgtgctcttcttttgccgcaacattggaaaatattactctatcaggagatattcctagaaataagatatgttttatttttatatcattaattgaaaaaaattatatttaccaaagtcactgacggtttttttaatattttgctcaccaactgctggaaaccttaataaccacaaaactgacttaggcacattttttaaaatttctacccatgactcgagggtttgtggatcgattttgtatagctgattaaaattgcaatacacaacagcgtcatctggtaacatatattgacgtcgagtagttattacaatattttgtggtacctcttcaccagtagcggccttgttgttagtttgggtagtggccaatccgttttgaactacaacgccatttaaagatgtttgcacttgaccagtggctatcattgatactatttgtgttgtatttggtaactccgcaactttatgagttatctcgactggtttttgtgcgttaacaacttcttttatctcctttacatctgtgttttcaacaaggggagataaatctgttgcatttataaccgttacattgtcaacaacggaagattgttgtttgtcacagacaattattcgttcctttaaatgtggaaacatttgcttatgatcacctataaaatatgtgtgcggcatatatgacaatttttcactatattggtaagccaattctaatggactagttacagaatccgtaataatgtaatccataaaactagccccactagtacctggatagcctaaccacattacttgaataggagcagggcgaagagcaaatatttcatttcttgcaccctttgtgtagccattcatattaaccaaaatatgtataccgtcattaaatatcttgtccgctgccttgccattacaagggatctgagaaagatccacaaagttttcagactctcgactgattttgtgtcgaaatgttgtaccatcatctggacttaaggcatagcaaaagatttccacttttgaacgatcatgaagacctggcacagattgcattaaatgcgaggtaggatgattcccgaagtccgagctaagataacctattcgaagccttccttttgtaggcaacttctttaagaaattataaggttttttatgaagcacgtgaactttttctaaacacaaattagcgtgtcgcgctgcaattgctttccgacaatcatgtgtcaacggataaagcatcgagtggtgtggatgcacggatggtaaacggtttttttcaagctgctcagtgacaatgctaaccagttttttcatgcgaatatcgtagtcagtccaatcacaaacaatttgcaagcaatgagccaaattgcagtatgcatcaggaaaatcaggttttaactttagagccgttcggtaagactgaatcgcttcaggaatatttccggaatctttgtgtatgcttgccaaattactatgcgcatcagcaaatgctgggttaatttgaattgctctcgtgtagcattgcaatgccccgctgacatcttgcaattctttaagagtattccccatgtttgaatatgcatcagcaaatgtgggttgaattctaatagcttccttataatgcattaacgcttcctttaatttgccttgctgttgcaaaacagatgccaaatttgaatgagcagcagcaaaatcggggaaaacttccaaagcttttaaataaagtcgcgtagcttcttcaatatacccctgctctctctttatgttagctaaattattaagggaatctgcatgatttgaacatagtcttagtgcagtgttatagcagtcctcagcttctttaacctataaagattacttagttagtgcacaataaaaacataaataatacaaaataataaaacatacctgccccttttctttgagagcgtttgcaagattgcagtacgcatcggggaaatttggttgcagttctattgccctcctatatgtatcgatagctaaatcaataagaccttgttcatagtaaacgcatgccaaattgccatgaactacagcattattcggagatagatttaatgcacgtaaataggcggccacagctctaaaaagtattaaatattttaaaatgtgtgaagggttagtttcaaaaataagttcttaaaaatgttttaaaaatgtatagtaattatactcgattgccaataataatatgctcatataaatttaaacgtaccttttccataaaacctttaactggaaaataattgaaaaggtagttctgacgttgcttgtacatttcaacttatttgtatatttttcatccgaacagcatattttaattactgtataaaccatcacggattgatactccatttaagtagaaaacttatttcgattagttagtattaaatgtttgcaatacaaaaaatgtatacaaattgtctgccgacaaagaaaatatttatattaacatatataagaacacgcgtccaatattattttcgtttaatattcttttgaaaaaaatatgcatgtgtatatacaacacacataagcacggatacaacgaaatagatttatgtgacgtaaataaacgcaaatgttttcacactgtttatcaactgaataggttaggttaaatagctttcatcttcgaaaacgaaaattaaaagtaaaatcatattcaaatttttaattcgaacacttttcaaggccagatttccatgtttttatcttgtccgatttttatataaatatattttgaaattcttaaatattataataaaaaataacgttatagtccaatttcccaactacaatatacccgtcaggctgtaaaagtttttagcagttggacaatattctgaataatacttgcgttcctttagtttacgaccgttcatccgtccgatatatcgggaactataaattctgaagagttcaaattaaccatgccgattctaaagacttcattttttcattctatcatttatctccgcaatttttttgatatgccagaaacatttttggcccgtccactgtaacatccaaagggctcccaaaactttcgtgtcgaaaactctcactatctttgtaaggggtaccgaaaagtatgtaacaggcaaaaggtagggttcccgatcatataaaatatataaagtcttgatcaggatcaatagccgagccgtctgtctgtccgtccgtatgaacgtcaagatctcaggaactagaggttgagatttaccattcagattctagagatgttttgatatttttattagtcttgtaataataataatcttgtaataacccgttactcgtagagtataagggtatactagattcgttaaaaagtctgtaacaggcagaggggagcgtttctgaccatataaagtatttatattcttgatcaggatcaatagccgagtcgatctggccatgtcggtctgtccgtatgaacgtcgagacctcaggaaatataaaagctagaaggttgagattcaccacacagagcgtgccaaaaaattgtttggcaaatcgatagaaatgaaatagaaagactagtaaaattataaaaaacaagagagaatgctatggtcgagttctccgactatcagataccagtttctcagctagtgtgaaggcgaaggcaaaatttcataatttttctgggatatcggtagatattggggaataaaatgaaaaaaaaaaaattaaaaattgttccaaaatgtgggtgtgaacggttcggtggctttcgggcgttatagtgggcgtggcaaaaagttttttttggcaaatcgatagaaattataaaaaaaaatataacattttgcaaaagtgcttaagggcgttagagtgggcttggctttttttttcaaattgatagctatttacaagactaatatacaaatatgaaaaaatataatatatcgtttctttttgcctgttacatacttttcaacgaatctttaactctacgagtaacgggtataaaaagaggcatgaatatactgacagcatttataggctggtagaccattatatcaataaatattatcaagtcaagtaaatcaagtgagtttccctcttcgataaaacgtttcgctgtcaaaaatatattggttaggaaaaagaaaagtgaaagtctgctcttagggaaagtggtcattggtaggggtaaggcattcggcgagctcgattagaccagtgtttagctagcaaatttctaatcctttctttatgctgaaactatccttttctgaatatactatttgtagctacgagctacagattctcttatctttcaccaacttattcccttacacattacacctatttttcggttccttaaaaataaaaaaatctataagctctaaatcatcttgcggcccattgtccagcacagggttcagttatgttcctccaactttggccgcagcgaagaagaaccaaatctcgaatgcctaatatagaggcaaatatccaatatacccaatcatattctctagactcgtaattttaggtaatttacttaattgccacattgatataacatgataacatatgaatttttcacaatcctttaagtttttatgaggaattaggcgtataatagatgtttcttttggttaaatacgaaagtgtttactgcggctggcaaaacaatattatttgaaaaaaaaattcattttttccaaacttaagggaccagttccttgaaactcatacagatttttttcgtaaattgtactctttcaatgattttgggccccttttaatctaaattaataaagatctcatttgtgacacatttaataatacgtttttttttgcattttactttcgtgcttcccattttttatttcagcagcattaataaaagcattttgaaataaaacaaaagtaattagttcaacaattgcatagagatagcgagttacccgaatatcagttactcacctaaagccaatggaacaaacatttcataaattgtattggatatcattgatatttggaaaagaaatttgaaaaaatttaaaaattgttcaaagctgtgggccgatttgaaggtgcaaggaggggcgtggccaaagtgtttttggcataccaactgaaattggcaagacaaggaacaacgtatgggtcaacaagcatgcgctgcgtttatgcctctatgcttaatctcatgagatctcgacgttcatacagacggacatggccaaatctactcggacattgatcctgattaatgtcaatctatatatgtgctttatatggtgggtttcaacaacattcaacagcgtcttggacaacctcacctgcgattttcgagcacgcatcaccgtcgtgggactttaacgtgtgggccgcgctgtgctgttgtcaatgcacccgaaggagacattcaacaaatgtttaagcgagggaaagattcccgacagattgaagcaccagacaccactaccccatctgccaggctgtccatctggctgctggacacgattggcacggtcttcgataagatgatcgcgccgagtctcgaagaaagtcccctccaaaccattacggattccggaaaggcttgtcgacgctggacgcgatcaccacagcacggatgtcggacgttggtcgtaagcagctacttcagcaatcgggtgctcgtccttgactcgacacagagttcggataacggccagagtgccacaaggctctgtccttggaccgctgttcgggagcaccatgtacaatggtgctctaaagcttgctcttccggagagcaccgagatcgtggcgctgacagtggtcacaattgagttttcggccgccgccgaagaatcagcaaacacagcggtcaaggctgtcgaagcattgctagctgtggccggcgtggagttgtggagttgcctctagtctcgagcaggaagctcgtgaaagcagcacgcatcaaggttgggttggttgacattacagtgacgtcgcaacgctcgataaaagaactcggagtcattctcgacacgcgcctttcgttcagagaacacttcgagtacgcccacaaacaggccagcgctactgctgggtctcagtcgtgaattcttctaaacataagaggaccaaagtaaaacactcggaagttgttgacgggcgttgtaacagcctatgcagcttcagtatgggccgaagcttttgcgaccaagtcgtacacgccaccaaccgactatcagcggtgaggcggcatgtgcccttcgcacaatatcggacgatgccgccatggtcatcgctagcctggttcctcttggagaactagttcgggaagccaaggagcttcatccacaaagaacagcgccccaaaacgcaagatcagaaacaaaatagtacgccagaagtcgaagcctagccaactgacaaaccgggtgggaaaacttttcccgaggacgctggacccacggctgcttttggggctaccttaagcgctacgggtatggcacatacgacggctgtacggactgcggcgaagggatagtacagaatgcctatcacgtcatttttaagtatcatggttttcaccacgagcggctagcgctggaggagcttaactcccgaatttttggaacccctagtggtggataccacgaggacatgtaaggcagcttctaaatacgcagcgttcttcatgaagacaggaccgctagaatcgggtcccttattcggtttccacatctccacagttacgaagttatattatgtatgttaataaaaaataaaaacaagaggaaatgctatagtcgagttccccgactatcgactatcagataccccttactcagctagtgtgaatgcgaaatttcataatttttctgggatatcgatattgggtaaacaaatgagaaaatatgtaaacatttttcaaaagtgtgagcgtggccggtttggtggctttagggtggagtaaaaagttatttggcaaatcgatagaaatttacacgactaataacgactgaataattgatcctgatcaagaatatatacacattatatagtcggaaacgctttcttctgtatgttacatacttttctatgaatatagtagaacgatcaaagtcaagatgtagagcgacaagagatctttaatctttaaaaagccacacctaagtattcaaagatcagcaatacagcgtaaaataaaatccttggtgttaccatacaatactctgccgtgatccttaggttatatcactggcataatatacatttagtgggtaaaacctaaatgtaagaaacggtcttacctatcaaatattcgtgcctccttaagaacgtttcccaaatttatgtatgcatccaaaaaattgggatcaagagtcacagctttttcaaagtgatgtatagccaaccaaatttctccctgagcgttaaacacacatcctaggttactccatgcaactgcaaagccaggacatgtttcaattgcctttaggtaacaagcctaaaaatataatatgagaaataatgttatttattttatgattattagaatattgtttgtttgggcttgtaactaatttaatgtattttgctctatacataccttggcttcttccaaacgaccgagagccttaagaagatttcccagatcgctgcgcacacaatacagatcctacaaatgtgtacaataaagcttatatttgtatagatatttaaataaaaccttacaggattatattgtaacgctgtaatataagcttgaacggcagactccatgtcacgagcagcaactaatgcagcagccaaattaatgtatccatcaataaaatctggttttagacgtacagctctgcgatagttgtctaaagcttcttgtaactgtccacgctctttaaaaacatttcctaaattactaaaaaaaagatttttgtaaattacttgtcggtggaaaataatgttctatgattttaattttttctcattttattctgcaatatctatcgatatcaaagaaaacttaataaatttcgcgtccacatttccactagctttccatgtgttttatgtttctctttaaaaaagttccaaacagcaaactgtggtaacgattattggtcgcaatggctgatttttcttaattttttcgtaatattgaacttgtcgccatgttaataagaggctgatagatgattttcaagcggagatgtctacttccgttagattagatggtgaaaatgtgtccacagcgttggtcggtgcattcagcaacgacttcgttgtgtgtaggataattgtaggaatccttcccgacttcattgttaattgagaaggggggtttaacaaaaggggtttatactttgaacttaacattataaatattcaagtcgttttatctactgccacaaatgcaatatgcttacttacttagagcgatgtaaaaacgaaacattcaaattaatgatagcattcatagactcatttgaaaaatatactaaccaagattccattgcctcatttcggtgctaataaatatcaaaaaacttagatatcttatatttccaagtccctgctttgggtaactttttttgtgtgatcagattcggaagtcgagcattaaacattaactttcaaatattgattgactttgcggtttatattttattgtgtgcattttattccactttcgtgtattatttcgacactgtctcttaatttgatcttccattctcggcattagctttggagccgacttaagaaccctttaccacatcgttgctggacaaggcagcaactttgttcaatgctttcgaggcggcggcccatgggctaaacggcttgagtatttacatattcagctcctcatgagcaattcattccgacagtataggagttctaaaggttcaacaaatcacgctcgctgaacgcgaccgtgagaagacatcgttctcagtgaacggagggaagtatgagttccgaaaacttccattagattgattagattgatagattaaattctaaagagcctatatgatgcaaacatgaggatatcggcagaaaattcgcgttttttttaaagggttactagggttcatcgtcatcaacaatggtgaggcgactttacatcgacgaacatctttaccgacccctcacatttgcggtatcggaatacaatccgaacgccaagataaagagatggaaaacacgcatcgatgtcctgcacgtgaattttctacaagcccgtctacaagcatcgctgccgatgccatctcgagacaacaactcaaatttgttagagaccaggaaccagagtcgtgcgcggccaccgtactgtgaactgcatccaaaaccagatcattttagaagaggcgcgatccgcttgaaaacatttatactgttttgaaataagaggcggtactcaataaacttcccatgcaaacaaactttgcttgaggaactcgccaatatctttattgctaaaagtataaatgcattccactgtgaccttcacacggcggcactaatcccggacaacgtggttcgaaaatttccagccacaaaattttggcattgtaaaaataccgacatcttcgcggtcgaggaaagaaaataaattctcaccgctgagcacaacagagctcacaggtcggctcaggaaaacgttaagcaggttatctcggagaaatactttccaaacacgaccaagttggcgagcgaaatagcagccaattgcaaaacttgcgccaaatcgaagtatgacagacatccgaggaaaaaggagctcggtgaaacgccaatcccgactcatgtaggaaaaatattgcatatcgatattttctcaacgaataaaaagtactttctcacctgtattgacaagttttctaaattcgctatgatacagccggttccgtctagaaccatagaggatctaaaagctcccctgctacaacttctaaatgttttttccaaagcaaaaaccatctactgcgacaataaaccgtcattgaaaccgcacacaaatgaagccatgctggaaaaccatttcggcgtcagcatttcgaatggaccacccctccatagcgtctccaacggacaagagaaacgcttccatagcacgttgatcgaacttgctagatgcctaaaaatagagaaaggcataagttacacagaagagtttatcttgctggccactgccagatataacaaatctatccattccgtcattaacaagaaaacggacgaggttgtgcgggcagatacgcacgatccacaaaataacgttcatgttagtccaaacgtagtcaaaaagagggcaccgggagtatctagataacctatccttaatatatatcacaatgaagcacgaaatcttgagtctcaagaaattcgaggaaatgactactaagtaagccaaatggcacttattgcggaagaaatttggtgcgctcttgtcttcatcggcataacttcccagagagccactagagccaaaagattcgcggctcaactaaaggaagtgattgcccacatagggtcgaccgagggcggacttaatcatgagggaggagtagttaactaagttaaccggaccgatcgtccgtacatcagcaccgttcaaattcctgaccaagcccggaagttctcagatagccatcaaagctctgcatagcttttaagtcagttccttcttgacattaaaaaagagcatcactcaatttcaaagaatactccggcaacattttttattgtaccaattgactgagtccctaggccagcaatttagaaggacagttaccctttcaacataatcttcctatctcaacataggagcatcggctacccgaccacataccagtgactgcagcgagggatcctcccctgtagtactagtacatttaatatatttatatattcttgatcaggatcaatagccgagtcgatctggccatgtccgtttgtccgtatgaacgtcgagttcccaggaactgtaaaagctagaagtttgcacttcagcacacagattttaaaggcatagacgcagcgcatgttgctacgcccactctaaagcccaaacttgaaattaagagaaaacagagaaggtatatagaagtatagagaagttatataaaagtttattccttttatgttttcaaaaattcgaaatgtatgcacccaatattattgtacgaaaaagtattcccatctggtaccaccggtatggtagtttttggtaagttgacaacactaaaagttggctttactgctccgttttaactatgtgctcgatatttgtcatcatactaaaggcatccaacgagtacattttatgccagctttcataaaatcagactaaagttttaagtcgttggaactgggcgtgtgaactatgttattcgtttataaaataacaacttctatgattctttttgtgaaaaagtacttacctataagcttctgccagcacagggttttgttttattgccaatgttgagaattgcgctgacttatcaagacgtctgcactgaaagtgaatagatgacagcaacaacaaaactccagtatttgtactgtcttgacgccataattgcatgcaatgcttttccgcgctttcatagtcaacagcttggtattctctatgggccaactcgagtaaacctatattaaaatataaatttaagcattatagtttttgtactacagtacgtttatatatattcctatgtatttatactcgttactcgtatagtaaaaggtatagtaaaagggtatactatattcgttaaaaagtatatagcaggcagaagaaagcgtttccgaggaccgagtggatgccaggtccgtctgtccgtatgagcgtcgagaagctagaagcattcagcaagtttgttggaccatgttgccacgcccactataaaactcgaaagccgctcaaaactgccacgcccattttttgtaaccatttctctaattttttttttaaattttattagttttgtgaatttttatagatttgccaaacatctctttgccacgccctaagccgccgaaccggtcacgcccacactttggaacaatttgtaaattttttcatcaagaaaaattttaaaatttcgcgtccgcattcacactagctgagtaacggctatctgatagtcatagaacttgactacagcattctctcttgtttttttctatgctttgggcaatttttttttccaaactcatctgagcagttccaatctccggagagggcagagaagtaatagctagttaatattggcttatcgttttctgggtttgcaaaggcataaacttgtttactgggtttagtacgcagaaacttcttatatgggctcatattttgtatgagggggttggatggctggggtaaaggatttgaaggcatcttgtttcctgcttgtcctttcttattttcttaattttaacctaaatattgcccatttgcgtgtatagtctataacgatttgtaacgtaactatttgtatattttcgtatgctcaattatacctgttactcgtagagtaaaagggtatatttggttcgttgagaagtatgtaaaaggcagcaggaagagttcccgaatatatatacattttgatcacgatcaaaagacgagtcgatctgattattattattcgagttgtggtaagagtattaaaaccttctaaagatatcacataccgtccgtaggtggcatgtaagattcattattcctagcgcaattctgcctacgtactaaaacaaaaatctcctttcagtacttgcacgctcacgattggtccaagtacagatccttggggaacacctgccgaagcctcgatatctatttggcccagcttccttatcgtaccataggacacggtacccaaagttgctgacaacttctatcctcaggtaccatacagtttatggctccgaggattacgccccatctggcggtgttgaaggcgttctttacgtccagagtcactattgcgtagtattcctccctgcctcctagccatctatcaccagcaagagcggtcttgtcgatgttactcacggccaaaggagtgtccaggatactctttcccttccgaaagccatattgctgacttccttcgtcactgagagcatcgacggcctctattcgagtatacaagatatcttcggacagttttccaactatatttagtaggcatagagggcgggagctggttgcagcatatgctgatcccttgcatttgtgcagcagaactattttctggcttttccaccttattgaaaagattccgtccaaaagacattgctgtaaggtggccctgaagatgtcaggtctaccgaacgccaatgctttaacaactgcaccaggaattccatttagtccagcggctttattgggtttgatacgcttgtctacggttttttatacgacagcgatttggcagccgccatgccacgcttgaactctatgcgtttccttctgaaagccaccatgagctccgcgtggtgggtactgcctctggctcgtttcgccgttctcctagccctgaagcaatcagaccgtagttggcttagggtggcactccaccagtacacgtgtggtttgcgccgtacctttttcttccttctcatggttgcttcgcaagttttaccaagcatattcatgaggtcagccgccgaactctctgcatccctatttgggattaccagggaattgatttgataagccagcattttcctcatcgatcttcctggtatcccatgcttgatcggcgtgccctccggagagactaaaggaaatcatagcgtggtcgcacagcgttaccagcaatgatccttgggcttcgccctctcgcatggcccacaagcacctccacaaactcctcgaactggtcgggggcgtcgctaggcggagcatagcagcagtacatatacacgtgttttaccttcgcatatgcaattgcccgcataggtgatgcagccagttcctgaacgtggggagagctgcaacacttgatagctgctttacctgactcgtctaggatcttggagtattgtccccagtgacgtaaggttcgcttaggagcatgatgtttacatcgcgttccaccgcgattgagcgaccatgcagctgtggagctcctcttcttaggcttcaccttggtccactctgcagtcgtgctagaattctgggagacagattcatagctgcctggcttggactcgtttgctctggatgtcgcctttccttctcccttgctaccagtcgcttggtagttcggcttgggcgcctgaactttgggaacttgctccttgggcacctgcgcattgtgagaagccttttttgtaggcttttctacctatgtctgggtagcactgctcgtcaagcggtgctcgctagtggccccttcatacaactctatcgccctgttgttaagggctgagagtccttagtctctcttgtgacgtgcctttgagtttcaaatgcggatagcaggatgtttatcttgccagttatcctggtgagtatgcacttcaggttctggctctggagagccgtggtcaggtccgaagaccatcccgccttttgcgatggcatggtagtgtagtccatcgtcttctggcttgccgcgatagtagatgctgtaggagccaagttctccacctgtacagccgcaatgcactccctagttaacctgaggtaactagttagcctgcttgctcacccctcgcttccgccggaaccgagattccgtctccctgagtcgggttcccgacgggtttcccttgtttttctttatatatttcttgttttactgaattattcttttgtaaatttgctatgtaccaatctttttaaatgtgataaccctgtaaatttgtttttagatattgtttaaattaaaaatgcttcatacactgcgggtaaccggattagcgccccctgcgccgtttcttaaatctatcgacgttattgttttttgttcactgatattccctctctctttgaggataaaagaagaacagctatctttttaattctgctttgttttcctttcggcgaaaaattgggcacgtatattgcatcatgagattagcgcccccaatgcagttttgaatattttccataatttgaaaggtgagacaacaaaattatttatgctgttaaattgaaaagtttgctttcattttgcgaaaaaagagaagaaaaatctgaaatcatagctttctatcatagctttcttttcgtaaaattgcagaaaaaaagcgcatacatcgcaaaactatagccaattttattaaaaacaattaaacttatagaaaacactataaaggtggcaataacagtgtctttaacgcggcagatcgcaggtccacatgtcaaataccaattcccacaactgctccggccaaattcgagaaaaaaattagggtgattaagaaagctaaacatttaaaacacgaaaaaccgaaaaaatatagaaagttgcgaaaaaaatcacgactaagttttgccggagctcatatgacctagtctaacgagtggcattatgttgtactctgggacgagaaacaaagaaggatcaaataattattaatttcctttaaaaatattctaatttaaatatttaagtgctaatcaactaattttttttgaactgaatcgaaaaacttaaattattgtagggggcgctatcctgatgagccaattttcacttacccatacccattatggattgtctttcttttttatttaaataaaaatctaaaaacaacaaattttacatttatagaattgttcaacttttaagggaaacaaattttcaaagctttcgcttgaacagttttcttaatatctcacatgaaaaatttttgctcaaggagcactaacctggtgacgcacaggaatttagattattaggaggatttagatcttcaatgcacgtctcgataagatgaaatacagtttaagatcctacgtttttttacaaagtttggattttgattttttaagcctgtacctagttactaggtaactaattttaaaggatggacaaacgataaaaactaatttgcaaggatgggaaaacgatagacactaattttaaaggatggtcaaacgattaaaactaattttaaagaaataaattatttttaacagtgggcaaacgaaatatttatttctaagaggtgggcttacgaaataagttatattcaagcgaggcaaacgaaaaaaaaaatttaaagttttttaaaggcggacaaacgacaaaaacaaatattggttgggcaaatgtttttttataatatttggtaaaaaaatttaattagaaaaaattgaaaaggtcaaatttttgattttttaacatttttgattttgatgttgagctcttatgtacacataaactaacggagaacctaatttggtgacggccaaaattgctctctgtccgctcgcttacgatgagagcgtaagcaatctgaaaatagaatttgcttgtttgtgagagttaaaacaagagacgagaacgcgtatatgtgtgcgtgttgtgctagaagacgattttcgggccgaaatcaattctgatcaaagaaacgaatttacatatttggggagttttggccaatttcgtagcaatatgatgaaattgcgcgctgtttaaaaatatcaaattggaataaaacaaaaaaaactgcaactaaccaactgaatctaatgtgcattttaaataatataaatcgatcatttacataaatcatattaagtcgaaggacttaataaatatactaaataattaaggcaaatgcaaaggaagtatgataactactgtaatttaaaacataaattttccaaaaagaagacattaaattgcttacacaagcactcaacaatgccttattaatttttcacacgtcgcaagctgaatactctaatgacaaatattctaatatagtcatttttgaaatttattttgtgacattatgattcggctataactatttctaagctatatttaaataataatgacgttaaggcaagcaaaacaagaattttccgcatgatgccaattgatcaaaaataatatagatatatagatcaaaaataatatatatataaaaataatatagatctataatatagatagataatatctatgaacttctaaggtgaagggcatattttgtcaaatttacaatgcatgagcatacagtgtgcacacatacagttgtctgctatcactgtatgcgtagaaaagagctcttttgctctcgaactaaaattcgagagagcctggagccacctctacactatggggcatttggcctgtttttttttacaaaaattaatacctcctaaactattggagatatttggatgaatttttttttatgcggttacacatgcctccaggaatattttgaaaaagtggccggtgccccaactcccgccccaattttttttttttttaatatattatattataattttttttaataatatatttttaaagtttatttttaatttcaatattgtataattcataaccgtcttcctcttcacaatcggcagagtctgaagaatttttatcaggttcaaattcgcaagctaacatttgaatgacttctggtggaagagatagtcgcttatgttttcgcctctttaaatttattgatgatattatgggatccgtagtatccattgctctgtaaaagacatctgcgaagctactaatagtttttgctttggctgggttcaacaaaagaattttaagtatggctgcaagatcccgcaggcagcacttccgtacagcttgaaccaaaagacattcgttgtgattctgcgcccttacgagttcatctgcttgctgtcttcggccactcaaattttttaaataatatgacgttttcgggagtccagctaatttcctttcctttttatttttctcctttaccttcaggactaggtgttcttctaaccaatttgaaaaactttcaaaaattcatttatttttcgattgcattttctccaatttcgcaaaagattgactgaaatcattcgttattaatattattcggttaatcgttcattaaagtctagcttgctatcagaaatatgcccactgataaaagtgcaaatagaattttccttttgacgaacaaccttttgcttgcgccacacttccagcagggcagcattggaaatcgagatattgctccctaaaaaatgaaatttctcaagaaaccgcaaaaaacgcacatagagactacctgatatgagttagaaattgaacacactacaacatggatataaacacttactgaacaaatttgaacaaattgttgtagctctattcaaagtttaaaattttttcaaacaactacatgttgacaccacttgctaaatgtacaaattgttagaaataggcgcacacaataaacaatatattaataacaacacataataaaaacctaaagattgattatctatttcaaattatactctccttcttcttctttttaaattttaacactttgaaagttaagctaaattttgcgcgcaaagcagccacgtgatatatgctcgcaacagccgactttaacagctgttattataacggtgcattgtaaaattaacttttgcgggctgtatcataacagtttaacgtatttccaatgtattaatactaaaatacttcaaatttgcatacttgtgaaaaacacattattgtaaaaaaaacaggccaaatgccccatagtgctctagagccacatcgaatggcgttacgcatcttgttattctggtgtctttggccgtaccctttggtcgagttccgcaacagatttttaaatcaataaaacatagcaaggcaaataataaaatgaaaacaaaacttatttttaaacttccttcttcacactgaatattatttcgtgcaattatcagaggaagtaatctgtataagcttcatactttagagaaggcaactagatactatgctcaagagataattcctcaggtacagcaaggaaagatgattgagacacacactgagaactgcagacacatgcatatgtatgcagattgaaatacaggtatagatcatacacatccagattcaggactaccctaaaatgggccgagtcaatgagttttcaagatctctcactacgcagtcaatgatattctagaaataatacagtttaaacaaattagactagtgttaagcacttcaattggtgcagattaaccaacggatatgcagggtaacgaacccttgaaatttcaaaggacacatccgaagttgtctgctgtagtttgttcgtacagtttagaggtttcaaaccaataaggtatttcagcaccggattcttaaatttgttatataaaaaaaaagcaattttctaatcgttttagaaaacaaaaaggtgttttttatgccgcagcttattttgtgcagtatgttaatattcaataaatggccattttaaacctaacaattttttaattttaatatccgagattgatccaacttcgcggagaagcggaagcttctccctaaaagaaaatactgtattgaatgaaggccgaaaagcaccgaagaacttttcaatgaataccaaataatatatgtacatatatgtaatatatgttgtcaaaaatttaaaaaaggaaaaacgtgcaagctacagcagaacgaaaaaaaatttaagtgcaaagtaagctttaagccagaaaaaaaaaaaattacaataaaaaatttaattttagatggagtgagagataacattatagacgagtttctcgactaccagataccccttacaagatacggctttaatgagggatgcacatttagaatacggaaatcgtctgttttttaaccatgtcaataattctttcaaaaatattgcgtttacatttttctggtatctttcatcgaagcaatgccaacataaaaattaatttaactacacgaaataagctcagacactgaacactgatttttatgttgtgtgaatttttagatgcgtacaccatatgcatctcttaatatgttgttaatatgagacacattagacacatatctatctcgggccaggcataaccaattgtttgatttattgatttttcttaatttaattgtggttgtcttcgctgtcaaacttattcatttgcattaatgtataaagtatttaactagatgtattctttaaaaaaatcaattacaaacgtatgtacatacatatataaatgtatggttatttcttaccgactgatgaaagagattgaatgtcattttgttttacgactaggttactgcctgttgaattcggattttgatctaataatatatgggccgcggacggcagttgatggctctgtccttgagactgcatatttattcgtgtttgttcaacatgcattaaaatccaacgttgataacatgtgtctaaaatcaataagccacccttaagtaaagacactgtgatgttgtttacatgattaaacctttaagaaagagaatatcagtaaaatatcaatatgaattgcattaagttataaaagcaacctgatttaattattttcaaacatccactcagctgttaatacgatttacaagagaaaatcaaatatttacatactcaaatattgaacactgtgaacagcaacttaatagcttataccctattcttacggcggcaaaaaccatattaacataatatcaatgttataccaatgatataccacatataatttcaaatgaagagagaatggtattgtcgagtcaatcagataaccgttagtcagctcgtgaaaatgggaacacgaaattcattcatcatttttctgggatatcgttaaatactgggatataaaataagaacaaaattgtttcaaattgatcaaaagttcggtcttgaccggtttggaaggtgtaagaagggccgtggccgcgaattaatagaaattgtatacaaaaatcaaaaaatttcaaaacattttgaaattgttagcgttagagtggtcatggcaaaatgttttctggcaaattcatagaaatttaaaagaaaataaaaatatgaaagaataataaaacattttacataagtgtagacgtggcagttttgtccggtatgtgtgcgttggattgcacatggcaacatgggttaacaaacttgcgcggcgcctatgtctctagaatcacatatcacatacagtttgtcaagaaactgtttacacactgtaaaataagttgaatttttgactttaaagctaaaaataaagggttttttgcttaattaaacgcaattttttttataaaatataatcaaacaatatttattttacttataaatcaaaaaacaaattaaaaatattaaatatacaagaaaataaacaacaaattccaagtttacacgcttttaagactgtcaagaaactctctttattacagttgcggtaacaataatagcatcataagcacatttcgtgtttgtcccagcttttctctattttctgacactttctcattattttactcactaaacttaaatactacaatgattttcaatcgaaataaaaaaattagtaacagatctcatggatattttaaaaataattggtaaaacaaaaaaaaaaccttcaaatttaggcggtaacaaacatagcac

SEQ ID NO: 4781 - DNA, 3519 bp, DROSOPHILA
agttgctgttcacagtgttcaatatttgagtatgtaaatatttgattttctcttgtaaatcgtattaacagctgagtggatgtttgaaaataattaaatcagacacatgttatcaacgttggattttaatgcatgttgaacaaacacgaataaatatgcagtctcaaggacagagccatcaactgccgtccgcggcccatatattattagatcaaaatccgaattcaacaggcagtaacctagtcgtaaaacaaaatgacattcaatctctttcatcagtcggtttactcgagttggcccatagagaataccaagctgttgactatgaaagcgcggaaaagcattgcatgcaattatggcgtcaagacagtacaaatactggagttttgttgttgctgtcatctattcactttcagtgcagacgtcttgataagtcagcgcaattctcaacattggcaataaaacaaaaccctgtgctggcagaagcttatagtaatttaggaaatgtttttaaagagcgtggacagttacaagaagctttagacaactatcgcagagctgtacgtctaaaaccagattttattgatggatacattaatttggctgctgcattagttgctgctcgtgacatggagtctgccgttcaagcttatattacagcgttacaatataatcctgatctgtattgtgtgcgcagcgatctgggaaatcttcttaaggctctcggtcgtttggaagaagccaaggcttgttacctaaaggcaattgaaacatgtcctggctttgcagttgcatggagtaacctaggatgtgtgtttaacgctcagggagaaatttggttggctatacatcactttgaaaaagctgtgactcttgatcccaattttttggatgcatacataaatttgggaaacgttcttaaggaggcacgaatatttgatagagctgtggccgcctatttacgtgcattaaatctatctccgaataatgctgtagttcatggcaatttggcatgcgtttactatgaacaaggtcttattgatttagctatcgatacatataggagggcaatagaactgcaaccaaatttccccgatgcgtactgcaatcttgcaaacgctctcaaagaaaaggggcaggttaaagaagctgaggactgctataacactgcactaagactatgttcaaatcatgcagattcccttaataatttagctaacataaagagagagcaggggtatattgaagaagctacgcgactttatttaaaagctttggaagttttccccgattttgctgctgctcattcaaatttggcatctgttttgcaacagcaaggcaaattaaaggaagcgttaatgcattataaggaagctattagaattcaacccacatttgctgatgcatattcaaacatggggaatactcttaaagaattgcaagatgtcagcggggcattgcaatgctacacgagagcaattcaaattaacccagcatttgctgatgcgcatagtaatttggcaagcatacacaaagattccggaaatattcctgaagcgattcagtcttaccgaacggctctaaagttaaaacctgattttcctgatgcatactgcaatttggctcattgcttgcaaattgtttgtgattggactgactacgatattcgcatgaaaaaactggttagcattgtcactgagcagcttgaaaaaaaccgtttaccatccgtgcatccacaccactcgatgctttatccgttgacacatgattgtcggaaagcaattgcagcgcgacacgctaatttgtgtttagaaaaagttcacgtgcttcataaaaaaccttataatttcttaaagaagttgcctacaaaaggaaggcttcgaataggttatcttagctcggacttcgggaatcatcctacctcgcatttaatgcaatctgtgccaggtcttcatgatcgttcaaaagtggaaatcttttgctatgccttaagtccagatgatggtacaacatttcgacacaaaatcagtcgagagtctgaaaactttgtggatctttctcagatcccttgtaatggcaaggcagcggacaagatatttaatgacggtatacatattttggttaatatgaatggctacacaaagggtgcaagaaatgaaatatttgctcttcgccctgctcctattcaagtaatgtggttaggctatccaggtactagtggggctagttttatggattacattattacggattctgtaactagtccattagaattggcttaccaatatagtgaaaaattgtcatatatgccgcacacatattttataggtgatcataagcaaatgtttccacatttaaaggaacgaataattgtctgtgacaaacaacaatcttccgttgttgacaatgtaacggttataaatgcaacagatttatctccccttgttgaaaacacagatgtaaaggagataaaagaagttgttaacgcacaaaaaccagtcgagataactcataaagttgcggagttaccaaatacaacacaaatagtatcaatgatagccactggtcaagtgcaaacatctttaaatggcgttgtagttcaaaacggattggccactacccaaactaacaacaaggccgctactggtgaagaggtaccacaaaatattgtaataactactcgacgtcaatatatgttaccagatgacgctgttgtgtattgcaattttaatcagctatacaaaatcgatccacaaaccctcgagtcatgggtagaaattttaaaaaatgtgcctaagtcagttttgtggttattaaggtttccagcagttggtgagcaaaatattaaaaaaaccgtcagtgactttggaatatctcctgatagagtaatattttccaatgttgcggcaaaagaagagcacgtacgacggggtcaattagctgatatatgtcttgatactcctttatgcaatgggcatacaacatctatggacgttttgtggacgggtacccctgtcgtaactttgccaggagagacgttagcctcacgagtggctgcctctcagctggctacccttggatgtccagagttaatagcgcgtacaagagaagaatatcaaaatattgctatacgcctgggaacaaaaaaagaatatttgaaagccttacgggcaaaagtatggaaagcccgcgtagagagtcctctctttgattgctcacagtatgccaaaggattagaaaaattgtttctacgaatgtgggaaaaatacgaaaatggagaacttccggaccacatttcagcagtataaaaaacgtttataatgtcaattgcgatttggacatgggaatcaagagatattcatataattttaatataaaaagcaacattttaagtagctcgtatgtaacacatatgactaatacttctatgtataaagcaaaactgcataccctatttcgtttaaaaattattaataagatgttactttttatgaataaagttatacgatatataataag

SEQ ID NO: 4782 - protein, 1059 aa, DROSOPHILA
MHVEQTRINMQSQGQSHQLPSAAHILLDQNPNSTGSNLVVKQNDIQSLSSVGLLELAHREYQAVDYESAEKHCMQLWRQDSTNTGVLLLLSSIHFQCRRLDKSAQFSTLAIKQNPVLAEAYSNLGNVFKERGQLQEALDNYRRAVRLKPDFIDGYINLAAALVAARDMESAVQAYITALQYNPDLYCVRSDLGNLLKALGRLEEAKACYLKAIETCPGFAVAWSNLGCVFNAQGEIWLAIHHFEKAVTLDPNFLDAYINLGNVLKEARIFDRAVAAYLRALNLSPNNAVVHGNLACVYYEQGLIDLAIDTYRRAIELQPNFPDAYCNLANALKEKGQVKEAEDCYNTALRLCSNHADSLNNLANIKREQGYIEEATRLYLKALEVFPDFAAAHSNLASVLQQQGKLKEALMHYKEAIRIQPTFADAYSNMGNTLKELQDVSGALQCYTRAIQINPAFADAHSNLASIHKDSGNIPEAIQSYRTALKLKPDFPDAYCNLAHCLQIVCDWTDYDIRMKKLVSIVTEQLEKNRLPSVHPHHSMLYPLTHDCRKAIAARHANLCLEKVHVLHKKPYNFLKKLPTKGRLRIGYLSSDFGNHPTSHLMQSVPGLHDRSKVEIFCYALSPDDGTTFRHKISRESENFVDLSQIPCNGKAADKIFNDGIHILVNMNGYTKGARNEIFALRPAPIQVMWLGYPGTSGASFMDYIITDSVTSPLELAYQYSEKLSYMPHTYFIGDHKQMFPHLKERIIVCDKQQSSVVDNVTVINATDLSPLVENTDVKEIKEVVNAQKPVEITHKVAELPNTTQIVSMIATGQVQTSLNGVVVQNGLATTQTNNKAATGEEVPQNIVITTRRQYMLPDDAVVYCNFNQLYKIDPQTLESWVEILKNVPKSVLWLLRFPAVGEQNIKKTVSDFGISPDRVIFSNVAAKEEHVRRGQLADICLDTPLCNGHTTSMDVLWTGTPVVTLPGETLASRVAASQLATLGCPELIARTREEYQNIAIRLGTKKEYLKALRAKVWKARVESPLFDCSQYAKGLEKLFLRMWEKYENGELPDHISAV

SEQ ID NO: 4783 - DNA, 3846 bp, DROSOPHILA
tttcgttttcaatttgcttgaaaaggcaaacagaaagtgttaaaagtatttctcatgcggaaaatccacagtgactggccaagcgctgacaaacttttcccactttccacacttttccccacttcaccccacttttccaccctttacctctcctgtcttctcctaagtggctgcgacacttctgtatgcataatttaaacaaaagtcgccaaaaaactagggggagaccaagagctggaaaaacaagcagcggcaacagaaagttgcaattgcaaaaattgaaaattttccgcataaaaatatgccccgacaaggaagcaaaggaaaaatcgcagaaaatagcaagaaatcttactcccagccaagatgtcgacaaagtatcgtgcatgttgttggcaaaatgtttattgtcgaaaagttaagcagaatgcagattgccacagaagaaatgtaaggtcgcagaaggtgcagaacctcttagtttatatagttattagagctctaataatctagcaatgttgtgtcaacacttgcctttgaattataaatttactttacttaaattttttctttacgcaaacaaaacacttttacttgaacataagtcttctttatttattagtctaatggaatttccatttcgttgctgaaaagagtttcttgtttgtgccaaaaagtttctggtttgaaagtaattaaatccgcatttacttaatcaaaaacaatgcacaaattatgagcaaccttttttaatttatggaagacaatgcttccaagaatgtttacaatatcagaggtcgaatatttatggaaagtaattaaatataatactatttgcatgtacgtttttaaggtccaggatggtaacggtatttttcaaatttaagcgtgattaccgttccacatgcagtattttcaacgttctcttaaatactgaaagctttcggtcagctttccaccatctaattgtttcagtggtctggtcacactgctgggcgaccgaaacgaaacgagtaaaaattccgataattacaattaatataaaataaaaacgcggaacataacgaacaaaaatggaggtggaaagcccggaacacacgcgcgacttcgccgaggtagacatcaataacggtgcggccacaggatcggaagacgaggaggaggaggtgccagcgcccggcagcgtaactctggatcgcaacgaaagtgatctcttcgtgtcggccttgagtcccagcagcatcggggatatacacgtaagttggggcacgaaacacgggagcagcccgcatcgacagcccccagtaattgagctcccgttttggggcgtcgtcggtcgttttatcagcgctcgctttgtttggttttgtggctacgtcacgagtgccgcccaccagcaaagcttgttgctccatagaaacacaatgaatttgcgtcttaatgcattccccaatcctctgcagccgctgcaggaagtgctcaccgacgacggcgactacttcatcagcatcgtggtctcggatccgcagaaaatcggcgatggcatgggctcctatttggcctacaagtgagtcacccagttccttatcatagaaaacataatgcattacaacaaaattcttatcgcctccgccagggtaacgaccaaaacgaacattcccaaattcaagcgtagcgagttcagtactctgcgccgcttcagcgatttccttggcatccatgatctgcttgtgggcaagtacatgcggctgggccgcatcataccgccggcgccctccaagaacatcataggcagcaccaaggtgaagattagcccgcagcaaagcgaaccgggcacgcccatgacccaggaatgggtggagatccgccgggcggccctcgagcgattcgtccaccgtaccgcccagcatccggtgctgcgcgtcgatctggatttcatgaacttcctggagagcgaccaggagctgccgcgttcagtgaatacctctgcgctcagtggagccggcgtcatccgcctgtttaacaaagttggcgaaactgtgaacaagattacctacaaaatggacgagaacgatccgtggttcgacgacaagatcaccgaggtggagagcctggacgccaatctgcagaagctgcacaatgccatgaaatcgctggtcacgtcgcgtcgtgagctgtcgctgctcaccggcttggtggccaagtcggcggccatgctgagcacttgcgaggagcacacaggcctctccagagcgctgtccaacctggcggacgtggaggagaagatagagctactgcgctccgagcaggccaattcggacttcttcattctggccgagtttatcaaggattacctgggcctgtttggcgccatcaagtgcatttttcatgagcgcgtcaaggctttccagaactggcagtacgcacaaatgcagttgtccaagcggcgtgagaaccgtggacgcttcgagctagccaatagggcggacaagctggatcaggcccagcaggaagtggacgaggtgagtggggcaagtaatttacgattttcccaatgagtcattttttgaattttgcagtggcagggaaaggttcagcgctgtcagcagcagttcgacgacatttcggcggaaattaagcgtgagatggagcgtttcgaattgaccagagttaaagactttaaagtaaacattatcaagtatatagaagaccaaatggcgcatcagcaacaggtagatagccatattcccataccgtgaacccacttattgctaacgattctcgttgcttttcagatcgtcagctattgggaggcctttgctccgtttgcccgcgaaatcgtttaacttttattccgattatcgttgcatttccaaaaacttttgcataaccaacagctatgcgcgctattaactaattctgcgggaccaaattcgatcttaatcttgcgatttggagctacaacttcgccttaagcacttatcttgcaatttgccgccgaagctcgtattttttgggaaactgcttccgattcctctcaagcatttcgcgatgcattcacaatgcctctatctctttattcgtacacagtaattattatcagaaagctgaaagtttgctacagacccagggatctgcgtattctcattcaaaaattgtattcggtattatctaaaacaaagccatggatctagttagttagttgaaagtgaagaagactcattggcaatttccaaattgaagtttataccattattattgggaaatgggtttccctgtttactgttggtataattatgtatttatatatatatattccaattaaacattttgtatcatgacaaacagagcatttcaacaataaatttgtaaatatgtatagatgtaaatattttggtgttgttttgtacatattcgtagattgcctgattaattatatgaatatttccaccttttttggaatattttcgaaaaggaaagaattctgcgattcaatatcaaagtaaatcttcagtgcagtaataaataggatgaagcaactggctttaaaatcttcaatatcataaatttagatttgttgatatttataaatatgtagatcaagaaaagaatattcaaactgtttttacgaaacttaaaattaataattttaaattaattatatattttttgccagcaatggtgttctggtatttttgtaacactgcattttcgtaagggagtattcctcataacctgccctacggtcacaccgaacacaacaaaaagaaataagtgtttagtcatttacaatctcatttgtttctcgaagttttcccaataacaaccatatatagcatccgaagc

SEQ ID NO: 4784 - DNA, 1450 bp, DROSOPHILA
cgaaacgaaacgagtaaaaattccgataattacaattaatataaaataaaaacgcggaacataacgaacaaaaatggaggtggaaagcccggaacacacgcgcgacttcgccgaggtagacatcaataacggtgcggccacaggatcggaagacgaggaggaggaggtgccagcgcccggcagcgtaactctggatcgcaacgaaagtgatctcttcgtgtcggccttgagtcccagcagcatcggggatatacacccgctgcaggaagtgctcaccgacgacggcgactacttcatcagcatcgtggtctcggatccgcagaaaatcggcgatggcatgggctcctatttggcctacaaggtaacgaccaaaacgaacattcccaaattcaagcgtagcgagttcagtactctgcgccgcttcagcgatttccttggcatccatgatctgcttgtgggcaagtacatgcggctgggccgcatcataccgccggcgccctccaagaacatcataggcagcaccaaggtgaagattagcccgcagcaaagcgaaccgggcacgcccatgacccaggaatgggtggagatccgccgggcggccctcgagcgattcgtccaccgtaccgcccagcatccggtgctgcgcgtcgatctggatttcatgaacttcctggagagcgaccaggagctgccgcgttcagtgaatacctctgcgctcagtggagccggcgtcatccgcctgtttaacaaagttggcgaaactgtgaacaagattacctacaaaatggacgagaacgatccgtggttcgacgacaagatcaccgaggtggagagcctggacgccaatctgcagaagctgcacaatgccatgaaatcgctggtcacgtcgcgtcgtgagctgtcgctgctcaccggcttggtggccaagtcggcggccatgctgagcacttgcgaggagcacacaggcctctccagagcgctgtccaacctggcggacgtggaggagaagatagagctactgcgctccgagcaggccaattcggacttcttcattctggccgagtttatcaaggattacctgggcctgtttggcgccatcaagtgcatttttcatgagcgcgtcaaggctttccagaactggcagtacgcacaaatgcagttgtccaagcggcgtgagaaccgtggacgcttcgagctagccaatagggcggacaagctggatcaggcccagcaggaagtggacgagtggcagggaaaggttcagcgctgtcagcagcagttcgacgacatttcggcggaaattaagcgtgagatggagcgtttcgaattgaccagagttaaagactttaaagtaaacattatcaagtatatagaagaccaaatggcgcatcagcaacagatcgtcagctattgggaggcctttgctccgtttgcccgcgaaatcgtttaa

SEQ ID NO: 4785 - protein, 458 aa, DROSOPHILA
MEVESPEHTRDFAEVDINNGAATGSEDEEEEVPAPGSVTLDRNESDLFVSALSPSSIGDIHPLQEVLTDDGDYFISIVVSDPQKIGDGMGSYLAYKVTTKTNIPKFKRSEFSTLRRFSDFLGIHDLLVGKYMRLGRIIPPAPSKNIIGSTKVKISPQQSEPGTPMTQEWVEIRRAALERFVHRTAQHPVLRVDLDFMNFLESDQELPRSVNTSALSGAGVIRLFNKVGETVNKITYKMDENDPWFDDKITEVESLDANLQKLHNAMKSLVTSRRELSLLTGLVAKSAAMLSTCEEHTGLSRALSNLADVEEKIELLRSEQANSDFFILAEFIKDYLGLFGAIKCIFHERVKAFQNWQYAQMQLSKRRENRGRFELANRADKLDQAQQEVDEWQGKVQRCQQQFDDISAEIKREMERFELTRVKDFKVNIIKYIEDQMAHQQQIVSYWEAFAPFAREIV

SEQ ID NO: 4786 - DNA, 13063 bp, DROSOPHILA
ttatactttaatgtattcaagacaataaaaaaatattgacaataaaatattgtggggtattaatgtacttctttatgagtcatttggattgattttaactttttcaaatcattggaataaagcaagatatctatatctctgtgtgtaataaaaagtctgatgttgtcaataattaatttaaactattatgaaaaccaaagtatctaaaagtgaaaaattaatcaattaaattattaccaagtatttacttcgattatatacaaaacctataaaagctcgtacttgcggtaaagctctcagaaaaaatagagctgataatttgtggccactaactggcgatgaaagtatctgtatacaaattacatatatcatattaaattaatggaaatatatacacaaatattacctgtttgttcccataatacaatatatacctgtgttttaataacatttattagttttaatccttaacaggcagcgtgttaccccctattaagtaaaattgcagcaagatccttccgttcatacgtaagtactgttaagcagtgacattattaaaaattaaaaatacatttataggatctctattttgggatttgatataatatattattttactaattactgaaatttacatcgcccctacaacgcctaacagtaccatttcattggtcgaattttcagataccccgatgtactaggctgaacaacatctcaaaacttaagtaaataaatatagattgttaatttagtatcatgttcataatgcatgtatggaaacgttgccagccttaatgctcccctaaaagccatgtaatgcacatgcagcaagcaaagtaatcctaaattatagccaagccgatgtttaccacactcacgtttgggggtataaatagttgcctaagatttacatgtgcctctgctgataattgaaatgcataaaactaacgcgaaaatgtaatgattctcggtcgtacagcgacgtcggcgattcattaaatcatgaccagtacttggcctgaccctgcgtcggcagggggtggctgtaggcggaggccgggttcccgtgagccgctgcagcggcatagtcattgagctggtgctgggctacgtgggcattgtagttggcggcggcgtggtaggcggcctgtgaccagtttgagggagcctccagcttcgagtagttgtcgctgaggtgtagtgagggcgagatctttgagacactgtcggcggtgagctttgagaagtcgtcaatggtcagcttggaatagtctgcaaaaagagacagggaataggggattgattagttgagtaagggctcatgggtttccaaaagaaatcttcatgtatctgttgaatgtgttatatgtttttaagtcaacccaccttgatggtaatagttttgactaccaaagtgtcccggctgagcaaagcccccgggaaatccgtgttgagccgcactttggaccaaatcgtagccacccatctgtgtgtgatggtgtgccgctgcagcagccgttgctgcgctgtggtgggagcttggtgcgtgtgcggcgtggtgaactccgtcgttcatcccagctccagtggcagtggttcccggcgcaggactgtagcccgccatcgaaccaactcccaaagggccgtagccaagtggtgctgtcgccccactgagcccaacacccacgcccacattagagcttccactgttcatgggcgaaagcccggagtttgagccgccagagtgcttgcgaaggcgtgccctgcggttggagaaccatacctggatacgggcttcggtgagggccgtggtctgagccagctcttcccgggtgtagacgtccgggtattgggtgcgggaaaaggctcgctcgagtgcctctagctgctcggcggtgaaggtggtgcgggagcgacgctgcttgcgtttcagcggaatcccaggctccgattccgtgtcacttatatctgagtctcgccctgaaacgatgtgaaaaggaattccgatatttattaaaactaaaactactaacattatgaacgccttgtaggaagccacacaattctccacgcccattggttcccccgaaactaaatcgaattcggcggtttgatctccagattcaatgaatagggccaccgacgtggatcgtgtacccccagattgtcccgtggtccatctccatgtgaatgggagtcgacgttcactgcgcgccattgcatattaattgagacgtcagggagcgcaacaaatctgtcaaagccaccgacgatcccacagaagggagaaatgcggtaagacgggctcttttgatccagcgggtgggggcgttgccgcaggcagctcgtaaaattcatagcattgacaagtgacacaatatatcacattacacaagaagatgatcggcaagttgtcagcggccatggaggagtgcgccaattaagttcggcgtctgtttacgaaagggaaatggggaaagccgtcgtcatcggcaatcgggcttgaagcgcggcgtgtggcagagcggtctcacggccgtgccatattattttgagagctcattacacaataaactgcgttttcgaggcggggctcagttgcagccctattggcctaggatcaaagcggaggagcgacctcttttactggaattattcaacaagatcacaagctcgtttttcaaaatagaaatcataaaatcccgacttcgctgtgactgttctttttacgtttcccgacggtaaagcggaagcgttcattgtcctgagtatattcaagagttcctgttggctgctaccaatcgatgtatttggttgatgctaatcttttccggtctatcaactggaattataaatgtatccaacgataaaaaaacttcctgtgctattcacctttgctattcattttcttttgtttttagtaaccagaattataacatttaaatcactagatctatcagcaataatcataattttttatttatcccgccaagaatcaaaattggattggcgaaaactccgttttcaagcctaaactgtaaaaaatctttcggcacgattataagttttgttgcttaactggccacacccataatcctcttggtcaaagcatccgaaaaaaattcggcgcgcggaacgcccactgtttagttcggcttgaggtccaataaagaaatcgaaaagttcacatgcgtattaaatttaaacgaatggatatgaatgataaaatacagaagtcggactattaatctttcaacacacgaaacaataaaacttaattatacgaaatagggggtcgggcttgtgcagatgcagaagccgtggatggatgccagggcaagaagacaaagcaaagcggctaagggaaataacaccgagaaaggtggaaggcagaaaaatcaattagtttttaaatgttaaacattttattaatttgttgctacttgcccattaaaagcgcccgtatgcaaaagggagccgccagcactggcggtccagggggaaacaatccagcaccgttgaagacaaagcctttttattttggcaccaacaccgacaaaggctgggcaccactttggctactgtggagctaaagctctttgacttttgggatttcttttcggtgactggtcgacgcggaaaaccgtttggggcactgggctttgataaattgctgtggtttcgtaatccgagcaggtattccatcatttttgacgacgtttaggttgtgttttcaaacagcaggtagtacacgcacttcaggaaccaggccttctgtagaatagttcgaattgctagcggtcattttccctactgttttctatttatttttggagcccaatcacctttcatggggaattgctgcgcagcctttatcacagtaaaggcaaagatcaatctgctcagttccttttctctttttctggtagatatgcggaggagagtgaaatcccagcactgtcatcaatcaagcaccctgacactgacccctgacttaaattggtgcatctaatgcatagcaaagcgttatgttatatgacctgtaattgaaaagtccggtatgtgtgtgggggggggggggggggagagaaggtgccccgcgctaggctgtcagatgtcagttggagacgagcgttctctgtcgccgagccacgatatcttgactttaaggcttcggaccatgcgacattgacttgggctcggccgaggtaacccacccgtctcaactttgctcatttttgttgggccgattccggcgaatgttatttcttaagtcttatgatttgtgtcttaagattcatgtcagcaaaaggattacaggagctttaaaagtaaggaagcttatgtgctctgagtttaccattcgctgagtcgcgtacaaaggatggaatgtggcgcaacacagcttaattgaaaacatatgtgtatgtacatagattctgattgagaggaaaatacaataactcatttttaataaaagtataaccgcaatgaaattggttttaatgataaagcttactaaaaaaatatttaaaatgttgataaacatatttgaacgcacgatgtggtaaaagcaaatggctcctaaaactctaaaatactacatctaccgaaatacactaaccgatgtagttatacattattgaaacgttgatcgacatatgtagcttccctacgtaagttacacaagtttactggtttcgctgcctaatacttcttttaacagtaaaagacacttattcaagtagcacctccacggtaaactgagccaacgcttttacaatctattatatactatgttcgaattcaaatgactacccactgatgcccatttaaactaatttacaaagtcggaggggctgctaagccatggaactaccacatgggactgatcccaaacttcgtcataagcctaatccgatggcagggaaacgaaatcatggattcgaagatgttcaacaactgaacagaattaaatgaaactaatttaaataacaacgcatacaaacaggtgatcaaaacaaagtcccacaggaaagaacgaaagagaagaagcgaaagaatcagagagctgtagaggaagcgggacagagaaggcggttaaagtgtgataatacgttaataaaatattttgtaactcatcaacacgaactacgggctcggggcgcaacagtgcaccgaggaggcggaaaacatacgatagtcggaccgagagaattcgggccacaatgagatcaaacagaacgctccaggacaccctggtgggcattaaagaagccgctcgagatcggtgcatttgaagtcaaaccgatgcttttgttacgttgacacttttttcgggcatgaacgattttaatgggttttcgagttgaacaaatgagccaaccactggatggatcttcgggccatatgtgtgagatagggtcagctcagaattcgacggcgatgctgcgggttagagaccgcacatgcaaggatagggcatttttgcgcaatcactgccgagttactgcgctgagtcgcctccctcgtcgcgcagtcatttgtcatgtgacactgcaggatgctcctcttctgtgccgtgctccctctgacatcccgttgcgaatcattagaggaggtgtgaactcccataacaggatccttgggcggcgtccgtttgtcttcgtcctttggcccttgccattttgtatttctgctttttgcaaataattgaacctgtttgtgttttgactcgtccaggatcagcccttgcttgctagcctcattgtctggtccggatctttgggttgggggaatatttggtaaatatcgttgttcattcccacggcggtggcccttgatgccattgtccggccactaattgccacaagtgttccgctcgggttttcttctttcgccgttgactccttgtcggtgttttgccatttgggcttattgtattgcctcactttctttctttgagtgggtcggtttgccctctgatcgcactaaataaaacaaatcgcacgcgtatttatcagtcagggtttgggatccgaatcagcttggctattgtcaggcagataagcggaggcggtccaagcgtttggcggtgtgtttgttgtgtttcaaacagggcgtggggactaatgtttatcaagctggagaactctaagaagcccagaggtacggattccaagtgatgaccattcgtcgcctcttctttacgaaagccccggactttaattaattcaacttagtatgagtactccgtcttatcactgtttcttttgaaataatacgatataaattggtttttagctaaggatttccattgacatctctcgattgctatcaatgggcttaataacaattgtagttaacacatttgctttggtcgcatgtgcacgcacatattttcatcaaaaagtatagcaccacattgtcacctaacttatttcagcagccactatacaatttctcttttttttttttttgcttaatttagctattattgggtattttatagatttccatcgatttttcggtatttgcgagatcaaagcgggccgccggtgaacactgtcagcgacactacggctttgtggccggggaagctcgagactccggatgggtctgggaaagagactgtgactagggaaagggagacgcggacgtgggccagagtcacttgtataaattgttcaaaaaccaaatcaaacgaaattatacgtgaaaaaaaagataaagaaacatatttaataatgcataattttattttaagtctgcaggtgagggccaggaaccattcagtcgccggtgaagaaggcgttgattacaggcaacggcaccgacttcgttatcccaagtcccagatcccaaagatctggccagttgcactttggatgtgtctttgcccagtcctttcgattggggatgtgattgttagctggatgctacttctccctgcccgcctataataagggtccgcggcactgtgatggagatggacttggggccgggggccggtgggggtcgaggaatcaatgatgatgggagggcgtttgcttattatacgcttcgacaacataatgataacccttatggcacggttgtgttgattatgtttagttatttttttatgttggatgattccggccacatttaaataacactgacatacaggtgcttctcggtgactgttaaattagagggcacaattaagcatttatcaaattcggtattcatttttatctcgctttggcatttctcctggggatattttcgcatactttatcccaaatagagtacaaacaacatggaacaccaattttcttcaaggccacacatttgcagtatttttcgttttcagcttgcaggcattcatgaaggcaaggtttccctctaggctattgtgaggcctggttactgtttttgttgtgacagtacgaggtaagaaaaaggatgtcttccagatcaacaaaggagaaaagatgagtactttaatggagttcaagattcggccctatatgaaaattagtatttcagtgctgaaggcaactaacaaatttttttgcccaatttcctaaccgcataagctccctggctgatcgaccacctctttgacccagccggtcgtttatcgaatgactatgcacttatagcctgattattggctccgatcatggaaaggggaactacgaaatctctctcaaggcattgaaaccagggttattagctgggaccaggttgcggcgatggaatcttggaacttgtgtacttctgattctaaggtgtcatcatctacacctatttctgttgtgtatggctaaaaagtgatcgagatcgttatcgtatggtcagccagatccattgtagtcttttctttcccactcccatcggcttttatttaagttaaagtcgctagtgctaagacgatcaaagcaaaggtgccgacaccagtttcttgatttgagctacaaatgatttgatgatgatttttcaaaattatcaaataaatgatcggtgattttcacagcaagatgccggtacccgttctcaaattcgtaagactgtctatcgccttaatcgtctaccgtactaatctggatttccttacctccaagaattccatttatggtatagtccttccgaccatcttcgctgccgcgatcgcttccccgcaataagcgactgatcgacgatgttgatggtggatccgcaaagccctcctgcatcatcgaaaaaataaaaagttattcgattattcggttattcctttgtgttcggcctaaatagttttgacaacggtttaggggaaaataaattatccaatttcaatttagataaagcctgataagaaattttgggtgctactgttgacctaaagaatttccatctcccattgtggatttggggctttgtgtttcatgtagccgtcactccttccccacgttctttgatggtaatccaattagagttcatccataagagtttatctttgactatgtgctcaacagacgattgtgtcgcgtgctttcttagaagacgatacaactgcagatattgtaaaaaatcgagattgcgaagtattgaagtcgttaatatgatctatgcaagccaaatgaagctttcggctttaactgccaagaaaaagaggctttagtttccccaaattaaaattcggagttgagcatacaagtattggcgcttttaaggcagttatatccaagcaactattttggaagttaacagaccaaacggcccaacaactatttgtttcccatagttgtgaactaaaaactgacagttggatttaccattaactctaggttcgctcccatcgctgcacacgaagctcgactgtgcaaggtaccgtcgtctcggcagccagactcataaggtgaagtacagtgacccagcggcggaggactcggctcgcctcaaatggagtggcatgtgccgcaaacattttcatgattaataatattatttttccactaacgaaattatcgcagagtggaggcatatctccgtgtctctaagctgcggttaattccccggctaacaaaggtggcataactggcacctcatagacaagacgagacaagatatgacgccaggctcggaaacagaaactgacattttgtccagtcttgagtgtatgctgggagtgcggccaccgtccggctggctaactggtcttggacttctggctactggctcatatttctattgaatgtgtcatgaaaacaacaacagaaaaatgttttgattttcaactgggttgcgttactcgcgttgggtctccggctggggcctaccagttgtttggctggaatgtgtgacggcttatctcggcgcaactgacaactggatcccaatcccaatcccaatcccgatctcgatctcggtcgagcccccgactgtgagacacattttttgcatccgcccgtgttgtggcttacaatttcaattgaaatttaattaattagatgacagttggattgacacttgactgcgctttatacatgaccgattcgtgttgcgtttttgactatattatgtttgggctctttctagttttttagtttgactgactgatgcgctctgtttttttaataattaaatttcttggaatctggaactttgtcagcgggacatttgattatatttggtgactgaaattttcatcaaggaacgagcccctgtggaattaaaaaggaagccgaagttaagagcgcctgtacataaccaagtccaaagtacaacatttaaaatctgaaatcccgatcgtcgataagccgccactaagcgagtcatatcaggtaggcatagggaggggtaatcgcggtcaggtatgaaatcaagacacaagagatgcctaaagcatattctaattaagcgtgaagctcacctggaggcagtttttacgcctactgccacgcaaaagcgagcgcacacaatataaggcctataacaccgaaaacaatcaaaatcccgatctaacggtttttgttattgtgaggtcatacaaaaacagcaatgtgattgcatatttttgtcattcataaaattttaaatgcagtttttaattttttatattaataaagcactagtccagcactcttcccataaaaaaataagaagatagtaagctaaaaacttagtttattaaaaaactacttttgcgaattaaaccatcctaaatttctttctgtgcatattacacagtgcgcatcttttggatttggaatgaagtgatgccgactctgatctatagtccgatcgtatcgatcgcccgaatcctaacgccccataaagtgtggctaattgcggtttcaaataaagagcgggacgatgccgccaaaagaggctggcgcatgaatacactagtgcttgtattaatcctaaaccctacactccctccaccgtcgagaagttttgccgaaagggaaaatcaacttcaagacggccgtcatccatccatgcaggcgtgaatcggtggagctggtccggctagtgggcagtatgccgaaatcttttgccagacttttggtctctgtgaatgagtcatattggcgtaggttcagtaatgagctgaaacacaatttccccgttggacttcgcttttgccacataaggtgtggggaagtgtgctcatcttttaagcttaacgcaaatctgaagcaaaataatatcgcagtattggcaaaggtggctaggtttgtaagacggcacattaaaacagagaatagatgacaaggaatatgtcgttaattataaattttgttaatctaataaacgaaacgaacttatatgcgagccattttaatgttttgatgtaggaccgattctttcacgcctcaaaaccggaagcgaagtcccgacggcgaagaatcatataaatatattctcgtatagcaccttttcgcctcaaggacaaaacacaaacgatgccgacaaggaacacgacagaagcggtgtctttatggtttaattgatttcttaacggtttgggtggcaagcgaaaatttgtcgtcgctgttgttcaacaatattgtcaatgagcgggcaagttcaaactgggtccttggtcagtttgggccatctgtgcagctagtcagccgacatatgcaaaaggccagtaggtgtcataggcaacgtgccataacaaagccagcgggcggtacgaaactgccacgtgacttttcggaaaacggaagtaaactgattcgcattcggtgcgtattttgaccctcttctatctggacatattggcatgcggttaaggctaccggcaggtcctgcaaatcctcgcatcgtttgttttggtacattttattgcttcctgcaaccttgcaggtgcatctcggtactcacctttatcagcttttcgcgtatttcccagctgaatatgctggggttttcctttcgcagctcatcgatccgcgtttcaatttcgggagaggtcaccttgggcttagatccacctattacgcccggtctaatagaacccgtctcctggtatcggttcagaatcttcgatacgcagccgtgagacacgcggagctggcgcgatattacacaaggccgcactccactggccgccatttccacgatcttcagtcgaatgtgattgggcaacggacgtccattgataaagacgcccccaagctgatttacccggccttgtcctgtgggcaagttagatcaattggcataagcactgataagtcaaatcatttattattattcattagtcagtaggaatcgttcacttccttctgaacttaacctaatgtgtagcttaaaagacattatggattctgttccttaattatagtgtatacatatgtaccgtactatcttacgtgtaaggagttcatgggaatgtattctcttcaggcgtcggagggaaatagggttcaaatgtaaacaagtctaggtctcgcatgatttcaaggggtaagttttttgaaatacacagtataaatgatatgatatatgttgaaattacttaccttgaaagggataccctgcgaaaaggggccgcaacgagttcgcgctggacatatccatggtccgaatgcaaagagcttatagcaatcgagaatctaagcgacgctgcactcaaaaaactttctttattttcggtaggttagtgcatccgagtcgataccattgcacaattatatttgaaatgagctatgatcagtaggctgtcgttccttgtgggaaatcacttaaagctggcccaaaggacccacttcatcactacgacgggcggctcccgattccgacggtactttgcaactctcagtccggtggtgagaagcgggatttttcttggaatcacgcgcgcttcagcgatcaaactgcacgagacgtgcaaagcaactaaagagaagcgcgagcataaattaacgagggccggccggtccgggcgatgactacgactactccgcagacgggcaaacaatgagatcgctccacaaactggttttcgcgccgaacaaccaccgccagatggagacgcagatggagatgctggcaggagggagagtgagagcagctttcgcgcccgccctttcggtggttgctgcctactggagcgccacgaccaggcacaatatggcaccgatcaaagcctcacagccgagcagagaaagagagagccggtagtgagctgaccgcgctttaatcgaggaattgccacgcctcgaaagacgtgattggctgagctggttcagggcggatctgggctcagctcgcccgacttttgatactgcatcgcatccataatccatccgcacatcaacccccctgacgacactcgcttgatcactctgtgaatgcagctgtccccgagcattgtgggaattgtatgacttttatttcatcgctggcagccaattaaaccgtgaaggctgcagggagcacaggacacatgccgaggaccacgaccaagcccaatcgcaaactcaagtccagcaccacatcccagtaccaatcgttccggttttgttactttcagcacccacagttccatgtcgtgtgcttccaatatatgtttatccca

SEQ ID NO: 4787 - DNA, 1350 bp, DROSOPHILA
atggatatgtccagcgcgaactcgttgcggccccttttcgcagggtatccctttcaaggacaaggccgggtaaatcagcttgggggcgtctttatcaatggacgtccgttgcccaatcacattcgactgaagatcgtggaaatggcggccagtggagtgcggccttgtgtaatatcgcgccagctccgcgtgtctcacggctgcgtatcgaagattctgaaccgataccaggagacgggttctattagaccgggcgtaataggtggatctaagcccaaggtgacctctcccgaaattgaaacgcggatcgatgagctgcgaaaggaaaaccccagcatattcagctgggaaatacgcgaaaagctgataaaggagggctttgcggatccaccatcaacatcgtcgatcagtcgcttattgcggggaagcgatcgcggcagcgaagatggtcggaaggactataccataaatggaattcttggagggcgagactcagatataagtgacacggaatcggagcctgggattccgctgaaacgcaagcagcgtcgctcccgcaccaccttcaccgccgagcagctagaggcactcgagcgagccttttcccgcacccaatacccggacgtctacacccgggaagagctggctcagaccacggccctcaccgaagcccgtatccaggtatggttctccaaccgcagggcacgccttcgcaagcactctggcggctcaaactccgggctttcgcccatgaacagtggaagctctaatgtgggcgtgggtgttgggctcagtggggcgacagcaccacttggctacggccctttgggagttggttcgatggcgggctacagtcctgcgccgggaaccactgccactggagctgggatgaacgacggagttcaccacgccgcacacgcaccaagctcccaccacagcgcagcaacggctgctgcagcggcacaccatcacacacagatgggtggctacgatttggtccaaagtgcggctcaacacggatttcccgggggctttgctcagccgggacactttggtagtcaaaactattaccatcaagactattccaagctgaccattgacgacttctcaaagctcaccgccgacagtgtctcaaagatctcgccctcactacacctcagcgacaactactcgaagctggaggctccctcaaactggtcacaggccgcctaccacgccgccgccaactacaatgcccacgtagcccagcaccagctcaatgactatgccgctgcagcggctcacgggaacccggcctccgcctacagccaccccctgccgacgcagggtcaggccaagtactggtcatga

SEQ ID NO: 4788 - protein, 449 aa, DROSOPHILA
MDMSSANSLRPLFAGYPFQGQGRVNQLGGVFINGRPLPNHIRLKIVEMAASGVRPCVISRQLRVSHGCVSKILNRYQETGSIRPGVIGGSKPKVTSPEIETRIDELRKENPSIFSWEIREKLIKEGFADPPSTSSISRLLRGSDRGSEDGRKDYTINGILGGRDSDISDTESEPGIPLKRKQRRSRTTFTAEQLEALERAFSRTQYPDVYTREELAQTTALTEARIQVWFSNRRARLRKHSGGSNSGLSPMNSGSSNVGVGVGLSGATAPLGYGPLGVGSMAGYSPAPGTTATGAGMNDGVHHAAHAPSSHHSAATAAAAAHHHTQMGGYDLVQSAAQHGFPGGFAQPGHFGSQNYYHQDYSKLTIDDFSKLTADSVSKISPSLHLSDNYSKLEAPSNWSQAAYHAAANYNAHVAQHQLNDYAAAAAHGNPASAYSHPLPTQGQAKYWS

SEQ ID NO: 4789 - DNA, 4629 bp, DROSOPHILA
gtaatggccgccaaaaaatgccgatgccgcgcgctgttgtccaacactgtttgctcaaggggctgcatcacatgcaatttcatccctcgatttcgtgtcacgactatcgcaaaaagttaccaaattattttaggaatgtaaaattaagatatcccttaaaatataattacaaacctacaaaaataatgtgaaaaataacaaatcctacgactgctatgtagtagagtacttcaaaatattaccaatcattcatattaaataattatgttaataaaatattaaataaaagcttgctgtattcttgctggtggatgcttatcaaaaaagtatagtattaaaatttctgtataaagcaaaactaaaaacaaaaaatgcagcttactttttggaaacagttttctagcgatgtttttaaattgaaagaaaaccatacctaccctgtgttttaaacgacaaaaacagttagacagatacctaattttaaagttaaatttttacttcttttgcaaatcataattcatactcagccaagtagaagtcaaatataccccaatgtcggatgtagaattttaaatactaaaaggaaatgcctaacatttttgaaaacatcattagcgttttttaataataaatattaaaatagctataaagcgaagtataaataggattttagtttttatttgtttggttttagacctggttatggatcttgaaaataatttaaaagattgtgtaaattagttaagagattataaataagaattgcttggatactaccttcttattaagctagtactcaagatgtccaaataacatgtaagcatttagcatttaaaagtataaataaagaacttaaaagagctgtgtagcttaggctgagcaccttaagtttgattgatgtatattgaagttataaattcatttgttggtcttctagaaacgcgatttctgtgatattccgccaggtggcaacgccagtcacgtcacgaggacacgaaggataaacgtgcgataagagaatagccgataagagctccacccagtcgcaaaaaagatgtaattctcgaagtagcggatatagatcgtttacttttttatttttcactcgcaactcattcaccgcacctccatccgccccaccacgtagcagtagccccaagatggaccacaacgaaatctccatgactatggacgccaagctggatacacacgataagcgaccagtggcgctgcgttacaagacatggacccgctgccaagtgaaaatagaggccattaagtgtgtgccctgcttcctgcggctcagtttccaggccatggagaccgagtctcactcccaagagtgtcaccccgctaaacccattagcgtctccgtaaacgttccgggcgtcagcttgagcctggctacctcgcgcacgaagcagcactcgtacgggctgttttggacgcaaaatcggcgggactgcttcatctatttcgccctggaaacggagacatcctgccgacgtcacatgaaatggatgcggaagtcgattaagaatctggaactttatcgccaggtctttctagaacagcgccggctgagcaggggtcccggaggtctgggcccactgcctaacctgccggaaaccctcgacgctagcgctctctctccgcgagtctcgcaaatatacgaggagatttttgacggcagccgcatctcccgcgtctcaatcgcatccggcatttacgaagagatgaagccgtcagtcatggagactccttcaccgccaccgctgcccgcacatccttaccgtcagcgaataaacacttttgagtgcgcccagcttggcgagattgcgcggtccagcaccaatcccgaatcggagctggccaagaagaagaaatacaagaacatgctggacaacctgttcgggagttcacgtcaaaagcgttccggcagcaccagcgaggtggccaatgaacccagcgatgaggtcctgccactgtatgagaatgcccccacgccggagcctgtgcttccggtaaagcgcacatcccagttgaacaagtctcagcgtaatagcttctcaagtccggacttgtccaaactcaatctgctggacacctttggagaatacttcgaggcccagaaccatgagtcgagcatggagataaacattagtctggatgagtcggtcattgagccgatctctcgcaatgagattattgcgcaaatatctagccaattgggcaaagcagactctttggaaagtctgaatgtttcggagcaacttccgtacaacttcaacttttccgcttgtaacacgtcaaccatcaatctcattggatcgcatggagctgttccgcagagtaatcagctaaagaaaaataagatactgcacgaagaccttacgggatactgtgtaatggcacccattttaaaggcgacggtaaaagatttgccaccacagccaggcggcagtacagtgtccacatcctccggatattccacgggctcctactgctcctccaccagcagctgtaacacggaggaccagcccaccaagacgcagatcgccaatgagagtgacatatacgaagtcatgcatggaacctctctgaacagtaccgtcggagcggctgcagctggatttgcggaacacctctacgagaaccttttggctgtgaaggccgcacaggagctggaggcgcagcctgtcggctttggactgagcacaagcacacccaccgaatctcccctggcgccggccttgccgcaaaagggaacgcccaaggacaaaactttgcaacagaagccagaggaggaaaactactaccagacaccaagaaagtcgattatcagtgtggacgacaagataccctcctattatccgaacagctgcgacacactcaagtcaaagcgacgcagtcccaccgaacatggacctagttttaggcacttagtcagttccaagttgcgacgtgaacgaaaggagaacctctacatttcctcgccccagcaaatcattgagcagcgtcacaaggcggccaccatctcatcagcatcagtatcagccaagactaaaagctcaaccaaaaagactgccgcccacaaaatttctgacagtgtttatgcagtcacccatccggtaaagcgtccgaacagcaccaatagcaacaatacccaccaaagcaacaataacaataacaatgaaggcgtggatgacgaactgctgcacttgaccgttttgaagaacattgactttaagtttgatgatagccaagcatctgaggattcctgcaaggcgaaagcatctgctcttcccgtagcgaacgaatgctttgtacagccaaatctggagaaggagtacgaggatcgctttcaagcggcggaaaaggctagtcgtcttttgcaaaagtatgcgacgctggccaaaatcgggcattcgcccagcaaggcgttgcccgcaccagcgcgtctggaacccatgattcagtctgtggccacgtccaatgagttgcagcccgagggaggcaccatgaaaaagttcgcctccctaccacgcttcaagaaaattgacttttcgccgctgaagatgagactcaatagtgtcctccagagaaatccaccttcgccgcagcactaaaatggattctccgttttccgtaaccatgtttaacacttcgctgtggacacaaactgctttttaaccatttcgctatttatgttgtagtttcttgtgaatgtgatctgattagttcgacaagttgattattatgttatccgagtatataatacgctttcccacgatgcacttagtattaagccttatatgtatggtcatcctgctttgtcaaatgtattttaacgaaccatatccggatccacttggggggtcccctagtattactactgttgtgaaccaacgatgaatgtctaagaatatgctcaattatgaaaatttacaaaaacgcttttatacgtattaaaccaaaaaccacattgttgactcatttaggcgccttgttgttaaagaaaaactaaatttagctaaacaattttcaattctacagatgattaatcgtctaccaaaatgggcttacgccgcatcagatattttttggcggcgtagcctgaactacgcttttcggcttcgcataacatatcagagattagttaaacttacaataaaatgcttcaagatagcataaccaatgctgaactgtaccgtgactaaaccataagcttacaaataaaatatgccacaaaaatgaagtaaactttacaagcaaatgaaaaggtgtttgtttgttttcaagaaggaatcactttatttgctcactgtcttaactgtaaaccatgggtcgtcgccgttcgtttataaactcctgttccactcgcgaatccttgtgcaccacatagaagagcagagcgccaccggaaacgaaaaaccccttttcggcgattatctcggccagctgcttctcctcgtccaccttgtggacacagcccaccttgcggttctcgtagtaaacgtgcacgttacccaggcggtagttgtgtgccttgtcgtatggcagcttttcggtgagcagcgtcgccaggcaatcccgcatggtggtggtctccggcagctgctgataaaa

SEQ ID NO: 4790 - DNA, 2629 bp, DROSOPHILA
ataaacgtgcgataagagaatagccgataagagctccacccagtcgcaaaaaagatgtaattctcgaagtagcggatatagatcgtttacttttttatttttcactcgcaactcattcaccgcacctccatccgccccaccacgtagcagtagccccaagatggaccacaacgaaatctccatgactatggacgccaagctggatacacacgataagcgaccagtggcgctgcgttacaagacatggacccgctgccaagtgaaaatagaggccattaagtgtgtgccctgcttcctgcggctcagtttccaggccatggagaccgagtctcactcccaagagtgtcaccccgctaaacccattagcgtctccgtaaacgttccgggcgtcagcttgagcctggctacctcgcgcacgaagcagcactcgtacgggctgttttggacgcaaaatcggcgggactgcttcatctatttcgccctggaaacggagacatcctgccgacgtcacatgaaatggatgcggaagtcgattaagaatctggaactttatcgccaggtctttctagaacagcgccggctgagcaggggtcccggaggtctgggcccactgcctaacctgccggaaaccctcgacgctagcgctctctctccgcgagtctcgcaaatatacgaggagatttttgacggcagccgcatctcccgcgtctcaatcgcatccggcatttacgaagagatgaagccgtcagtcatggagactccttcaccgccaccgctgcccgcacatccttaccgtcagcgaataaacacttttgagtgcgcccagcttggcgagattgcgcggtccagcaccaatcccgaatcggagctggccaagaagaagaaatacaagaacatgctggacaacctgttcgggagttcacgtcaaaagcgttccggcagcaccagcgaggtggccaatgaacccagcgatgaggtcctgccactgtatgagaatgcccccacgccggagcctgtgcttccggtaaagcgcacatcccagttgaacaagtctcagcgtaatagcttctcaagtccggacttgtccaaactcaatctgctggacacctttggagaatacttcgaggcccagaaccatgagtcgagcatggagataaacattagtctggatgagtcggtcattgagccgatctctcgcaatgagattattgcgcaaatatctagccaattgggcaaagcagactctttggaaagtctgaatgtttcggagcaacttccgtacaacttcaacttttccgcttgtaacacgtcaaccatcaatctcattggatcgcatggagctgttccgcagagtaatcagctaaagaaaaataagatactgcacgaagaccttacgggatactgtgtaatggcacccattttaaaggcgacggtaaaagatttgccaccacagccaggcggcagtacagtgtccacatcctccggatattccacgggctcctactgctcctccaccagcagctgtaacacggaggaccagcccaccaagacgcagatcgccaatgagagtgacatatacgaagtcatgcatggaacctctctgaacagtaccgtcggagcggctgcagctggatttgcggaacacctctacgagaaccttttggctgtgaaggccgcacaggagctggaggcgcagcctgtcggctttggactgagcacaagcacacccaccgaatctcccctggcgccggccttgccgcaaaagggaacgcccaaggacaaaactttgcaacagaagccagaggaggaaaactactaccagacaccaagaaagtcgattatcagtgtggacgacaagataccctcctattatccgaacagctgcgacacactcaagtcaaagcgacgcagtcccaccgaacatggacctagttttaggcacttagtcagttccaagttgcgacgtgaacgaaaggagaacctctacatttcctcgccccagcaaatcattgagcagcgtcacaaggcggccaccatctcatcagcatcagtatcagccaagactaaaagctcaaccaaaaagactgccgcccacaaaatttctgacagtgtttatgcagtcacccatccggtaaagcgtccgaacagcaccaatagcaacaatacccaccaaagcaacaataacaataacaatgaaggcgtggatgacgaactgctgcacttgaccgttttgaagaacattgactttaagtttgatgatagccaagcatctgaggattcctgcaaggcgaaagcatctgctcttcccgtagcgaacgaatgctttgtacagccaaatctggagaaggagtacgaggatcgctttcaagcggcggaaaaggctagtcgtcttttgcaaaagtatgcgacgctggccaaaatcgggcattcgcccagcaaggcgttgcccgcaccagcgcgtctggaacccatgattcagtctgtggccacgtccaatgagttgcagcccgagggaggcaccatgaaaaagttcgcctccctaccacgcttcaagaaaattgacttttcgccgctgaagatgagactcaatagtgtcctccagagaaatccaccttcgccgcagcactaa

SEQ ID NO: 4791 - protein, 813 aa, DROSOPHILA
MDAKLDTHDKRPVALRYKTWTRCQVKIEAIKCVPCFLRLSFQAMETESHSQECHPAKPISVSVNVPGVSLSLATSRTKQHSYGLFWTQNRRDCFIYFALETETSCRRHMKWMRKSIKNLELYRQVFLEQRRLSRGPGGLGPLPNLPETLDASALSPRVSQIYEEIFDGSRISRVSIASGIYEEMKPSVMETPSPPPLPAHPYRQRINTFECAQLGEIARSSTNPESELAKKKKYKNMLDNLFGSSRQKRSGSTSEVANEPSDEVLPLYENAPTPEPVLPVKRTSQLNKSQRNSFSSPDLSKLNLLDTFGEYFEAQNHESSMEINISLDESVIEPISRNEIIAQISSQLGKADSLESLNVSEQLPYNFNFSACNTSTINLIGSHGAVPQSNQLKKNKILHEDLTGYCVMAPILKATVKDLPPQPGGSTVSTSSGYSTGSYCSSTSSCNTEDQPTKTQIANESDIYEVMHGTSLNSTVGAAAAGFAEHLYENLLAVKAAQELEAQPVGFGLSTSTPTESPLAPALPQKGTPKDKTLQQKPEEENYYQTPRKSIISVDDKIPSYYPNSCDTLKSKRRSPTEHGPSFRHLVSSKLRRERKENLYISSPQQIIEQRHKAATISSASVSAKTKSSTKKTAAHKISDSVYAVTHPVKRPNSTNSNNTHQSNNNNNNEGVDDELLHLTVLKNIDFKFDDSQASEDSCKAKASALPVANECFVQPNLEKEYEDRFQAAEKASRLLQKYATLAKIGHSPSKALPAPARLEPMIQSVATSNELQPEGGTMKKFASLPRFKKIDFSPLKMRLNSVLQRNPPSPQH

SEQ ID NO: 4792 - DNA, 2984 bp, DROSOPHILA
tagtttcaatcggggtgatatggcaacgccgcgagccagcggcataaacaaaatcagctgtgcgggctaatgattgattttatgtaattgaaatggccacaaaatcggataatgctgactcaaaatcggacaaatcaaaggaatcactagatgacgcatgggcagtaagtatccagctacgttaacagatccgagactcaggaatcccctttacagatccgaccctgtcatctgtacaaggaggagtacgacgactgcacgagttttaaggcgcgcttccaccagtactttatatttggcaaggacacagattgctcccaatggctaactgattaccgtaactgcgaacgatatcagcagtccaacgggaacgatgtggctgccggcaaagcggtgattaaaagcgaggaggagcgccgaaggatccgcctgcgcgcccactttgccaacgacacttggcagaagcgtaagaagccaccgctggattgggctgctcctctgccggactggatggagaagcgaaacgagaatacctatcttgagcttaagcaaaaagagctctctggacaggcggcgccgcaaggagaggaacgctcgctgtgcacgatcatgtgaagataaatagtaaattattagttaagaaaagaaggaagttgtttcattgttcttaaaagatttcagtttttcagcaatggtttctaataatcggcggtctggcaacgctcgtgtcagctgtatttgtttctgatagtgctgctacatttattaacatttattacatttattattattattgctttcattaaacacgtaaagacacatttttcttataaaactcatttgctttcaaagtctaggtgtttgtattacgaatcaaacaagttgtgtaaaatctaataaacgttagcagtggtaatcggtctaagaacagtaatgctgagaataggtaatctagctaaaaaatagctgtattgacgacacattttgtgcgatacttcagatacgggctgatatctacctacatacctattccgcatccgcatcccaacgctccagctttgcctaaaatgctaaagggtagcacactgaaagccctggacgtcagaatcctatggccccttattgaaacaaggtcagcaggtaaatgtaaattacataacccgaggccgactccaaaccgtaacattgcggcagcaaaattgatcgtgacactcagattgctcttatcctgttgcagtggaggacaccagcgcagcttctccagcagcacccaccggtcctacataacattcaatgatttccgcaaaaaacaccgctggtacacaaaaaaggagcttgtggggtaagtgaaatgtcagcgcccttggtgaaatcatttctcaagtaccatctgctgtagctactccatgcaggacatgtacagcgtggtttccgacgtcagcaattaccacaagttcgtgccgtatgtgaagcgctccgatgtgcacagccggggaagtgagggcttcaaggcggacctcattgttggctttccgccgcttaacgaggcctacacctcgcaggtgaccctggtgccgcccagcttggttaagtcagagtgccacgatggacgtctgttcaactacctcctgaatgagtggtcttttaagccgggcctcaaggacatacctaactcctgcgtgctggacttcaaggtatcgttcgagttcaagtccctcctgcacagcaacgtcgccaacatattttttgaccttatctgcgatcaaatggaaaacgcttttatccaggaggtccgtcgacggagtggtccgccctcaatccgctcccacgtgcttacttcggatcggtcctgaccagaagaattgtggagatgttttttctttagtgatttaagttaaagttgtgtacattgcgttgtcaaacctcttagctagtacaattaaccaaattgtaaataaattgattatcagtttgtgtataaacgaacaaagaatatatctgtaagcggtccacaaaacgatagctgtacagaccacacaccaaatgatataatacgcgagtacaaagaacaaaaattaagtactttaatttggttcacttaacataatattcaaaatcaaatattttcgttaacagtctcgttttgggattagtagtgggacacacataaatgatacgaagattaacttcgaaagggtacatttctctgcttaattgacggcctctcggcgatgttgaaaacctaggagttaaaataaaattatgtttggaatggcatcgtttaagtggcgagaagtacatgatattctcgagtggcatacactacaatacattacattacaggcttatcatatataagtcgttattatcgtgcatcgttatttgggcagttagtattgagtgggagcgctactattgcctctacacgggaggctaaatacaagagtctacgtttgtatctaccagatactaactacgttctacatctagtatgctaagctctatgttactttatacagggatgtgtaattataatctctacttagtttgcacagtaaaaaatctaactaaaacggttaaatattcatttaaagtattgtccagaaggcgcgcgtgcatctagggcaaacaattgatctatcattaggggaattaacaaattttcgtagacgaggccaacatctgataatgcaatcaaaggtaaaggtacaacagcttaacactaggcgcccagatagacaagcttaataaggatttcagcacacatacgtgggcggaaataacagaatagaaacacgaaactatttccagatcaggagtgtgaggttgtggaaaggacacggcgtttggtgcaaccattttgaatggttaagcacaatacgtaggccctaaaaaatatcactttttcgacggcgatagacggccagtttccgtagttctcagttgtgcttggcccgacgaccaaacatatagcccttccagcg

SEQ ID NO: 4793 - DNA, 822 bp, DROSOPHILA
atacgggctgatatctacctacatacctattccgcatccgcatcccaacgctccagctttgcctaaaatgctaaagggtagcacactgaaagccctggacgtcagaatcctatggccccttattgaaacaagtggaggacaccagcgcagcttctccagcagcacccaccggtcctacataacattcaatgatttccgcaaaaaacaccgctggtacacaaaaaaggagcttgtgggctactccatgcaggacatgtacagcgtggtttccgacgtcagcaattaccacaagttcgtgccgtatgtgaagcgctccgatgtgcacagccggggaagtgagggcttcaaggcggacctcattgttggctttccgccgcttaacgaggcctacacctcgcaggtgaccctggtgccgcccagcttggttaagtcagagtgccacgatggacgtctgttcaactacctcctgaatgagtggtcttttaagccgggcctcaaggacatacctaactcctgcgtgctggacttcaaggtatcgttcgagttcaagtccctcctgcacagcaacgtcgccaacatattttttgaccttatctgcgatcaaatggaaaacgcttttatccaggaggtccgtcgacggagtggtccgccctcaatccgctcccacgtgcttacttcggatcggtcctgaccagaagaattgtggagatgttttttctttagtgatttaagttaaagttgtgtacattgcgttgtcaaacctcttagctagtacaattaaccaaattgtaaataaattgattatcagtttgtgtataaacg

SEQ ID NO: 4794 - protein, 207 aa, DROSOPHILA
MLKGSTLKALDVRILWPLIETSGGHQRSFSSSTHRSYITFNDFRKKHRWYTKKELVGYSMQDMYSVVSDVSNYHKFVPYVKRSDVHSRGSEGFKADLIVGFPPLNEAYTSQVTLVPPSLVKSECHDGRLFNYLLNEWSFKPGLKDIPNSCVLDFKVSFEFKSLLHSNVANIFFDLICDQMENAFIQEVRRRSGPPSIRSHVLTSDRS

SEQ ID NO: 4795 - DNA, 5151 bp, DROSOPHILA
gtggccgcagtggacttgcttctccttcaggatcttcgccacctggcgcgtcttcagagccaaccaagccaatgtgcgctcttggttgtacttgtagaacttctgttcgccagagctcttcacatctgccacgcatttaaggttccctgggtcgaggatctcgttaagcagacgactggtgctggcctcctccacggcaatgttgtccagcgatattgctcctgattgtggttaaagattttcaagaatacaatagtatagtataccatcgaaagcgaatgataatatcttactttgcgcacaatgttttcggaggtgatgaagagccaggaacgtgggatccacgggcgcggtcatgtagattctgccgttggagcagacctcgctgtccacgaaccaactgcgtcggggttccgtgaacgccaccagctccatcattctgccatcgggatgggttatgaacagtgcctccttgccatgtccgggatggaaaaacatctccagccgaaggtgtccgtcgtccgcatctttgggcagcagttcctccgacatgaagaacaccttcttcagtgccgaggccttgcacatcttggcagatccctccgcatccggatcagcttttggttttctcgctcgcgtttcctttttgcccattttctcgaataacttgccaagcgtgaagcaaaagtcaataactgtggaccgaaccaaaacaaacgatttgccgcctttttggttattgatagaagtctatcgattaattttggtattttatatagtctgctaattttaacttgttcctataaactattttatctattttatgccaaatagaagagcttaaaaattaaataatctctgccactaacgtccgcatcttaatattgcaactagtctaaaatgggtattaactttgattgagaagcgcggtcacattgcttgaacagatgttcacagtgatgaaattgtttacaacagtatattgtttttaaacaacaaaatgagcgtagatatagccagcacgatcaagttccgggatatttgcagcctgttcgagaagattaaggccacgcaaaaggtggctaacaaggaggaggtcctcaagagctactacgagtccttctgtcgccaccgcgaatcctttcgccggcaaaccggattaaacaacgaccagccggaggacggtgccagtagcttctattccgtgctgcgactgctgcttccgggtgcggacactggtcgggatacctatggattgcagatcaccgcgctgggcaggctctacatcagggtgctccagctacccacggactgtgagtgcagaaacgtattggcaatggcatttaggcttatttagaatctctttgttgtctctactagccagcgatgccatcaggctgcagcaccgcaacggaaacatgtaccgggactacggtgatgttgtttattccgtgcttaagccaaggtgctttaatccgcccagcaatttgagactgaaagaaatccatcagatgctggacaccattgccaacgaggacacagaaggtgggcgcttttaaactgatctgaacgactgaacgtcttaatgagaccgctctttgcagttaagcagcagcaactcatccggtttacggagcaggcctcgcctgaggaacagaagtggctaattcggttgctgcttaagagcctcgggctggggatcggtgagcaaaagattttcggtgtgctgcaccccaaggcgcaggatatctaccagcgctgctccgatctgggacatgtgtgcaatctgctggcagaccgaaccaccgacctagacgccagcagcagcaaggacagcaaggcggcggtcaagtttgtaaacctgaattccgtcatacggccattccaccagatacgtcccatgctgtgcgaacgattccccggtgacatccaggagctgatgcagtcggatgtgctctatctggagaccaaaatggatggcgaacgctttcagctgcacatcgatcggggtcgtttcatgtacatttcccgcaatggagtggactacaccagaaactttggtcacagctacgatcacggcaccttaacgccaaagctgaggggacttctgccgctgggtctggagtctatcatactcgacggcgagatgatggtgtgggataccaacaaactgcgctttcgggaaaaaggcgagaatacggacgtgaagagcctgaagccggagggcagctggcagccatgtttcgtggtgtacgatctgctatattttaatggccagagtctgctggaccatacctacattcagcgggcgtacaaattgcagaaactcatagttgaacagtcgggtgtgctgcagttgatgcgtgcacgcaaaatcggttccgttcaagagttcaacgagctgttccagcaggcactcgactcccacgccgagggcattgtgctaaagaagcagggatcaagatatcagcctggcgttagactgggcggtgggtggtacaaggacaaggctgatgtgagtagagtcatttttaagtagagtgctttaatatgaactcacttcaattttccaaccagtacatcaaagggctgatcaccgagttcgatgtgctgatcatcggggcattctacaatcgcaagcgcacctttgtggactcatttttactgggcgttctccagccggcgccgccaggcagctctaatcgtcccgaagtcttcagtattggagtggttgccaacaatacgaaacagcgcggagtgctaaatcacacactgaaaccacattggcatgatgtagtcaatgagccaccgccattgtggtttcactacaagcccaaggagaggtccggatgccccgatctgtggattgaaccgcagaactcggtaattttgcaggtgaaagctgctgatctggcgcccaatggagcatttttcacccgaaaatcgttgcactttccgcgcactgagatgaaacgggatgataagacctggagcgagtgtatgacacttaaggagtttaacgatctctgcggaggtcctttggccatcaagaagttaaacaagcggcaactgcgactagaggatgtgaccaccaagcggaaacagatgcgtatgacgccctcggagcgaagccgactgggattggccgtctatgagaagcgctatgacgctagcacctccgctagcacttccaaacttttcgacggtctgagcttttgcattctgagcggatctgccggacgacacagcaagcatcagctgcaggagctggctgttaaaaacggtggctgcatcgtggaaaatcccctgcccaatgatccaaagtgtttttgcatcgcaggcgatgagacgtttttagttaagcggctcatccttcaacagccacgcacctgtgacattgtgcgcatggagtggctacttagggtctgtcagaagcaggagcttgaactaaagcctagagatcttattgcggccactgaaccactgcagcaggatctggctgaatgttttgatcggcacggtgatagctacaccaaagacattgccaacgtggaggagctgcaggatctgcttcaaggcattgagttgacagctgataatgtggctggcataaccgcatctaatctcaatgctctggaggatcagcttctggatgggaaaaagaatctgaacatgttccgcaaccttaatgcgttcttctacagtccgcatggtgatgaagtggctaagcttctgtttcttcaaaacggcggccggatagtcgacgattccgatccgcaactaaatctgggatttatctgtatgtcttctgacatcgataacgaccacttcgagcactggctgcacaatcattccaagttgaccactgacaaggtcttaaactcggcgtggatacatcagtgccatcgcgaaggcatcctacttcctatgcattctttcgtctaactcaatgagtttttcacgctttatagttttgtacaaaaattacctgttatccttgttataaaattgttgtttcattgacatttttcttaccataaaaagctttaaacagaagtcattccgaatttaatgttatatcaaaaagattttcatggataatttgcttcaataaagtgaaacatagaataacaatagtagaatgacaataagtacgcaaaaaagttatttttcaatgatttcgtttttattcacataaaaagagataacgagcagaatagtattgtttccgttgggaggattttggacaagttttggggtagtgtggatatggatattaggatcgttatttcgccaattgatacgtttgacagttcggttacaaagttcagggagttctcttcgggattttcattggtttatcggttctgcactttgggcaataagaacatcaaaaatacatttattttattcattgtaaagttagatatatgtttgtatatatataacataaataatgtatatataggtgtataacatttaacactaacaattcttaagcgcgagctcttcgctctctctctctctctctctctctatttctttctctgtctctctccatctcacttgcacctactaacgctatctctgtcgttcattgacttgactttaacatttaatttaatgaggaatatgcaatctctgagattgtttaacacatttatcgactctatgaacatatagattacgtatgtcaatcaaattgtttaaaatttaccaagctaatatcaacaaaaaaaaaaaaactttatagtttaagtttctcagttagttcgattcatgggagtgggcaaaattcgtggttggaatatttgttgatgtttatacataaatagttgggcttgggcatacaaatgcagagtactctcgatcttgatctttatttgtgggtataacaatcggtatactaaacttagtcgttacttttcaatgttgtttggttgtgggtttgttctcttatattttcacttttgtgtttcttattccggcatggtaaataggttacaacgctacacataacaactatcaacatttagggtatgcataataatagcgatatcataataataataataataataataatagtaataacatcagttacaactttatttgtgtgtgttcgtcgttccttcaatataattgaaaata

SEQ ID NO: 4796 - DNA, 2963 bp, DROSOPHILA
atgagcgtagatatagccagcacgatcaagttccgggatatttgcagcctgttcgagaagattaaggccacgcaaaaggtggctaacaaggaggaggtcctcaagagctactacgagtccttctgtcgccaccgcgaatcctttcgccggcaaaccggattaaacaacgaccagccggaggacggtgccagtagcttctattccgtgctgcgactgctgcttccgggtgcggacactggtcgggatacctatggattgcagatcaccgcgctgggcaggctctacatcagggtgctccagctacccacggactccagcgatgccatcaggctgcagcaccgcaacggaaacatgtaccgggactacggtgatgttgtttattccgtgcttaagccaaggtgctttaatccgcccagcaatttgagactgaaagaaatccatcagatgctggacaccattgccaacgaggacacagaagttaagcagcagcaactcatccggtttacggagcaggcctcgcctgaggaacagaagtggctaattcggttgctgcttaagagcctcgggctggggatcggtgagcaaaagattttcggtgtgctgcaccccaaggcgcaggatatctaccagcgctgctccgatctgggacatgtgtgcaatctgctggcagaccgaaccaccgacctagacgccagcagcagcaaggacagcaaggcggcggtcaagtttgtaaacctgaattccgtcatacggccattccaccagatacgtcccatgctgtgcgaacgattccccggtgacatccaggagctgatgcagtcggatgtgctctatctggagaccaaaatggatggcgaacgctttcagctgcacatcgatcggggtcgtttcatgtacatttcccgcaatggagtggactacaccagaaactttggtcacagctacgatcacggcaccttaacgccaaagctgaggggacttctgccgctgggtctggagtctatcatactcgacggcgagatgatggtgtgggataccaacaaactgcgctttcgggaaaaaggcgagaatacggacgtgaagagcctgaagccggagggcagctggcagccatgtttcgtggtgtacgatctgctatattttaatggccagagtctgctggaccatacctacattcagcgggcgtacaaattgcagaaactcatagttgaacagtcgggtgtgctgcagttgatgcgtgcacgcaaaatcggttccgttcaagagttcaacgagctgttccagcaggcactcgactcccacgccgagggcattgtgctaaagaagcagggatcaagatatcagcctggcgttagactgggcggtgggtggtacaaggacaaggctgattacatcaaagggctgatcaccgagttcgatgtgctgatcatcggggcattctacaatcgcaagcgcacctttgtggactcatttttactgggcgttctccagccggcgccgccaggcagctctaatcgtcccgaagtcttcagtattggagtggttgccaacaatacgaaacagcgcggagtgctaaatcacacactgaaaccacattggcatgatgtagtcaatgagccaccgccattgtggtttcactacaagcccaaggagaggtccggatgccccgatctgtggattgaaccgcagaactcggtaattttgcaggtgaaagctgctgatctggcgcccaatggagcatttttcacccgaaaatcgttgcactttccgcgcactgagatgaaacgggatgataagacctggagcgagtgtatgacacttaaggagtttaacgatctctgcggaggtcctttggccatcaagaagttaaacaagcggcaactgcgactagaggatgtgaccaccaagcggaaacagatgcgtatgacgccctcggagcgaagccgactgggattggccgtctatgagaagcgctatgacgctagcacctccgctagcacttccaaacttttcgacggtctgagcttttgcattctgagcggatctgccggacgacacagcaagcatcagctgcaggagctggctgttaaaaacggtggctgcatcgtggaaaatcccctgcccaatgatccaaagtgtttttgcatcgcaggcgatgagacgtttttagttaagcggctcatccttcaacagccacgcacctgtgacattgtgcgcatggagtggctacttagggtctgtcagaagcaggagcttgaactaaagcctagagatcttattgcggccactgaaccactgcagcaggatctggctgaatgttttgatcggcacggtgatagctacaccaaagacattgccaacgtggaggagctgcaggatctgcttcaaggcattgagttgacagctgataatgtggctggcataaccgcatctaatctcaatgctctggaggatcagcttctggatgggaaaaagaatctgaacatgttccgcaaccttaatgcgttcttctacagtccgcatggtgatgaagtggctaagcttctgtttcttcaaaacggcggccggatagtcgacgattccgatccgcaactaaatctgggatttatctgtatgtcttctgacatcgataacgaccacttcgagcactggctgcacaatcattccaagttgaccactgacaaggtcttaaactcggcgtggatacatcagtgccatcgcgaaggcatcctacttcctatgcattctttcgtctaactcaatgagtttttcacgctttatagttttgtacaaaaattacctgttatccttgttataaaattgttgtttcattgacatttttcttaccataaaaagctttaaacagaagtcattccgaatttaatgttatatcaaaaagattttcatggataatttgcttcaataaagtgaaacatagaataacaatagtagaatgacaataa

SEQ ID NO: 4797 - protein, 918 aa, DROSOPHILA
MSVDIASTIKFRDICSLFEKIKATQKVANKEEVLKSYYESFCRHRESFRRQTGLNNDQPEDGASSFYSVLRLLLPGADTGRDTYGLQITALGRLYIRVLQLPTDSSDAIRLQHRNGNMYRDYGDVVYSVLKPRCFNPPSNLRLKEIHQMLDTIANEDTEVKQQQLIRFTEQASPEEQKWLIRLLLKSLGLGIGEQKIFGVLHPKAQDIYQRCSDLGHVCNLLADRTTDLDASSSKDSKAAVKFVNLNSVIRPFHQIRPMLCERFPGDIQELMQSDVLYLETKMDGERFQLHIDRGRFMYISRNGVDYTRNFGHSYDHGTLTPKLRGLLPLGLESIILDGEMMVWDTNKLRFREKGENTDVKSLKPEGSWQPCFVVYDLLYFNGQSLLDHTYIQRAYKLQKLIVEQSGVLQLMRARKIGSVQEFNELFQQALDSHAEGIVLKKQGSRYQPGVRLGGGWYKDKADYIKGLITEFDVLIIGAFYNRKRTFVDSFLLGVLQPAPPGSSNRPEVFSIGVVANNTKQRGVLNHTLKPHWHDVVNEPPPLWFHYKPKERSGCPDLWIEPQNSVILQVKAADLAPNGAFFTRKSLHFPRTEMKRDDKTWSECMTLKEFNDLCGGPLAIKKLNKRQLRLEDVTTKRKQMRMTPSERSRLGLAVYEKRYDASTSASTSKLFDGLSFCILSGSAGRHSKHQLQELAVKNGGCIVENPLPNDPKCFCIAGDETFLVKRLILQQPRTCDIVRMEWLLRVCQKQELELKPRDLIAATEPLQQDLAECFDRHGDSYTKDIANVEELQDLLQGIELTADNVAGITASNLNALEDQLLDGKKNLNMFRNLNAFFYSPHGDEVAKLLFLQNGGRIVDDSDPQLNLGFICMSSDIDNDHFEHWLHNHSKLTTDKVLNSAWIHQCHREGILLPMHSFV

SEQ ID NO: 4798 - DNA, 3795 bp, DROSOPHILA
atgatgataccccttacaaaaaatggaaaaattcaccaaaaaataaatttttccaaacttttcaaaaaatgatagggatgattagaatggccaaaaaggagcataaaatggtaatcttttttgctgtgtgaccatttttagtcaagttatactcaaaaaagtgaactttaatattgaattttttgcctaaaatcgtttctctgatttttgtgaaagacataatcgttgttttgataaaaaatatttaagataatagcccaaatatgaaatgtaatacctcgttgagttcgtatttccaatcgaactgcattcaaaaacaggaattgtaatttttagccaatttttggcaaattttgatgaaatctaccccttaaaaaaatgtaaaaaaattacccaaagtgtttattttctaaatctaaagcattggtaaaaatctatataaaactgtcattattttcgtcgtatgatcattattagccaatttatgataaataaaacaccatatatcccatcgatttatatttccttttaacggtaatcaaggaaactccgaccgcccaacgggtaacatctgcttaaggaaagggcattcgatggccgaccagatgggtgacagtattcccacacatcttatccgtttgtcccgttctcgctgggcgcgaacgtgaaatacagcacagatatgaattgaattgcacacatggtgacataccaccgagtatcgctatcgcccaccgcacatgtcagctgctcagtttagtttagtttagttgagtttagttgagttgagtcggagaacgagcgttatgaaattccgtgatatggtgctctggtaatacccatgcccatacccatgccccagaaccataaccagagccagaggcacactcataaccgaggcgagccgatagacgaagtccggcggcggaggcgaccagatgattgccgtatgtgcatactatatgggtagtccgtagtccgctgttcgggcacattcaacaattgccggcgatggcggacggacgcatagtggaaaacggcagaggaggaggcggtgaaggagtagcagcagcaccatcgcccagatacgcgatcctcgactgtgatgggggtagcgacgatgcctgggcactgctcctgcttctgcatgcggctaagagccatgggattcatctgctggccatcaccacaatgggatgcggcaataccagcagggagaatgcggcacgcaatatgcgacggattctggatgcctgcaagcgcacagatgtaaatataaataaactcaagtgcacagagagaaaaattcgatattcgattcgcaagtgatttgtggtttttattttaaaataacataatattgcctagaaatctcaatatcaggtgtgtaaatgttttttttttttgaattctttgtgacaaaccacatattagttcttgcctacttaatatatttaaaactttacaatcaaaaacgcaagccaatacaatgtgaacatcttttgtttaagtgtcgtgtgtgcaaatatttaaacaaatcagtattgtacaaatatttatttatgaacatgtgcgaattggattatatattttttttttaagaattaaaaacaacgccacattagcttatataaaaataataattagcattgcttggcgtttaatattacgtgacatttttaacgtttttcttgttccgattgcttaaaatgttgatttcacaccgttgggaaattccaaaacgccattcattgtcgcaaaaactattcgaatatttgaatagaaatatttttgaatttttctttctttttgaaattatttcgctttttgcatttgcatttgaccattgtttatcaattccagattcccatatacctgggcgccgtagatgccctcattccctctctggaggatgaaaaaaagtatttccatggccgcgacggattcggtgactgtctcaccgacgactgcgctcttcagttggaggacatcgtgcaggcggagcacgcagtgacagccatccatgatctctgccgttccaggcccaaacagatcaccatatttgccgtgggcccgctgacgaatcttgccctgggctatacgatgtacggtccggagtttgggaataactttcgtgatctgttcattatgggcggcaactatcagggcgtgggcaactcctcgcgttcggcggagttcaactttcactcggatccggaggcggcgcacacggtgctgctgaggacacgctgtcccatcaccatactgccgtgggaggcctgcctcccggagagattcaatatacacattgtgagttaaacatatcctgggttctgtttcgggctctagcatttccccagcagttgaaatactctatggtattcccgaacctaatccctcttcttctgcagaactggcgcctgaaggatttcgccgcaagggccaaggaagccggacatccagcaattaccatgctcaaccaggtggaagccgcccagtggctgccaatgatcgagcagtacgggatcgatacgtggaatccatgcgatgccattgccgtggccgtttggctattcgaggatcacttgatccggaggcacaacacctggcacgccaccgtggatctgcggggcacccacactcgcggccagatggttctcgatcatttgcgggagcgcgaaaagtatccggagaacgtgcgcattatcgagctggtggatgtcgagttctttaaacggatctgcgaatggatcgccggcttggatgacggcgccctactccgcgacactcaataaatccatatctctagtaattcccgcctttttcttcggcgctatcatttgattcccccatttatcaacggttcacaatggttatggggggggggggggggtcttggcgataagagtgcttttggaacaggtgcacaacacgatccatagagcagttccgagatggcaccaacctaatcggaatttaagctttaaacacttaatcggtgattaagcgtaaggttgcaaaattggctagctacccaaatgggtttggaagagcttttattgttaattgaattaaaatgttgtaatatttttaaggctttagtttgtgctatttcatttttaagtgtattttgtataagtcaaatacaagtcaagaatgtgctcaatcactatggcttatgatagtaactttcaattaatgaacaattagaagtaatacaatttctatgtaagattatacacaataaaaattcctttttttatcccaaaaatataataatttcttgttatatttaagcaataaaaaactagtataaaaagaacgagttattgaatcaattgagctacttggacttctttttgatcttcttaatcctttgcgaaggagccttttgttctgcgggagcgcgatatgtgccatgcagcttgtccagaaaaccgagcacaccgtaattgtagttgaacctggaaggatgaggaggaggagattcgctatgaaggtacaacggatggcaaggataggcaggatacccacttggcatggtgatagtcgtggaaccgcaccgaacccgccgaccatgggaaactgtagcccgtatgatcgctcatcgaattgatgatggccagggcaaagatcacgtaggccagggcgacatgggtgcccaggatggcaatggacgtggccaccggcaacagattggccaacacatgctccaccggatgggcatacagtgtaatggccgcaatgggagccgtccactcgtgatgcttcttgtgaacatacttatacaccgat

SEQ ID NO: 4799 - DNA, 1100 bp, DROSOPHILA
aattgccggcgatggcggacggacgcatagtggaaaacggcagaggaggaggcggtgaaggagtagcagcagcaccatcgcccagatacgcgatcctcgactgtgatgggggtagcgacgatgcctgggcactgctcctgcttctgcatgcggctaagagccatgggattcatctgctggccatcaccacaatgggatgcggcaataccagcagggagaatgcggcacgcaatatgcgacggattctggatgcctgcaagcgcacagatattcccatatacctgggcgccgtagatgccctcattccctctctggaggatgaaaaaaagtatttccatggccgcgacggattcggtgactgtctcaccgacgactgcgctcttcagttggaggacatcgtgcaggcggagcacgcagtgacagccatccatgatctctgccgttccaggcccaaacagatcaccatatttgccgtgggcccgctgacgaatcttgccctgggctatacgatgtacggtccggagtttgggaataactttcgtgatctgttcattatgggcggcaactatcagggcgtgggcaactcctcgcgttcggcggagttcaactttcactcggatccggaggcggcgcacacggtgctgctgaggacacgctgtcccatcaccatactgccgtgggaggcctgcctcccggagagattcaatatacacattaactggcgcctgaaggatttcgccgcaagggccaaggaagccggacatccagcaattaccatgctcaaccaggtggaagccgcccagtggctgccaatgatcgagcagtacgggatcgatacgtggaatccatgcgatgccattgccgtggccgtttggctattcgaggatcacttgatccggaggcacaacacctggcacgccaccgtggatctgcggggcacccacactcgcggccagatggttctcgatcatttgcgggagcgcgaaaagtatccggagaacgtgcgcattatcgagctggtggatgtcgagttctttaaacggatctgcgaatggatcgccggcttggatgacggcgccctactccgcgacactcaataa

SEQ ID NO: 4800 - protein, 362 aa, DROSOPHILA
MADGRIVENGRGGGGEGVAAAPSPRYAILDCDGGSDDAWALLLLLHAAKSHGIHLLAITTMGCGNTSRENAARNMRRILDACKRTDIPIYLGAVDALIPSLEDEKKYFHGRDGFGDCLTDDCALQLEDIVQAEHAVTAIHDLCRSRPKQITIFAVGPLTNLALGYTMYGPEFGNNFRDLFIMGGNYQGVGNSSRSAEFNFHSDPEAAHTVLLRTRCPITILPWEACLPERFNIHINWRLKDFAARAKEAGHPAITMLNQVEAAQWLPMIEQYGIDTWNPCDAIAVAVWLFEDHLIRRHNTWHATVDLRGTHTRGQMVLDHLREREKYPENVRIIELVDVEFFKRICEWIAGLDDGALLRDTQ

SEQ ID NO: 4801 - DNA, 4660 bp, DROSOPHILA
gagatgtgccatgtggcggctttcctgttcaaccgggagttgggtcacggcgacaactgccgcagatggtaagatcattactttctatacatttaatgtgtcatcacttatctgtgcccattcctcaggacctaccaggcgaagatggcctttccggaggtgcccgccctcatggagtgcatagctagcttcatgtatacgtgcagcatgtgcagccgttcctcctacggcttggccgacttgaaatcgtacaacatacgctgctactactgccagttcgaggtgagcgtgaagcccgttagcaaggcgaacatgcacgagggcgcccgttccgatcggacgatgacaccgttcaagtgtttcatccgtgacaagtatttgaagctgggcgcggaggggggcgtcacacactcctcgaagatggcgctactcaacgaaatgttcgcgaagatgacagccgccacggaatagctggcagctgtctagcggctagcacacaacttgaagaatatattttataagtactatatgaacaaccatggaaggcggccccatcaaaatggagcagcctccagtgaaaacgaacacgctgtgacctactttatatacctacctacattttatacaaacttctataacctgtacaatggcgctatatgggatggggggctccacggagccccagaatcccgagaaggcgttcgtcagctagtctacgtgttaactagtatatacttttatgtttaactaacaaattacatgtgaatactactacagtaagtctcgtcggaacgctggtggctattgaaatagcatgtcgctgttttttttctacggaatcaaatgagaaatcaaaacaatttaatatgagaaaccatcatagtcgcatgtttgaagaaatggaaggcattgtttgtttgtttttgtgagaattttctgtttgccaacttcttgttaatggcaccccaaaaatgaaaacgacaattatacaaatgcaaatacagatacaccaattttagataattttatttcaatctaaatcccctctatcgagctgcgctgcgcctaacccatcatgcccttgctgcgcttgaaggctgctcctgccttgcgattatgattggcacgagtggacttgtgggcctccttttggccacgactgcgctgcgtctgctgggactgcccctggcccttgggtgctccgaccacagagggactcgctccatgtccaccactcttttggccgtatttggataactggcgctgctcgtagcgggcgcgtatcacctctggattctcgcaaaagtctctgttggtgcgcatcgacggctccgggtccgaatggccgccggagctctcctcgtcgtcgttctccagctcatcctgtgcgttgtacgccgaactggaggcggcttcctggagccttccgcgcagcagactcacaggcggcgcttgaccctcgttttgagcctcgtagctgtcgtcgtactcgtcgtcatactcgcccctctcgagcgtggtctcctcgaccatggcgtacttctggtagcgctcctttagctgcttcaggtcgcgcttgtcgtccagcaactgttccgcattgcgtggcgctcccggcaatcccttgccctgcttgataatgcactcgggctggtcccgcgtcagcacgtcgtagcgatcgccgtcgtgaacgttgaagtgtcgcaggcccgtttggcgttgctgtttgtcctgcgggtcgggcggaatgtacacctcctgtcggtccatctgcgctagatccggcggcagattgtcgtccagaatggcggcaatgacctgctcgctgttatcgtagcggatgaggaggcgccttatgaagccactgcccagatcgggcagcacttccagcacggcggtgacttccaagtcaatgtcccttgtcgttccgttggccgtcggcgacggctgtggagaagtgcgcgaggagtcgccgttcttgaattcctcgtcctggacgttccccgtaacttggacaccgttactggccatatcgtcggccattatgccgttggggcagctggccagtgccttctgataaccggacaccacgaagtccacctcgtagttcttgctagcgatgcagagattgcgaataagaataacattggccactaagcaaggcagacaactcacatatttgggcaacgttggatcagcagcttcatgtcgtgctccagcggaaactgccgctggtagtccacaacgaagttctgggcggaaaggcactcctgcatcacttccaccagctgctgtccccgtcccgactccatctgcaggctgaccacgcgacgaacgatgaagatatattgctggcgcgtctcatttagccagcgcagcgaactcgcacccgggttcaccaagtagatgttcttgtacaacatgggcacagtcatgtcatagaaattggcaatgctgcgaatacgaaagggaaggcaatagaatcacacagaccacggatgctgatgatgatgatgatgataataaccttggggccaaacgcagctgttcgatggtttccaatagctggggacagaggagcagcagcaggcgcagcgtgtatgcgcagtccatggcgaagagcaccacatcgtcgtagggcgtctccaagtcgacgtccagagacgccccgccgccagcaccttcgcagccctcgttctccacctggatctgcatgctgaggaaagcgctctcgtagaagatcagcgcctccttcagatccttttggtactccggctgcacttccagcaccttgtcgaagatctggcgcaacagttccacgttctccggctccgcatcgccaacagcgatgagcagatcaaagagcagtggcacagagatcaggtagttgctgtacagcaggctgccgtgttgcttcgggctaatccactccgagtccgattccttaccggtgcacagtcgcattatcagacgcacgacgagatcgagcagctgtccgtacagcagatgggcctggtccaactccttgtcccggctgacatctgtctgtctgtagtagggattagcgcgctgcaggaatgtgacaacggccgccatggccgattcatcgtacaccatgtaggaccagaatctggcggggatcaagtgttaatgtcttcggtatactgagcgcaacacgatgtagcttactcgtgctgcgtcaggctcagcaggaactccatgtccccacggaaattgttcgccgcgaaggtccattcctccagtgcagctccggattttaggcgtccataggagctcaacatgcacaaatagctggcaaagggcttctcgcgctgcacccagtgctcgtcctgtccacaaaaaaaaaaaacacatatgcatagtactatctcgccggaggtgcaccaacatgtccacttaccagcgccggaacgttcctgcgcaccccatccttgccggaaagtgcaaacttgagttcgtccagtggcagattctgtgggttgcagttgttgttgttgctggtgtcgttgtccagcatgtcggccccccctttggctggcaacactctcgaattgttgctagggtatttcttcaataacaaaattcaataaaactagcgaatttcgtgcgatgcaaggtggcagcacattgataaggtggcgcacgcaggctcagcttgtaatgtcataaggtgcgtgaacaagagttgccagacgatcagagtggttcgatgattatcgatattgagtagtaatcgaacttgaagcttaagtgtcgaaagaattcagttggtttaaaattttcaaaccaaaaggagtttctctctgctcaagtggaaggcgataaaaaagccattagtacgcgatttgtttatttacttggcaaagcgctgcacgtgaccttgctagccgtacatatattaggcgcagcatggagccaattggagatctgcaagtgcccagcttcaaggtggtgtccgggggaaccaccttcacgtacgccagtccgaaatccggagcagcctccctcgactttctcgcgcacaccctgcggaaaagggaggcgaacacagaaaaaactattctgatatgtcagcagaatttcgaggccgagcgtctgaaatttgagctcgccgagcgggatgtcaacactattctcctgcccccgcatggggcaatggtcggtcaagtgctgctcctctggtccaagggggtgagtttgaatcggatcactaacattacatcagcggaggttatttatcctctttccagtacatcaaccaagctctaattctctgcgatggcatgctcgagcatcttggagtagtcgaggcgaacctggtgatccacacaacgctgccggaactgaacaagttcgaggagcgtttgaagtggctgagcatatcggcgagaaacgccgagatgttggtcataactccgtgcgacgaagagaatgaaaaagaaggcaagggagagaccgaaccggagatcgtccagcaaagaatgccactcaaagtagatgccctaaattccatgcagctttatgaaataaaggagaatacgccgccgacatcatcggaggattacaaggcggaggcggatgtcctgctaagtgctgcaactccagcgacaatcccaaacgacaataaggagcaagagat

SEQ ID NO: 4802 - DNA, 2395 bp, DROSOPHILA
ccaccttatcaatgtgctgccaccttgcatcgcacgaaattcgctagttttattgaattttgttattgaagaaataccctagcaacaattcgagagtgttgccagccaaagggggggccgacatgctggacaacgacaccagcaacaacaacaactgcaacccacagaatctgccactggacgaactcaagtttgcactttccggcaaggatggggtgcgcaggaacgttccggcgctggacgagcactgggtgcagcgcgagaagccctttgccagctatttgtgcatgttgagctcctatggacgcctaaaatccggagctgcactggaggaatggaccttcgcggcgaacaatttccgtggggacatggagttcctgctgagcctgacgcagcacgaattctggtcctacatggtgtacgatgaatcggccatggcggccgttgtcacattcctgcagcgcgctaatccctactacagacagacagatgtcagccgggacaaggagttggaccaggcccatctgctgtacggacagctgctcgatctcgtcgtgcgtctgataatgcgactgtgcaccggtaaggaatcggactcggagtggattagcccgaagcaacacggcagcctgctgtacagcaactacctgatctctgtgccactgctctttgatctgctcatcgctgttggcgatgcggagccggagaacgtggaactgttgcgccagatcttcgacaaggtgctggaagtgcagccggagtaccaaaaggatctgaaggaggcgctgatcttctacgagagcgctttcctcagcatgcagatccaggtggagaacgagggctgcgaaggtgctggcggcggggcgtctctggacgtcgacttggagacgccctacgacgatgtggtgctcttcgccatggactgcgcatacacgctgcgcctgctgctgctcctctgtccccagctattggaaaccatcgaacagctgcgtttggccccaagcattgccaatttctatgacatgactgtgcccatgttgtacaagaacatctacttggtgaacccgggtgcgagttcgctgcgctggctaaatgagacgcgccagcaatatatcttcatcgttcgtcgcgtggtcagcctgcagatggagtcgggacggggacagcagctggtggaagtgatgcaggagtgcctttccgcccagaacttcgttgtggactaccagcggcagtttccgctggagcacgacatgaagctgctgatccaacgttgcccaaatatcaagaactacgaggtggacttcgtggtgtccggttatcagaaggcactggccagctgccccaacggcataatggccgacgatatggccagtaacggtgtccaagttacggggaacgtccaggacgaggaattcaagaacggcgactcctcgcgcacttctccacagccgtcgccgacggccaacggaacgacaagggacattgacttggaagtcaccgccgtgctggaagtgctgcccgatctgggcagtggcttcataaggcgcctcctcatccgctacgataacagcgagcaggtcattgccgccattctggacgacaatctgccgccggatctagcgcagatggaccgacaggaggtgtacattccgcccgacccgcaggacaaacagcaacgccaaacgggcctgcgacacttcaacgttcacgacggcgatcgctacgacgtgctgacgcgggaccagcccgagtgcattatcaagcagggcaagggattgccgggagcgccacgcaatgcggaacagttgctggacgacaagcgcgacctgaagcagctaaaggagcgctaccagaagtacgccatggtcgaggagaccacgctcgagaggggcgagtatgacgacgagtacgacgacagctacgaggctcaaaacgagggtcaagcgccgcctgtgagtctgctgcgcggaaggctccaggaagccgcctccagttcggcgtacaacgcacaggatgagctggagaacgacgacgaggagagctccggcggccattcggacccggagccgtcgatgcgcaccaacagagacttttgcgagaatccagaggtgatacgcgcccgctacgagcagcgccagttatccaaatacggccaaaagagtggtggacatggagcgagtccctctgtggtcggagcacccaagggccaggggcagtcccagcagacgcagcgcagtcgtggccaaaaggaggcccacaagtccactcgtgccaatcataatcgcaaggcaggagcagccttcaagcgcagcaagggcatgatgggttaggcgcagcgcagctcgatagaggggatttagattgaaataaaattatctaaaattggtgtatctgt

SEQ ID NO: 4803 - protein, 735 aa, DROSOPHILA
MLDNDTSNNNNCNPQNLPLDELKFALSGKDGVRRNVPALDEHWVQREKPFASYLCMLSSYGRLKSGAALEEWTFAANNFRGDMEFLLSLTQHEFWSYMVYDESAMAAVVTFLQRANPYYRQTDVSRDKELDQAHLLYGQLLDLVVRLIMRLCTGKESDSEWISPKQHGSLLYSNYLISVPLLFDLLIAVGDAEPENVELLRQIFDKVLEVQPEYQKDLKEALIFYESAFLSMQIQVENEGCEGAGGGASLDVDLETPYDDVVLFAMDCAYTLRLLLLLCPQLLETIEQLRLAPSIANFYDMTVPMLYKNIYLVNPGASSLRWLNETRQQYIFIVRRVVSLQMESGRGQQLVEVMQECLSAQNFVVDYQRQFPLEHDMKLLIQRCPNIKNYEVDFVVSGYQKALASCPNGIMADDMASNGVQVTGNVQDEEFKNGDSSRTSPQPSPTANGTTRDIDLEVTAVLEVLPDLGSGFIRRLLIRYDNSEQVIAAILDDNLPPDLAQMDRQEVYIPPDPQDKQQRQTGLRHFNVHDGDRYDVLTRDQPECIIKQGKGLPGAPRNAEQLLDDKRDLKQLKERYQKYAMVEETTLERGEYDDEYDDSYEAQNEGQAPPVSLLRGRLQEAASSSAYNAQDELENDDEESSGGHSDPEPSMRTNRDFCENPEVIRARYEQRQLSKYGQKSGGHGASPSVVGAPKGQGQSQQTQRSRGQKEAHKSTRANHNRKAGAAFKRSKGMMG

SEQ ID NO: 4804 - DNA, 6080 bp, DROSOPHILA
agttggacgtaaagtacatgcttatattacgtacaaaaggaagtcaattcaagaagcgccctataatacccctattcaatgtgagttcactttcgttcatgtaaacgtatgtatttaatgattaagctccttttttccagagtcaatccccctcaattgagtgtctgcagcacacatatcacgtgctgcataaatattggctgaacagcaccaaagaccggtcagaagagtcctacagcaaggacaagcagtccttagtgaattcgtagtccttggccatatcgctgaactgttaaagtatttattagagacttaataacatttagacaaacttacttgtaccgtggctgtagtcttttcatcttctggaggtagtggtggtaattgtggaacctttaactcggttttgactatattgaaatcagcacggacctatacgagattatatgtaattgtgaataaagtaaatattgcaaatttgagattttacaattgcagcttaccaaattgttcagttctgatctaaatttctttttgagtacttggcggtaggtttttaggtacgtgtccttgttgctgtttagttccttctggatattttgcaactcgatcaactgctgcagtgaaaagtctgtacataatttgtagtattaatgtatttctataacagtaaagattaattttaatgcgcttactttccatggcgtctgttttttgttttgaaaatgtggctgtgttgaaaagcgtcaatggccttcattacagtaagtatgtgataaaaattaccctttttacgtacgcctgtttcgcatcaatagccaatttgtaaagattatatcttgtatgctcctaggcaattgtttctaagatatatctatgtgtacttttttttataatattttatacaacaaacattaattatttcatgcgatattatttctgttttaggggatgcgcactgtgtatcggctggctgccagtgttgcgaaccgacccacttcccagccctgcccgcctgacgtaatttggcagaaacgacgtatttttgtttatgtgagtccgctccccgcccctcataaagtgagtggccagctgctcgtccaatgaccacctctagttgcggaatttagtatctccttgtcggaatcccacccaggccccgtaggaatccatctgttgctgaccactgaacactgaggcatttcatcaaaagtgagtttccatcagtggagcagttccgagaacagtcattcggctgtgctactcatatggacatgaagctctaatcccgttttctctatccgactgcagttccccgtttctccgggcacacgcaaaatgaatcggtccgaaccgattcccattcgacgggaccgctcttttgacagtgtgatcaaccgcctgctccgtatgaggtcccagaatcatgagagctttcgcgccgccatgtacaatttcctgatcgccgcaggagttgcggcattcgtcgctgtgtgcttcattcttgggcccttcgtccgtccattgctgtgggccttcctcatgggcgccgtgctctttccattcaagcgacgtttggcggagagcgtaaacagttggtttcaccgcttggaggtgcgcgactccaatgtactggtttcgatctgcctatcgccgctggaagccacagagcattgcgggcggttgctgatcgggtggctctgcgaacactggcaactcctcctggccggatgcggagtggccgggtgcattaagctgctggttttatatgcaccgaagggttttctgctggccatctggcattggatcaccttttcccatggcttgttcgttcaaattattggattcctcaacgtatacgtggtaagttccttgtcgatttttcgatggtgaatcataggaaaaaatcttaaaaaaaccagttgatatagaaaagaacgaaaaaacagaacatttttaattgattgcagctcatttccttgatcgtggtctacttgagctgcgtccacttcttttggaggccagagaatagtgcccacttcgtggtcgccggacaatccatgtggatagctgtagcgggctatctgagtagctttcttggcgccctgcaggtgccggtatttctactggttatgacctatgtaacagcatctacggcatatcatctgcaaaccctagatgattcgggatcttatcttcaccgcctgcaaaagttgttcgacaagaacgattttgagcgatcgctaagcaacttcagcatttgtggcagaccaggcaacgagccactgagtccggggctgcagtcggatgtggaggatgtatcgttaagtgacactgtcgactcgacggacacgtttgatgtcaagccagaaacggaggttcccagtcaccagagcgacacattctttaagctccttttttatgcctgcttgggcacattcctctatcgcaacgtgtggatgtttatcctagcggcaatcccagtaattctgcatcttatttacaccgtaggagagtatacgggaattactaaatttgtttgcaacaaaattagcgaagtttacgcagcgctgcgtgtgagttagacataaaattcgtatattatgaatttacattttttatatttatgtttgcagttctgggcaatcgaacaccattctgccgtgctgccactctgtctacctggtgtcctggaactaaactataaaatcaacactatcgtgcgggattcactaaaggcctccgttgaatcagtcacctccatcctaatgatcatcctcatgctgcttatcatcgtgtttctaagcgtgttcttctgcgtgaacatttactcggagacgattgaggtggcttacctgggcaaggatttaattaacaagacgatcacagatcggcctgagctaattgacatcttgcctgccaacatgcaatcgtccatcgaggatgctcttgataacgcacaccattatggtcgccgtaagattgaaacctacatagacgactggctggcagacgccgataaggtgcacgccaccaagttgaaggagcagatcctcgaagtgtgggaccggctcatccagtattggatcgatttcaataaggccggttcatcgtacgggccgcgggtaccaacggatgccctgaaaagcacatttggcgaaatcgtcgacaatccaggtaagcataagttccactccctatggcttctttcaattttctttcctcccgttttattaatacattttttgagttctttttcggggtttccgcatgggtgtccgggctttcgttaagtacttgctcccatcatccatcccgtaacactcgtttgcgtctatgaaataactcatactgtgtgcatctgctaaccgatggccgtttatttaaccaaggacattttaaagagctagttttagtggcaaaacagggcattatcggctgggcgcagagcaatacgcagacgatcctcgaggttgcagagtcgttgtggcacatcatccggaccaacatgtccatgataatgggcgtgaccggggagattctatcccttgtgctttcgggtggacaagcgtgcattgagtttattctagatatggtaagtgtatataaataggcttttaatcaatactaattacttaatcacactttctttagattgtattctttacggctctgttctacctgctctcgagcagtcaggagaagtacgcgcccctgcagatcacaaaatacctgggctattccagctcgggtatcaaaatcgccgatgccctggaaaactccattaccgtagtcctagtctcaatgtttaggtgctccacctttacgggtctgttcacctggttagtccatacggttttcggggcccggattgtgttcctgccgtccgccttggcagctatgttggctgctgctcctttcctaggcagttactggtgtgcggtgccagcctttctagagctttggctggcccaggaccgcttctatgcaggacttatattgttcctgcttcagtttttcgtgccatcatcttttgaaactgctatatatgcggacctcaaagggtaagtacacttttttggtgggataaatggaatttaatatctcatcattttgctaacatttgtcagtggacatccctacctcaacggcctggccatagcaggcggaatgtattggatcggttggcaaggagctattttcggaccccttatgctttgcttcttcatcggcctttttgaggtggccacgctggccatgcgcagtcatcaagagcccaggtaattagactttcccaagccaaattcgatgaatttgtttaatttgcatgcaaagtatgaaccacatcagacttgtgcggcagggattaaagtgagttatttgctggcatgcttatttagatttaaaatcttttataccattgcagaggattttagtaagaagtctacaatgcagggattcactagccatgtccgtctgtccgtcaaggaaaaatttccaaaagttttctttcaatgcagaaacggtccagaaaagaatattttattataccgccgtcaagagtaagagtatataaatactgcaagggtatataagctccggcttgccgaagctacttacttcttccttgttatatcttaatttaatgaaaatcctttgctgaatttcaggaacagtacggacgaggagcggaccacgtgagttggcatggaccagaaactacgaatttccttttaatactcgaactgcgaactaacataagctgtgtggccaaatacctgacaatcaaaatgagattggcccgaatatcataacctagacataggctggagcttcctttaactattgttgttcgtttctcagttgctaatcttaccgctttgcgaacattgatttttatgatattattcaatattccgtctatgcagcaagcgctccttaatatctattctatcgatcttagtgttcttacatacaaaatgtacctcgaattatttgtagtcgcgaaacatttccaaagccttcaagtaccgatatcgtgctcgctactaattgcttaatgtaaaattgtgatgtgtttaaacttagatacaaaatgtcttgcaaatatatttctgtactaactaactaccgctgaatgcaagcttttttgaatttgaaagtggttttccagctcgattcctcgaagggtcaacgaaactgttaacgacagtataataaaaacgaacgataacacggatggaaagtctgtcatagagggaaaacctgttgagctgaaaatcgtaacgaaaaccaagacatttcaactgttgaataccaaagaaaaccagtaaagaatttgtatataaatatcataactacattttatctgtgtataatgaccgaattgcgagtaattactttttttataactgttacaaaataaatggttgcttttctatactttcgacacaaagtaatgttttggaaaagaatttactgcgttcatttgaattctttttatatagctatgccgtttagttcgtgtactgattcttgaaggtaaactcaggatgcctttccacactgtaaacaaaataaaaataaataaataaataaaatagagggattaaagctaagtcatatttttatacccatggaagaatgcaaagtcacagattcgaatattctggtccaggctagacaacttggccacctcctcggccgtcagttcgaaatcgaagacgtccagattctgtttaaggcgagcgggattcgtgctcttgggaatggcggatacaccagtgtcgataatccagcggaggaggacctgcgctggcgtcttgccatggcttgcggcaatctccttcacctcagggatgtccatcaggtccggcagatctctcacgatgcccgctccagcattaaacttggcgattcccttggatcccaacggggagtaggcagttacggtaatgttttcggacttgcagaagtcgaccagatctcgctgctgcaaataaacgtggtgctcaatctggttgttggccggccggatcttgcagttcttcaacagacgggccacctgatccttgctgaag

SEQ ID NO: 4805 - DNA, 3132 bp, DROSOPHILA
cccagccctgcccgcctgacgtaatttggcagaaacgacgtatttttgtttatgtgagtccgctccccgcccctcataaagtgagtggccagctgctcgtccaatgaccacctctagttgcggaatttagtatctccttgtcggaatcccacccaggccccgtaggaatccatctgttgctgaccactgaacactgaggcatttcatcaaaattccccgtttctccgggcacacgcaaaatgaatcggtccgaaccgattcccattcgacgggaccgctcttttgacagtgtgatcaaccgcctgctccgtatgaggtcccagaatcatgagagctttcgcgccgccatgtacaatttcctgatcgccgcaggagttgcggcattcgtcgctgtgtgcttcattcttgggcccttcgtccgtccattgctgtgggccttcctcatgggcgccgtgctctttccattcaagcgacgtttggcggagagcgtaaacagttggtttcaccgcttggaggtgcgcgactccaatgtactggtttcgatctgcctatcgccgctggaagccacagagcattgcgggcggttgctgatcgggtggctctgcgaacactggcaactcctcctggccggatgcggagtggccgggtgcattaagctgctggttttatatgcaccgaagggttttctgctggccatctggcattggatcaccttttcccatggcttgttcgttcaaattattggattcctcaacgtatacgtgctcatttccttgatcgtggtctacttgagctgcgtccacttcttttggaggccagagaatagtgcccacttcgtggtcgccggacaatccatgtggatagctgtagcgggctatctgagtagctttcttggcgccctgcaggtgccggtatttctactggttatgacctatgtaacagcatctacggcatatcatctgcaaaccctagatgattcgggatcttatcttcaccgcctgcaaaagttgttcgacaagaacgattttgagcgatcgctaagcaacttcagcatttgtggcagaccaggcaacgagccactgagtccggggctgcagtcggatgtggaggatgtatcgttaagtgacactgtcgactcgacggacacgtttgatgtcaagccagaaacggaggttcccagtcaccagagcgacacattctttaagctccttttttatgcctgcttgggcacattcctctatcgcaacgtgtggatgtttatcctagcggcaatcccagtaattctgcatcttatttacaccgtaggagagtatacgggaattactaaatttgtttgcaacaaaattagcgaagtttacgcagcgctgcgtttctgggcaatcgaacaccattctgccgtgctgccactctgtctacctggtgtcctggaactaaactataaaatcaacactatcgtgcgggattcactaaaggcctccgttgaatcagtcacctccatcctaatgatcatcctcatgctgcttatcatcgtgtttctaagcgtgttcttctgcgtgaacatttactcggagacgattgaggtggcttacctgggcaaggatttaattaacaagacgatcacagatcggcctgagctaattgacatcttgcctgccaacatgcaatcgtccatcgaggatgctcttgataacgcacaccattatggtcgccgtaagattgaaacctacatagacgactggctggcagacgccgataaggtgcacgccaccaagttgaaggagcagatcctcgaagtgtgggaccggctcatccagtattggatcgatttcaataaggccggttcatcgtacgggccgcgggtaccaacggatgccctgaaaagcacatttggcgaaatcgtcgacaatccagactcatactgtgtgcatctgctaaccgatggccgtttatttaaccaaggacattttaaagagctagttttagtggcaaaacagggcattatcggctgggcgcagagcaatacgcagacgatcctcgaggttgcagagtcgttgtggcacatcatccggaccaacatgtccatgataatgggcgtgaccggggagattctatcccttgtgctttcgggtggacaagcgtgcattgagtttattctagatatgattgtattctttacggctctgttctacctgctctcgagcagtcaggagaagtacgcgcccctgcagatcacaaaatacctgggctattccagctcgggtatcaaaatcgccgatgccctggaaaactccattaccgtagtcctagtctcaatgtttaggtgctccacctttacgggtctgttcacctggttagtccatacggttttcggggcccggattgtgttcctgccgtccgccttggcagctatgttggctgctgctcctttcctaggcagttactggtgtgcggtgccagcctttctagagctttggctggcccaggaccgcttctatgcaggacttatattgttcctgcttcagtttttcgtgccatcatcttttgaaactgctatatatgcggacctcaaaggtggacatccctacctcaacggcctggccatagcaggcggaatgtattggatcggttggcaaggagctattttcggaccccttatgctttgcttcttcatcggcctttttgaggtggccacgctggccatgcgcagtcatcaagagcccaggaacagtacggacgaggagcggaccacgtgagttggcatggaccagaaactacgaatttccttttaatactcgaactgcgaactaacataagctgtgtggccaaatacctgacaatcaaaatgagattggcccgaatatcataacctagacataggctggagcttcctttaactattgttgttcgtttctcagttgctaatcttaccgctttgcgaacattgatttttatgatattattcaatattccgtctatgcagcaagcgctccttaatatctattctatcgatcttagtgttcttacatacaaaatgtacctcgaattatttgtagtcgcgaaacatttccaaagccttcaagtaccgatatcgtgctcgctactaattgcttaatgtaaaattgtgatgtgttt

SEQ ID NO: 4806 - protein, 837 aa, DROSOPHILA
MNRSEPIPIRRDRSFDSVINRLLRMRSQNHESFRAAMYNFLIAAGVAAFVAVCFILGPFVRPLLWAFLMGAVLFPFKRRLAESVNSWFHRLEVRDSNVLVSICLSPLEATEHCGRLLIGWLCEHWQLLLAGCGVAGCIKLLVLYAPKGFLLAIWHWITFSHGLFVQIIGFLNVYVLISLIVVYLSCVHFFWRPENSAHFVVAGQSMWIAVAGYLSSFLGALQVPVFLLVMTYVTASTAYHLQTLDDSGSYLHRLQKLFDKNDFERSLSNFSICGRPGNEPLSPGLQSDVEDVSLSDTVDSTDTFDVKPETEVPSHQSDTFFKLLFYACLGTFLYRNVWMFILAAIPVILHLIYTVGEYTGITKFVCNKISEVYAALRFWAIEHHSAVLPLCLPGVLELNYKINTIVRDSLKASVESVTSILMIILMLLIIVFLSVFFCVNIYSETIEVAYLGKDLINKTITDRPELIDILPANMQSSIEDALDNAHHYGRRKIETYIDDWLADADKVHATKLKEQILEVWDRLIQYWIDFNKAGSSYGPRVPTDALKSTFGEIVDNPDSYCVHLLTDGRLFNQGHFKELVLVAKQGIIGWAQSNTQTILEVAESLWHIIRTNMSMIMGVTGEILSLVLSGGQACIEFILDMIVFFTALFYLLSSSQEKYAPLQITKYLGYSSSGIKIADALENSITVVLVSMFRCSTFTGLFTWLVHTVFGARIVFLPSALAAMLAAAPFLGSYWCAVPAFLELWLAQDRFYAGLILFLLQFFVPSSFETAIYADLKGGHPYLNGLAIAGGMYWIGWQGAIFGPLMLCFFIGLFEVATLAMRSHQEPRNSTDEERTT

SEQ ID NO: 4807 - DNA, 7951 bp, DROSOPHILA
atcgtttttaattcttcttgttccggcctgcgccaaaaatgcagacgaggagcaaagatagaaaaattcacaaatatttccatttaacatttaggtatggcaaaaagtcatcatctatcagttagcaaacattattgacatcaatcaatcatatttgaaatacattcaatcttccactgctacttttttgtttttgagttcttatttgttttgttttgtattgttttcgctttgtttcgtttgttttgtttgaaacgcattttacaaactaaatttaaaacttataaatactacaacgtacgagatccgccaaaatctcatagaatttaagcaaaatgaaacacacaaattacaagttaaataagttaaattaggaattacaggtaaagtatgcagatacagtataatgaatacatcgaatttatatatgtaagaatatcttaaagacgcgacagtttttgtgtgtgctagtaagtggatcgctcaaattcaatagggagaatgcaaacagaaaggtcaacattctttcaacacgcttacgaagattttggagatataatataatggtggcacagtagaacagggaaaagccaaacaaatactctttcccaaaacgcggttaggggttcaataattacatactcgaaaacaataggttactaaatgtaagcttttatgaatcaaatttttacaaagctgatgaataattatttggctgggaaagagtatttcgtacaagtatatgcttaatatcagatgtgtaaaataaaaaagtaatcagcgcttttccctattgcaacggtttgttgtgtatgagcaacattttgtttgtttttccctttttcattgcgtatataaattaacaaatgttaaaaatttaattattacattttcgattgcactttgtttttgcttgttgctgttttgttttttttttttttgcatctgcgtgtaaagttctcttgaattcattttttcgtttgtacatttatttttctttgttccgactgagtgtatatgtgttgtgtgtgtgtttgtatctctttaaaaattaaggctttgtttttgaacaaaaaaatgacaaaaaattgaaggaaaattaacgttagcaacaatcaactgatcacatcgagtaaacgtacgtagatttcacttaaaactactttaaatcagttataatataacaacaaatattagagcaaggggtggggccccaaagctgttgcggctaggttatcaaaaccttaacctgatttcgcaaacgttttgcaagcgtgtgcttctttgtttcgtttttagaatatttacatgaacacgacgaaatgtgctgaagaaatgcagaaaatttcttcacgatcctaccccgcccctttagacaacgcgcagcgtaataacaatatttataatggatacgggatagggcgttgatgcaacaacagatagctcgacttatcaattatcacgcgaaatgcagtattacaaaaaaatatgtttgtataaaattaatcttactcgtattgttaataagattacttttccaattagaaaatttcgttcttctacaaagagcttctagcaagctgttaaacattgatcaccggaaacgttttccctttgtttttcttttgtttctggagccgtctaattcttgaggggatagcggagggcagttaaactgccagcgccatccatcacacacaaaaagtaatcatgcacagatatatatatatatatatatatagcctatatatgctgatgtacacaatcggcgatggccgaaataatagcattgctattgtaacactaggtaacgcgtgttactttggctctcattactcaatatcgtaagaaatagcgttgtgacaaggagcctttttcatataaaaatattatattggcagttcggacactaaattactaatctgaatacatgttagggtaatcgaaaaccgctttactagcttgatgttacgaagaaaagaatttgaaccaaaaaaccttttttgtctgactttcgagtcattctaataaattaatgatactggcatatccagcttaagccttttgacagagcctgcaaagctattatttggaccgcagccgtgtttatatctagagttagagagagttagggctttagagcaagctagaattagagagatagatagctagcctgaggttgagggctcgtttagcggcaatttgatgtgcggctcctactgcgatgtgctgaagttggagggcgaaatggaggccggagccgcctccgcctcgaggcttccagttccatctacgacgtcatgttcacgggaccgactcgtgggaatcggcgcactgctgcccatcattggcggcggcctcaacgtggctgcctgctcgtactccagatccatttcctcctgcaattggatcatctgaacttgcagcgggttgttcttccagtacaagacaggccagcgcaatgtcgtggtcagcgtgtcgttatgctcctccagcgaattgttggcatagtgctccaccagactcttcagcgtggcatatatattgtaaggggcagcaaatccaaagccggtgctcgtctcgtaaataaggcagtgctgcacgatgttcttgcaggcaatggacagagcatagtgacccgcatctctcgctcgaatcaggaaggtgcccgatggcgcccccttaagcatctcctccgcattccttctcttggcatcctttagcaaccagagagcttcgttgctgtgcggctggttggagactgtctcataaagttgctgccacttgtcgaagcccatctgcaatatcatcttcagatcgtcgtccttgaggttgaatccttttaggcgcctacaggtataaggaagaagaatggatcagaaattagaagtgctaaaatattttaatatttccgagtgtgtttggcattacaaacgaatctcgaccaatacacgataatttgaacccatttgggatattaactagtattgaaagtgacagtcttttgacagtaagacagttcaaactcaacacctgttgaatatgtaatatgaattttcccaattatatgaaactcaattttatgcttttggtgtacgtgactttataggcgtggctaatctgcaccaaattataaaatcgaatctatgtaggtgcctcctgagcctttgctaatgactggcatcgatttagaactgatactgatactgatggctcagtaaccccatgcaatttcaactgacgacgaaactcttgataaccaaatacgactgcgtattttggccgccgctcggtctacgaaagtgtagactcgcgggtttccgcatcacgatcgggcgatcaggcaatcgggccataaggggggcttctttgttgcctgactatccaagtgactaagttgctgagacgcgataagcacacggcagggtgatatcatggatcactgcagcgatggaatcaagttaggacaacgcacaagaacttaaggcactcggcgaaagacctttatctaatcagagcttgggctcaaattggaaggggaagacactcggagtgttttatcttatgacggtggtcgcctaatctctgcaaatttaaagacacaagagctaaaaaccttgagattgcaaaaagcagccctgaataatacacagatacacaggcgcaattaggtggtatatagaaaggaagaagcttgaaaaaagtacgtctgataagcgttgctatctttagcgaggtgctaaccttatctagaggcctccttgcctcctaccagttggcacttccccaagctgtcacttgtgctgaaacactctgggtgattctcatagaaaccaagtaagctcatccaacgatgacgtaccccgccaagcataaaggcctgttgctaggcgaaagtcaccttttgcttttcgtttttcgccctacaaccgaacggccgcagattgtgggaagtgcgaagatgggtcaaaagaaacgaataatcactacaattaaaggggaagcatcccccattggttaactcgagtcaaattcaaggctttagttgatattgcaaagcagaatattcttgaatcctgggcgaaatttcagggactagtattcctcactaatcgacttatatttttgctgggatagagatcggcttacaatcatgtatattaactgcttatttagttaattcagccttaatgtgacctggatacacaaacacacagaaaaactgaaggcatatccacgaatctttcgataagtggttttcttaatatttaaaagaaattcctcaacgtttgggtggaattcaaaattaccgccatatacactgaccttgataaggagaaatatatatgaacttctgcgcatacaaataaaaattgatccgataaacacttcgacttggataacaaaatccaagactctcctattcagaagataagcggcaaagaggtatcccaacgttccagttcggagggggttattgttttccctttagcagggaatttatctgcttttatgttcgcgaactacatttcactttgcagtagcaaataactgaaatggttttccgaaaataagctcgctcgcttggctagaaaatcgcaggccagggaatgaatggcaaggcacgtagacgcctcgctggcgtgaaaaattcaagagttagcggggcgggggaggaagtggtcgccgttaacagtgttatgccattattatcggtatcatatcggtcagacaagctgccgactctcggccagaatgagtgatcggccgactgagccgcatgtgaaacaaacgagaaccgttgaaaggcttttaaattccaacccttcctagctgaaaactccaaacttcaatcaaacagctggctagtgaaaagcattcccagatattaattactatatattgcattactattgatagctaaaagtagttgcaaggacttcaaatcgggacttactcaatgtacttgtccttgcgcaactgcagtatctgtaattccggcttcagggcgttgatctgtcgctcgagcagtagctcctccttcttcttgttctccatgtagtggttaaggacttgacccttggcctgaagagcatccagcagattgaggagtgtctgcttgtgctcctgcagactccggcgagcgttggcattggccgctgcggatgcggctgcgttagctccatctccagctcctcctgcctccgtggacggggcatccgctggcgccttcatgaaggattcattgagcttgatttgattgcggaatatcttctctgtattcccgaatacgctctggtgcagcttcttctcctgcagctcctctcgaatcgcattgaatgagttgcgcttattctcgagattttgctcaagattctgaagcagctggcaggtcctgatgaattcgttgctcagcagacaaagatccccgtgcggctgcgactcctcatcctcgcgggctcgcacaatcggattactcagtgttatgtccagcgtcttgttgtacatgctcagagagttctccttgtagtagttgatcatctccaccaccgaattgaacaggtccgtctcgataaagccgtacttgcgatccatgtggcatatctttattagcttctcgcatccgtccttcatcagggtcagagtgtactcgcccttcatcgagagggcgtcccgcaccaaaaagctgccgtccggctttccgtgcaggatgctcttggcttcctccctcgatatccggccccagtaccatggggccatgcgtagctcgtcctcgttgggatcgaccagcgatccgggcgcctgtggccgcatcgtcgagtagtggagcggggagggttgcactgcacaataagaattaatttaaaatttaaaaaaattatttaaaatattgataaagtatttcatgtaaattccctatcttatatgtatgcaattttatctattttttaaactaaattttagtttacaagtgtaaaaacaaatataacattgggtttacattgaaaatttccttttctgttaataatcgcaattcctgttagaaaatgaaaacaaatgaatagattgcagttcctcaagctaataaattatccagaatgttaagagtatctacataaagtgatctcatctgattgtcccaatcctaaaacgacattatattgaggcatttaataactctaatttgaaacataaacagctgaaaaaggagaatctctagtgaaatcgaagtcttggcaatgagcctttatttcgttatttgagggacccaatccattaataaatattggccaaatattgcgccccaccagaagcgaaaacaacaactctgtgtaaaaacgaggcatgtaatcgctggcgtcccggtctctatctagccttctcgctcccgcccccaggcaccccgctagcgacctctcgcttcaacgcactcgggcctgttgccaagcgcccccgaaacgcaaatacttacttttgtgggtcttgtggggttttcaatgggtcgcaattctggcgctgcggatgctgcagcggcgaaagaatcaatggatatagatctggaactggatctggatttcgggctgcggactactcgccccccgttcgcgatatcgctatagctatagctcaccaccagcgaatggagcacatctttctatattctcgatttcgcgattcgacggaacactcacactagcagccgcacgcacacacgcaccaacacaaacgcataagacggacactacgacacactgtttaaaaaaaaatggttcgcttttgattcttattttcgtggttttacccactcattggttcttttaattggcgtgcaattgtttcagttgtagctggatcaaaacattcccgtgcggagcttttggacgacagaaattggggtttaatcacaatatatcagcacaccattattttcgggtagaaatcgtgcggtgttgaacagcgctgttgttgccatgccacttgctgcgagtgagctgcagggcctttgtagcactggcggcttgcagtgttgagcaagacgaaactacgtatcggttggatataataacgtaagcgcgggaaacagggctgcccaagaatacaaaatatttcacacattataattacaaaaaggttggccaggttgttgcttttaatcattttaatttcacaacttaattcattcgaaattatattttttcaaaataaagatttgcagtctatgcttttttccgaaaatatgcgattttgcattataataacatttaaatttcttatttaaaaggcgattggcgcaaatcattctttgtataaatataaaatatattctaaataatttggcagccctggaaaaacgttagagaacgactgctaagccgtaagttacccatcttgtagcccttgggcgccaaattcaaaatcatagcttacccttccgtgactcgtttattgtacaaacagaaacttattttagagctaagctacagcatatttattgtagtaagaaaataaggaccatgacgtttggagcctactccacccgtctgcgtaaatcaattaggcagacatttatcaatgattttgttttctccttttagtttaaatttctgttaatggtagttatcgtcgttctgcgaataggcgatgtgatttcttaggtaattacgtttagcattaattgtggcccgtttcatcaaaaacgatatattggttaaccagcttagagacgccataataatgcgtaatggttctctcctgaatgtttatcaatggggtttgtgtgtgagttagtgattgtatgaggatgttcgtttgtggatctggagtgcctagtgaatctgaatgatgcccgactccagcagtttcattatcttatcggcgatggcaggattctgcaagtgtctgaaatatagaggttgttaattaaaatatagtatacaggttgttaataata

SEQ ID NO: 4808 - DNA, 3215 bp, DROSOPHILA
acaccgcacgatttctacccgaaaataatggtgtgctgatatattgtgattaaaccccaatttctgtcgtccaaaagctccgcacgggaatgttttgatccagctacaactgaaacaattgcacgccaattaaaagaaccaatgagtgggtaaaaccacgaaaataagaatcaaaagcgaaccatttttttttaaacagtgtgtcgtagtgtccgtcttatgcgtttgtgttggtgcgtgtgtgcgtgcggctgctagtgtgagtgttccgtcgaatcgcgaaatcgagaatatagaaagatgtgctccattcgctggtggtgagctatagctatagcgatatcgcgaacggggggcgagtagtccgcagcccgaaatccagatccagttccagatctatatccattgattctttcgccgctgcagcatccgcagcgccagaattgcgacccattgaaaaccccacaagacccacaaaatgcaaccctccccgctccactactcgacgatgcggccacaggcgcccggatcgctggtcgatcccaacgaggacgagctacgcatggccccatggtactggggccggatatcgagggaggaagccaagagcatcctgcacggaaagccggacggcagctttttggtgcgggacgccctctcgatgaagggcgagtacactctgaccctgatgaaggacggatgcgagaagctaataaagatatgccacatggatcgcaagtacggctttatcgagacggacctgttcaattcggtggtggagatgatcaactactacaaggagaactctctgagcatgtacaacaagacgctggacataacactgagtaatccgattgtgcgagcccgcgaggatgaggagtcgcagccgcacggggatctttgtctgctgagcaacgaattcatcaggacctgccagctgcttcagaatcttgagcaaaatctcgagaataagcgcaactcattcaatgcgattcgagaggagctgcaggagaagaagctgcaccagagcgtattcgggaatacagagaagatattccgcaatcaaatcaagctcaatgaatccttcatgaaggcgccagcggatgccccgtccacggaggcaggaggagctggagatggagctaacgcagccgcatccgcagcggccaatgccaacgctcgccggagtctgcaggagcacaagcagacactcctcaatctgctggatgctcttcaggccaagggtcaagtccttaaccactacatggagaacaagaagaaggaggagctactgctcgagcgacagatcaacgccctgaagccggaattacagatactgcagttgcgcaaggacaagtacattgagcgcctaaaaggattcaacctcaaggacgacgatctgaagatgatattgcagatgggcttcgacaagtggcagcaactttatgagacagtctccaaccagccgcacagcaacgaagctctctggttgctaaaggatgccaagagaaggaatgcggaggagatgcttaagggggcgccatcgggcaccttcctgattcgagcgagagatgcgggtcactatgctctgtccattgcctgcaagaacatcgtgcagcactgccttatttacgagacgagcaccggctttggatttgctgccccttacaatatatatgccacgctgaagagtctggtggagcactatgccaacaattcgctggaggagcataacgacacgctgaccacgacattgcgctggcctgtcttgtactggaagaacaacccgctgcaagttcagatgatccaattgcaggaggaaatggatctggagtacgagcaggcagccacgttgaggccgccgccaatgatgggcagcagtgcgccgattcccacgagtcggtcccgtgaacatgacgtcgtagatggaactggaagcctcgaggcggaggcggctccggcctccatttcgccctccaacttcagcacatcgcagtaggagccgcacatcaaattgccgctaaacgagccctcaacctcaggctagctatctatctctctaattctagcttgctctaaagccctaactctctctaactctagatataaacacggctgcggtccaaataatagctttgcaggctctgtcaaaaggcttaagctggatatgccagtatcattaatttattagaatgactcgaaagtcagacaaaaaaggttttttggttcaaattcttttcttcgtaacatcaagctagtaaagcggttttcgattaccctaacatgtattcagattagtaatttagtgtccgaactgccaatataatatttttatatgaaaaaggctccttgtcacaacgctatttcttacgatattgagtaatgagagccaaagtaacacgcgttacctagtgttacaatagcaatgctattatttcggccatcgccgattgtgtacatcagcatatataggctatatatatatatatatatatatctgtgcatgattactttttgtgtgtgatggatggcgctggcagtttaactgccctccgctatcccctcaagaattagacggctccagaaacaaaagaaaaacaaagggaaaacgtttccggtgatcaatgtttaacagcttgctagaagctctttgtagaagaacgaaattttctaattggaaaagtaatcttattaacaatacgagtaagattaattttatacaaacatatttttttgtaatactgcatttcgcgtgataattgataagtcgagctatctgttgttgcatcaacgccctatcccgtatccattataaatattgttattacgctgcgcgttgtctaaaggggcggggtaggatcgtgaagaaattttctgcatttcttcagcacatttcgtcgtgttcatgtaaatattctaaaaacgaaacaaagaagcacacgcttgcaaaacgtttgcgaaatcaggttaaggttttgataacctagccgcaacagctttggggccccaccccttgctctaatatttgttgttatattataactgatttaaagtagttttaagtgaaatctacgtacgtttactcgatgtgatcagttgattgttgctaacgttaattttccttcaattttttgtcatttttttgttcaaaaacaaagccttaatttttaaagagatacaaacacacacacaacacatatacactcagtcggaac

SEQ ID NO: 4809 - protein, 496 aa, DROSOPHILA
MRPQAPGSLVDPNEDELRMAPWYWGRISREEAKSILHGKPDGSFLVRDALSMKGEYTLTLMKDGCEKLIKICHMDRKYGFIETDLFNSVVEMINYYKENSLSMYNKTLDITLSNPIVRAREDEESQPHGDLCLLSNEFIRTCQLLQNLEQNLENKRNSFNAIREELQEKKLHQSVFGNTEKIFRNQIKLNESFMKAPADAPSTEAGGAGDGANAAASAAANANARRSLQEHKQTLLNLLDALQAKGQVLNHYMENKKKEELLLERQINALKPELQILQLRKDKYIERLKGFNLKDDDLKMILQMGFDKWQQLYETVSNQPHSNEALWLLKDAKRRNAEEMLKGAPSGTFLIRARDAGHYALSIACKNIVQHCLIYETSTGFGFAAPYNIYATLKSLVEHYANNSLEEHNDTLTTTLRWPVLYWKNNPLQVQMIQLQEEMDLEYEQAATLRPPPMMGSSAPIPTSRSREHDVVDGTGSLEAEAAPASISPSNFSTSQ

SEQ ID NO: 4810 - DNA, 4956 bp, DROSOPHILA
gtcgatcttgttgaggcactcccggaacgcttcgctagccaccgaaagcgtggggctctgaagtcgttggttgagcaactccacctggctgaagtagtgcagacggcgttgaatctcgtgactcagctcctgcagtcgctcctgctcctcgatcaactgctcgctggccgtgttcagagcgctggtcttttgcgacacaaagtcgtactcgtcgcagagggcacccaggcgctccatggccccagcgatctggtccagcatgtgggagcactccgctttgcgctgctccagctgctgcaggtatttgtggtagtcggcatcgccacgttgctcgatctcggcgctgacgtccgcgaaccaaagcagaaactcattggtgttctggagtccctccgcaggtagtctgatgtcatcgccgctttgcgaagttgcagctgccgatgaatcggtaggacccacctgggtgggcgtagtcggtgccggtgcctacaaagagtcgggttgcaattatacgattgccattcgaggaggagtcgactcaccgatggtccgctgtcgcgccacagattggtcaggacgtccaggtgctcctcttgctggatactcagagccgccagcgggtccgttttggactcccattgcatcaggcgattgcgaatcttgcgcaaattctcattctcgctctgaattcgttcgacgtcatccatttttctgcggcggatttggaaacaatcaatcagctgttcagagatgaccggtctgcgccttccagtgctgctcagcaaggagacttagctagaactaaaactcttgattgatataagttgcctttatttgaatggtatcatatgttaagtaatctttaattttagatttaatacattttaagctctttttatgctcgtccgtttcttacataagttttatattaaatatctgtctgtttagcttggcgattacttagccaagatttcaccactgacgggacgttttccatcactggcagcatcaataaagttctgttctctattgtttttattgcattttgatcagtttttccgcatcatatagcatacgatggcgccgcagccagtggttacggggctatctccgaaggagggtcctcctggcacccgcgttatcattcgcggcgagttcctgggcacccgagtgcaagatctaattggtaggcgtagcctgtcccaaatagcttctgttttctgatgactttcccttccaaaaaaaaaaaatgtaaggtctaaaaatctgcggttcagattgtctgctgtcggcggagtggaaatcacccaataaaatcatcgcacgcactggtccggcgaagggaaaaggcgatatcatagtgaccactttaagcggcggagtgggcacgtccacggttcagtttcgtgcataccacgagaccattggcccgctcaaggagtccgccgtgtggatcgaggagtcgccctcgcagaattttgcctggggtcggcgcaccctagcccaatccggactgacgcaggaggatccacttgggctgtccatcgagggtaacgagcagaagatccccgaggacctccgcgatctctttcccgaagcctgcggggatctgtcgcaggagcacttctccccggcctggttcctgcttgaaaatcacctggccacctccttcgaggatctcaaggcgggcctgtcctacttgaagcggaaagtggagagccagaaggaaggtcagttgtccttcctcaagtccaatgcaggctcggtgattgaccagctcgatacgctgatgaacatccgagacaagctgcaggaggatgtcaagctacacggcaatgagaccctaaatatcttggaaacatccatagagagtgagtggggtttatagattaagatatttaattctaaaattgttcgacttatagactccattagcgaatcgcaaaagatattcacggatgtgctggtgcgcaaagagaaggcggattccacgcggtccgttctgttcgccctgtcgcggcacaagttcctcttctgtctgcccaattcggtggacagacgtgccaaggcgggtgaatatgacattgtggttaacgactactcgcgcgccaagaacctctttggcaagacggagattcccattttccgcaaggtgctcgaggaggtcgaccacaggattctgtcaataaggaaacaactgcacgagaaggtggtcaagatgccacagagcgtggagcaacagaagaagctcatcaaggcgctgatcagtctggaactgcagcagagcggaactcccattggcgataaactgcgcaacatcgatcccgcctgggatgccatcgaggccagagccaaatatctggagtggacatttcgccagacatttgatcagcacaccagcaaggattcgggtgcccaggaaaaggcaaagaacagggattccagccaggcgcccaatcgggttaacttctgcgaagaactgtgcgacattgccgcctcccagctgccggacttgtggcgtctgggccagctatacttcaccggcgagctacgcggacctcatgatcccaagccaggggatttcaagcgaatggttttgaacgccatcgagaagttctgtgtctacttgaggttggccattctcattgccacggatcagcgcgccctgcgtcagtccagcggcttggcttggcccatcggctccgcatcggcaacacatcagtttctaccctggattccgcagtgcctgcgtttcacgaggatagcctatgccacgctcatcagcctggatctgccctcggaagcgctggacatcatacagaaactgatcgatgaggtgcgacttttctgcttctcaattatcttcaaacgggccacggatcggtgcaaaaagctgggcagccaggagacctgggaactgggcgtggaggaatatccaggtgccacattgttacccgccgccttggaaacattgctcatcgaaacgctggacgaggtgcaatctgtgtgcatgcaaagggagacccgggagggcaatctcctcgagccgcagtcggatggacagagagaggtgacacagcgactacaagaattcctatccgcgtttagcgcggtgatcgaggagctggccttccactcccacgacgaggagacgcccacccacaatgtgtcgcagctacttggattccccaatgcccagcagccagattcggtggctggaagcggcggagcagcggctgtgacctgggagcagcgcatgctctgttgcctggccaactatgcgtactgcaacaagatcttcttcccgcgccttggtgacatcttcgttcgctacggttacccgctgcccacgctggcaatcgaaactgctcgctacacggttaaccagctctttaccaatcttctggaggagtacgtcgagcataagggcgatccgctggtcggcaccatcgagccctccatgtatctgggtcgtttccagtgggatcacgagatggagatcggccagctgcgtccttacgctcacgagtgctgcgataatttggttggtgtctactccgagatctacagcatttcaccggcactgctgcgacccatcctggagtccattgtgcaaaccatatccgaagagctggcccgtctgatgagctgtgtccagcgctttagcttcacgggagcgattcaggcccacgtggatatccgtctattgagggactccctggaaggttacgtcaatgagactgccaagtgagtgatctaaatgaaatacctatgaatttcaataattcttctaatctgcaaaaggaactacttcatggaagcgctggaggccatcaatccgcccctgagtggcgagcagaagcgtaaggcggacgagattctggagcgggtcaagcggaacatgcgtctgcagctgctctgcttcagtgtcaaggacccctaggcacattccactgcagggcgcagcccatgtagatagcgtatactttaagtagcttgtgattacccatgttctagggataaatctttattcgattgcataactctcttacttactaccacgactcacaagcccaacagctttgggtcaaagttgaagttgttctgagccatggtcttgatgacctgctccacatcgatggtgttgaacttctcctgcacacgctgcttgatggggttctcgatggcgtccatgatctggtagcgcagcaggttgggaatgacgttcaccgcaaactccatgacgtagtccagcgttcccgctccgtcacatcgcacctgtatgttgcccatgtcaaactgcagatcggtgatctgcgcccgcttgcgtgtgtccagggattggctcaggccaacggtggcgcgtatgtgctgaaccgtaaattgtacgtgaccgacgcgtgtcatcatgcccacacccacctcccactggccggctcccgtcacctgctgggtgcctatttgcagaacgaccgacaccgttttgttggccatgccagcggttatgttgcccacgcggtagaagctagagattccattgatccaggtgtgtgctaactggacactgaacacgcccatggtgcgattgacatcaggcaggtggtacggatcgaagcccttctgccgaaccatcttgcgtgccatggcaatggcgctgtccagcggcgttatggaattgggcagtcggcgttcgcccaaggttttctggatcattacgttgatctcgctgcgcagctttttgtccgcctcctggagcataaatggcttcatggcgtcgaagaccaagttgggcgcaccgttcaccacgctctgaaagacactgcccaccaggccgaggttctggaagtccattgtcatgtccgagaatgtgatgtcgatcttgatgcggtccgtggccagctgaccgtctcgttcgacggccaagaaggcggttgcctcggcatagacattcttcag

SEQ ID NO: 4811 - DNA, 2775 bp, DROSOPHILA
tggcagcatcaataaagttctgttctctattgtttttattgcattttgatcagtttttccgcatcatatagcatacgatggcgccgcagccagtggttacggggctatctccgaaggagggtcctcctggcacccgcgttatcattcgcggcgagttcctgggcacccgagtgcaagatctaattggtctaaaaatctgcggttcagattgtctgctgtcggcggagtggaaatcacccaataaaatcatcgcacgcactggtccggcgaagggaaaaggcgatatcatagtgaccactttaagcggcggagtgggcacgtccacggttcagtttcgtgcataccacgagaccattggcccgctcaaggagtccgccgtgtggatcgaggagtcgccctcgcagaattttgcctggggtcggcgcaccctagcccaatccggactgacgcaggaggatccacttgggctgtccatcgagggtaacgagcagaagatccccgaggacctccgcgatctctttcccgaagcctgcggggatctgtcgcaggagcacttctccccggcctggttcctgcttgaaaatcacctggccacctccttcgaggatctcaaggcgggcctgtcctacttgaagcggaaagtggagagccagaaggaaggtcagttgtccttcctcaagtccaatgcaggctcggtgattgaccagctcgatacgctgatgaacatccgagacaagctgcaggaggatgtcaagctacacggcaatgagaccctaaatatcttggaaacatccatagagaactccattagcgaatcgcaaaagatattcacggatgtgctggtgcgcaaagagaaggcggattccacgcggtccgttctgttcgccctgtcgcggcacaagttcctcttctgtctgcccaattcggtggacagacgtgccaaggcgggtgaatatgacattgtggttaacgactactcgcgcgccaagaacctctttggcaagacggagattcccattttccgcaaggtgctcgaggaggtcgaccacaggattctgtcaataaggaaacaactgcacgagaaggtggtcaagatgccacagagcgtggagcaacagaagaagctcatcaaggcgctgatcagtctggaactgcagcagagcggaactcccattggcgataaactgcgcaacatcgatcccgcctgggatgccatcgaggccagagccaaatatctggagtggacatttcgccagacatttgatcagcacaccagcaaggattcgggtgcccaggaaaaggcaaagaacagggattccagccaggcgcccaatcgggttaacttctgcgaagaactgtgcgacattgccgcctcccagctgccggacttgtggcgtctgggccagctatacttcaccggcgagctacgcggacctcatgatcccaagccaggggatttcaagcgaatggttttgaacgccatcgagaagttctgtgtctacttgaggttggccattctcattgccacggatcagcgcgccctgcgtcagtccagcggcttggcttggcccatcggctccgcatcggcaacacatcagtttctaccctggattccgcagtgcctgcgtttcacgaggatagcctatgccacgctcatcagcctggatctgccctcggaagcgctggacatcatacagaaactgatcgatgaggtgcgacttttctgcttctcaattatcttcaaacgggccacggatcggtgcaaaaagctgggcagccaggagacctgggaactgggcgtggaggaatatccaggtgccacattgttacccgccgccttggaaacattgctcatcgaaacgctggacgaggtgcaatctgtgtgcatgcaaagggagacccgggagggcaatctcctcgagccgcagtcggatggacagagagaggtgacacagcgactacaagaattcctatccgcgtttagcgcggtgatcgaggagctggccttccactcccacgacgaggagacgcccacccacaatgtgtcgcagctacttggattccccaatgcccagcagccagattcggtggctggaagcggcggagcagcggctgtgacctgggagcagcgcatgctctgttgcctggccaactatgcgtactgcaacaagatcttcttcccgcgccttggtgacatcttcgttcgctacggttacccgctgcccacgctggcaatcgaaactgctcgctacacggttaaccagctctttaccaatcttctggaggagtacgtcgagcataagggcgatccgctggtcggcaccatcgagccctccatgtatctgggtcgtttccagtgggatcacgagatggagatcggccagctgcgtccttacgctcacgagtgctgcgataatttggttggtgtctactccgagatctacagcatttcaccggcactgctgcgacccatcctggagtccattgtgcaaaccatatccgaagagctggcccgtctgatgagctgtgtccagcgctttagcttcacgggagcgattcaggcccacgtggatatccgtctattgagggactccctggaaggttacgtcaatgagactgccaagaactacttcatggaagcgctggaggccatcaatccgcccctgagtggcgagcagaagcgtaaggcggacgagattctggagcgggtcaagcggaacatgcgtctgcagctgctctgcttcagtgtcaaggacccctaggcacattccactg

SEQ ID NO: 4812 - protein, 894 aa, DROSOPHILA
MAPQPVVTGLSPKEGPPGTRVIIRGEFLGTRVQDLIGLKICGSDCLLSAEWKSPNKIIARTGPAKGKGDIIVTTLSGGVGTSTVQFRAYHETIGPLKESAVWIEESPSQNFAWGRRTLAQSGLTQEDPLGLSIEGNEQKIPEDLRDLFPEACGDLSQEHFSPAWFLLENHLATSFEDLKAGLSYLKRKVESQKEGQLSFLKSNAGSVIDQLDTLMNIRDKLQEDVKLHGNETLNILETSIENSISESQKIFTDVLVRKEKADSTRSVLFALSRHKFLFCLPNSVDRRAKAGEYDIVVNDYSRAKNLFGKTEIPIFRKVLEEVDHRILSIRKQLHEKVVKMPQSVEQQKKLIKALISLELQQSGTPIGDKLRNIDPAWDAIEARAKYLEWTFRQTFDQHTSKDSGAQEKAKNRDSSQAPNRVNFCEELCDIAASQLPDLWRLGQLYFTGELRGPHDPKPGDFKRMVLNAIEKFCVYLRLAILIATDQRALRQSSGLAWPIGSASATHQFLPWIPQCLRFTRIAYATLISLDLPSEALDIIQKLIDEVRLFCFSIIFKRATDRCKKLGSQETWELGVEEYPGATLLPAALETLLIETLDEVQSVCMQRETREGNLLEPQSDGQREVTQRLQEFLSAFSAVIEELAFHSHDEETPTHNVSQLLGFPNAQQPDSVAGSGGAAAVTWEQRMLCCLANYAYCNKIFFPRLGDIFVRYGYPLPTLAIETARYTVNQLFTNLLEEYVEHKGDPLVGTIEPSMYLGRFQWDHEMEIGQLRPYAHECCDNLVGVYSEIYSISPALLRPILESIVQTISEELARLMSCVQRFSFTGAIQAHVDIRLLRDSLEGYVNETAKNYFMEALEAINPPLSGEQKRKADEILERVKRNMRLQLLCFSVKDP

SEQ ID NO: 4813 - DNA, 3409 bp, DROSOPHILA
gtgcacggtgtactcctggttaatggagcactcaatgtcgtgcagcgctgtagcttctcctccgctggaggactgccttgcggaccggtccagaggacgcacaaagtccggcgaaaaggagaaggcggcgcagcgcatatacacgcccagagtgattaccaccacagccactgtgaggacaagcagcacggcttttaggttcagtcgcatgatgaaaaagaccagtggctcgcgttgctaaagaaaattctaagattagccaactgataacacgacgaaatagacattgttacctttaccccttggaatttaggtggctcccggttttccctgcttactggaagcgcgggtgcggaaagggcatctctctgactgcttagatatttggacattcggttgggggcgaactctctaactggcttctaggtgagtcatgctctaaatttaaaactgcattcatctggcagatgcattgctgacgatgataatggtgcaccagtacgcgtacgtctctttcactgtctctgtctaaaattccacctgccgagcctgtagccctctgagttcagtccagggccatccaaagttgatatttcaagtgcatccagttctcactaagcatattttgcttagatttgcgctgctcttctcgctttaatgggcgaacactgcgaaaacacagaaactgcgatacagatgagcaaatgttttgacatatgacaaatggtcgctcttgggcggcctatgcacgtaagctatcgataacaagcattaaccgtgtgcatcgttacttctgtagctaagtaatttaaatagtttaattttcgagtttaaatagtttatattcctcctttggttgaaaatgaacttttatttataaattcattggtattttcaaatgttcccatacgcatgctgacaactatcgacgaaccgatagcatcaacacgacggcgattaatcaatagtgcaatgtttacaaaatatttcgggtggatgtcggtgagaaggcgcgtttaactagttttagtaatgtctagtcgtagtttaagtgcaatagtcttgctccttggggcgttagtgaccgcctgcctcgcctccaacggcgaccgcacacagttttttcacaattgccgacagaactgcgagcgaacgaactgctcggcaggtgagaagtgctatccactttaattgcaagtcttaagagcaagcttccattggcagatggactggagatccaggagcaggcagtcaagttttaccagcagtcggtgtttgaccggctcttccagtggagctgcgcggacgagtgtcagtatggatgcatgtggcgaacggtgttcgccttctttgaacgcggttggccgattccccagttctacggcaagtggccctttctccgcctgctgggcatgcaggagccggcctcagttatcttctcctgcctgaattttgtcgttcacctgcgcttgttacgcaagttccgccgagaagtgcgtccggacagtccctgctatatgctgacccacatattcgcagtggtatgcctttatttacacgatcagccaataaagtcgttatactaagttccctcgatccttactcttccagacgagtctcaacggctggatctggtccgccatctttcacacaagggactttccactgaccgagctgctggactacgcctttgcctattccatcatcttgtgctcactttacgtcatggtcatgcggatgctgcaccgctactcgctgttcctacggggtgttatcacgttggcattcctctcctactacattaactactttgcctacctgagcgtgggacggttcaactatgcgttcaacatgatggtaaacgtggctacgggagttatagcggcagtgggatggttcgtttggtgtcactttgtgcgcacccgcaggccctactttagaaggatcctgcgtttctatattctcatggcgttggctatgagccttgaactgcttgactttccgcccatcctctggattctggatgctcatgctctgtggcacttggcaacaattcctctggcatccctatactatgagtgcgtagaaatattactttattctaatattgctacatgtgtttgcattttagcttcatgatagaggactgtcgaaccctgcgaaaggagaaggctgcggcgggcggctattcattctacaattagtattatctaagttattcttagcccttaaagcacgcaaagctatctggcaatttttctgacatatttcatgtaatttgtaacagagcgaaaacatgtaatgtattttattgaatgtcaaagcgaaaacatcctttgacagtaaccagaacggcaggaaaactaatagcttcgtttaaaaagacataatagagactttattacaacatttagaactccgtgctacatttgcccgcactgcgaaatggtcactgggagcttcggcttgttattggggcccgtgggcacgttctcgatcttgcgcatgatgagcagtccatccagaacccgaccgaacaccacgtgctttccgtctaaaaagttgcacttggcgcaggtgataaagaattggcagccgttcgtctccttgccactgtttgccatggaaaggaggccgggcgagtcgtgcttcagggtaaagttctcgtcgccgaaggtgttgccgtatatgctggtcacgccggtgccgtcgccctgcacaaagtcgccgccctggatcatgaagtccttgatcacccgatggaaactggcgcctttgtagccaatgggaacgccatccggtcggtactcgcccgtgcagaactgccggaagttttccgccgtgcggggcactgtgtccgcaaagagttcgaatatcattcgtccgatttcctgcacacaaaaggcgttagaaggcggagttatgtacagattatgactagattgttttcagctcaccgttgtgcctacggcaatgtcgaagaaaacgacgggattgttggagcttctcagttgggactgtatttgattccagttaggcattttaaaattattttatttgtttataaactttctaacaagtcaagattaagattttactaagccggcagatttttgtttatgtttattacgatggttcgatgacgatgcacgacaagtcgatagcatcacaagccggttatatcgatagcacacgtgtgccaagtgcttgtttatattttgctgtgcacatattggtgaaactatttaataatatttattaaggtgagtttatttatgattggattgattgatgagtagagtgcataaaatagtgcataaatattattattgttggatattgtttcggcattatttttagttgtttatttttattggcaagtttctcaaggcctgcaaaatatgtatgc

SEQ ID NO: 4814 - DNA, 1283 bp, DROSOPHILA
cggtgagaaggcgcgtttaactagttttagtaatgtctagtcgtagtttaagtgcaatagtcttgctccttggggcgttagtgaccgcctgcctcgcctccaacggcgaccgcacacagttttttcacaattgccgacagaactgcgagcgaacgaactgctcggcagatggactggagatccaggagcaggcagtcaagttttaccagcagtcggtgtttgaccggctcttccagtggagctgcgcggacgagtgtcagtatggatgcatgtggcgaacggtgttcgccttctttgaacgcggttggccgattccccagttctacggcaagtggccctttctccgcctgctgggcatgcaggagccggcctcagttatcttctcctgcctgaattttgtcgttcacctgcgcttgttacgcaagttccgccgagaagtgcgtccggacagtccctgctatatgctgacccacatattcgcagtgacgagtctcaacggctggatctggtccgccatctttcacacaagggactttccactgaccgagctgctggactacgcctttgcctattccatcatcttgtgctcactttacgtcatggtcatgcggatgctgcaccgctactcgctgttcctacggggtgttatcacgttggcattcctctcctactacattaactactttgcctacctgagcgtgggacggttcaactatgcgttcaacatgatggtaaacgtggctacgggagttatagcggcagtgggatggttcgtttggtgtcactttgtgcgcacccgcaggccctactttagaaggatcctgcgtttctatattctcatggcgttggctatgagccttgaactgcttgactttccgcccatcctctggattctggatgctcatgctctgtggcacttggcaacaattcctctggcatccctatactatgagtgcgtagaaatattactttattctaatattgctacatgtgtttgcattttagcttcatgatagaggactgtcgaaccctgcgaaaggagaaggctgcggcgggcggctattcattctacaattagtattatctaagttattcttagcccttaaagcacgcaaagctatctggcaatttttctgacatatttcatgtaatttgtaacagagcgaaaacatgtaatgtattttattgaatgtcaaagcgaaaacatcctttgacagtaaccagaacggcaggaaaactaatagcttcgtttaaaaagacataatagagactttattacaaca

SEQ ID NO: 4815 - protein, 326 aa, DROSOPHILA
MSSRSLSAIVLLLGALVTACLASNGDRTQFFHNCRQNCERTNCSADGLEIQEQAVKFYQQSVFDRLFQWSCADECQYGCMWRTVFAFFERGWPIPQFYGKWPFLRLLGMQEPASVIFSCLNFVVHLRLLRKFRREVRPDSPCYMLTHIFAVTSLNGWIWSAIFHTRDFPLTELLDYAFAYSIILCSLYVMVMRMLHRYSLFLRGVITLAFLSYYINYFAYLSVGRFNYAFNMMVNVATGVIAAVGWFVWCHFVRTRRPYFRRILRFYILMALAMSLELLDFPPILWILDAHALWHLATIPLASLYYECVEILLYSNIATCVCILAS

SEQ ID NO: 4816 - DNA, 3632 bp, DROSOPHILA
cggacgcaataaaccaggccaacaacccgaaaaacctgccgctgaagagaatttacccgccagttagagtcaaggttgagataagcggaccatgcgaagattttcttatttgccctttgtaaggatgtacaaataaagcccaatttatcacaaaagaccagcggtattaacgcaattgcgggcaataaaagattagctctccgaagataagcgcggtctttgtataattcttctttatagaactcttatagaactcttctcaaacttacagtagatgctctttaattcgaatgtgaagtaatctaaattagaaagtttaataagcaattataaagtacaagtagaagaagagaaatgtaaatatatatcggtaatttcgttaatttatttttgcaaagatttcgttatagcttagtatgtcaatggccccaagttgtttaaaaaggaatgaagcgaatatgctgccttatgctaagataatattatacagtttctatacctaggacaataaacaatactttgtgggttcccttatcagttgaaattcgaaatcggtgagttggtgttagttgtttgtcaaatacaaattcaatacccagaaattaaaatatagctgataatgtgtgctaaagcatctattaaatgtggacagtaagtaccaatgcagaacaaaccgtttatttgatattttaggtcagaaaaattagattgttcttattcacagcgattgaaccaaattttaattatttatcaagaactacaaaataaaaattgtgtcgaatgtgatgtttaaatcctttactcatgggatatgattgaaaaaggatgtttccagcccaaattagcagatcagtccgccgaaggaacttttactgtaattccgcattcattgctgtgcacacaaagcacttaggaaaagctgcacaaatctaatctggcggatttcaatggcgttatcatcccacgaatgtgcaggtgccggtgctggttagtgtgaaaaatgctgggcctgcgacgagttctgcgattgggtgcactgcgtcagcttcgctcgttaagtggcaagccgcaaggcgatgtccttcccgggagctgcggagtcctgataataggtggcggtggcatgggcgcctcctccgctttctggctgaagtcccgggccctgcagctgggccgcaagctcaatgtgctggtggtggagcgcgatgctggtgtaagtacaaggtggcctaaaatacgacacagagttattcaaaaagtatcaacaatatcttacaatttttgtaggaacaccttcaattttaaggtatagggatccaaaatttaccccaataatgtttgaacctttggtttcaaaacggttaaaaataattatgtagttgctttgctctgatcatatatccaatatccaatatctaccaatttaatacttttcctattgtattaaaaattattatttattcggtatctaactgaaacttattcgctattgaataacaacaatttttatacaattttccagtacaccagcgcatctacagtgctttctgtaggcggagtgcggcagcagttctctttggccgagaacatagagatgtcgctcttcggatacaacttcgtggttaacggcagggagcatctgggcgacgtggatctgtgctaccagccgaacggctacctgatccttgcctccgagaagggagcccacatcctagcaaagaactcaaagctacagaacgagctgggggcccgaaatgagctgctaggcccggaggcactgcgtcagcggtttccgtggttgtccacagagggcgtggagctgggatgccacgggattgacaaggagggatggtttgatccgtgggccctgctcatgggctacaagaagaaggcccgtgcattgggggcgaatttcgcgaacggttcggtagtgggttttgagtggaacgattcgggcggcctttctggagctgtggtcgacgccggagatgtgttgcagcgcacggtgaagtttgacacgtgcgttctggcagcgggagcgtactcgggtcaggtggcgcgtctggcagggattggtgataaggaagcaaaggaggcttccctgagtgtagccctgccggtggagcctcgcaagcgatacgtctatgtggttagcactcagggtaagaattgtcctgggctagccacacctctgaccgttgatcccgatggcacctacttcaggcgggacggtctttgcggcaacttcctgtgcggccgcagtccaaacgaagacgaggagccggagtgcgaaacgctggacgtggaccacgggtactttgaaacggatgtctggcccacactggcgaaccgagttcctgcttttgagtctgtgaagatacagagcagctgggcgggcttctatgaccacaacacatttgacgcaaacggcgtcatcggcaggcatcctcactacagcaatctcttcattgccgcaggcttcagtgggcacggcattcagcagactcccgccgtgggtcgagccatttccgaactaatcttggacggcaagtttaccacactggatctgtcgcgcctcggcttcgaacgccttgtaaaccaacagcctatgcacgaagtgaatatcgtttgacaaatttatcacaggaggatcgtacttgcccttggtgtgtttatgtatgtacttcttttattgcaatttctgttgtgtatatagtaattttgtatagtaaagttcacgttttagtcacgtacagctgtgttggtgttttggctgccagtagtcaagggaatttagtttagtttacggggatttgacgtggaatcagccacgagaaggtcgtgtgcctacatataatttattaaaataaggagttaaacataatcgtaatataacttgcgaaataattgctgacttaggatcagatggggcgagcgggtttgagggggtctgcccttgttacttagttatcgttatgtagctctatgtgtatctgacatctaaactacatacaagatctgcattagagtcgggtccgcgtggaatcgtttccctgtcagggtgagccaacccaacttgcaagctattggtaaatataaatagatgtatgttgaatgagtgtttcatgcgagtctgactaatctgggcgggctcctaagcctcgctttcgccaggggccgcgttttcacccacgttgatgggcacgatcagattctccttcgacatcagattatattttgtgacgaaatgcgtgaaacggtggcacagatacgtctcggcctcgaattcgtcgaaaatgcgacgatggtgaaagtaggcgtgcgagaagatgcgatacacccgccgacatacggagcccagcttggttaccgacgactccttgatggacaccctgggagagacactttgcttattatgtggctagttcaaccatgtcgctaagcctgcatacctgctagggaagtacttgttgctgtttagcagacaggcggcaccgtccagcgtgtggcgtgtgtagtcaatggccggacattccttgggcgtcttgtgcgcggcgcacaggaatatccactggtcagtggctgtcatctgggtgcacgtcgacggcgagcactccttctgcagccgcact

SEQ ID NO: 4817 - DNA, 1323 bp, DROSOPHILA
atgctgggcctgcgacgagttctgcgattgggtgcactgcgtcagcttcgctcgttaagtggcaagccgcaaggcgatgtccttcccgggagctgcggagtcctgataataggtggcggtggcatgggcgcctcctccgctttctggctgaagtcccgggccctgcagctgggccgcaagctcaatgtgctggtggtggagcgcgatgctggttacaccagcgcatctacagtgctttctgtaggcggagtgcggcagcagttctctttggccgagaacatagagatgtcgctcttcggatacaacttcgtggttaacggcagggagcatctgggcgacgtggatctgtgctaccagccgaacggctacctgatccttgcctccgagaagggagcccacatcctagcaaagaactcaaagctacagaacgagctgggggcccgaaatgagctgctaggcccggaggcactgcgtcagcggtttccgtggttgtccacagagggcgtggagctgggatgccacgggattgacaaggagggatggtttgatccgtgggccctgctcatgggctacaagaagaaggcccgtgcattgggggcgaatttcgcgaacggttcggtagtgggttttgagtggaacgattcgggcggcctttctggagctgtggtcgacgccggagatgtgttgcagcgcacggtgaagtttgacacgtgcgttctggcagcgggagcgtactcgggtcaggtggcgcgtctggcagggattggtgataaggaagcaaaggaggcttccctgagtgtagccctgccggtggagcctcgcaagcgatacgtctatgtggttagcactcagggtaagaattgtcctgggctagccacacctctgaccgttgatcccgatggcacctacttcaggcgggacggtctttgcggcaacttcctgtgcggccgcagtccaaacgaagacgaggagccggagtgcgaaacgctggacgtggaccacgggtactttgaaacggatgtctggcccacactggcgaaccgagttcctgcttttgagtctgtgaagatacagagcagctgggcgggcttctatgaccacaacacatttgacgcaaacggcgtcatcggcaggcatcctcactacagcaatctcttcattgccgcaggcttcagtgggcacggcattcagcagactcccgccgtgggtcgagccatttccgaactaatcttggacggcaagtttaccacactggatctgtcgcgcctcggcttcgaacgccttgtaaaccaacagcctatgcacgaagtgaatatcgtttga

SEQ ID NO: 4818 - protein, 440 aa, DROSOPHILA
MLGLRRVLRLGALRQLRSLSGKPQGDVLPGSCGVLIIGGGGMGASSAFWLKSRALQLGRKLNVLVVERDAGYTSASTVLSVGGVRQQFSLAENIEMSLFGYNFVVNGREHLGDVDLCYQPNGYLILASEKGAHILAKNSKLQNELGARNELLGPEALRQRFPWLSTEGVELGCHGIDKEGWFDPWALLMGYKKKARALGANFANGSVVGFEWNDSGGLSGAVVDAGDVLQRTVKFDTCVLAAGAYSGQVARLAGIGDKEAKEASLSVALPVEPRKRYVYVVSTQGKNCPGLATPLTVDPDGTYFRRDGLCGNFLCGRSPNEDEEPECETLDVDHGYFETDVWPTLANRVPAFESVKIQSSWAGFYDHNTFDANGVIGRHPHYSNLFIAAGFSGHGIQQTPAVGRAISELILDGKFTTLDLSRLGFERLVNQQPMHEVNIV

SEQ ID NO: 4819 - DNA, 4188 bp, DROSOPHILA
acggagcccagcttggttaccgacgactccttgatggacaccctgggagagacactttgcttattatgtggctagttcaaccatgtcgctaagcctgcatacctgctagggaagtacttgttgctgtttagcagacaggcggcaccgtccagcgtgtggcgtgtgtagtcaatggccggacattccttgggcgtcttgtgcgcggcgcacaggaatatccactggtcagtggctgtcatctgggtgcacgtcgacggcgagcactccttctgcagccgcactgccaggccgttcagctccatgcagaactggcgcaggtgctcgtacttccacacgccctcatcctgggcttcgggcatggtcagtatgagttccacgttgctcgggtcgcgcttaatcagctgctgtatgtactgctgcaccgccagcgtgctgtccatctcctccaggggctcgtcgggccagcgacagaagtcctgaaaggcgaaacggaaaacgggtcagacgggccgggccgggatcgttgttcggacgccatgtcatcgctcaccttggattttgtgcctggccggttcctacgcaatatggtcgagccgtcagccatcttcatgtttcacccgctcgaagacgcgatgatccacaacgtctgtgcctacgccttgatgagaaaatcactggcagaaactgaatgctagcctggtccctgccccgcgggagtctccggatgtgggatccctgcaccgtagtatgctgagtgtattctacaggagctggcacatcgcttgacaattaattggcgtttatcctccaaaacactttgctttgtgcgagaaaatttctgacaaattctacatacatacatatacctatcgattggccagcggcagtgcgcatcgttatcgatagggcgattgcagccttgcggtatttcggtatttccgccagccctggccacaaagtggccacactgtcgctagccagtcatcataaatacgaacagattggaaaacgtacaagaattgcgtattatctgtggcattacgagatcgtactttctaaaaactagcttaccgtaacccccgtcagcttaaaacatgtcctacgcgtacttgttcaaatacatcattatcggagacacaggtgagtgcaagctgcgacttcctttgaaacggaatggccagtgaaaagttggccattgtcagggaaacaatctgtaattgcaaacaacacaacaaaacaaagggcatcgcaggcgtaggggtcgtacccgaaaatcaaaaaatgggggtttcaggtggtctcaagtgaaaaattgataccgtgagatcaaaattgcgtcggcaggaaaatattcctggagtcggtgggccgaaggaaaaatcaataataccataacaacgcatacaggcgtttgctgctctcagagttagtggtgcgcggggagcagcccacacataaaccctgctgctgactcacccaaccacccccagtaattgagggattccgccccaaagagccacgggcttatcagcactctgcttttcgggatgtccaacagctgttggcattttccagcctgtcccaccttttccccgctcgcccactaacccttttccgtttccgcaggcgtgggcaagtcctgtctgctgctccagttcacggacaagcgattccagccggtgcacgacctgaccattggcgtggagttcggagcacgcatgatcaccatcgacggcaagcagatcaagcttcaaatctgggacacggctgggcaggaggctttcaggtacccacttctgttcatttagtgttaatacttaagaagggataagtgaaagctcagattacttccaaaattgaactgaataaatttttgcaaatttcgtatccaaaaccccaagtccaaggcggataataattcggctcgttttttatattaaataaaataatttgaataaaattcttacttaatgatccaaaataataataatatatatatatagagcctttagtaaaaaggcttaataatttgtattcaaaaaattttatttgcttcatttcggcacattgttgatagatgtttatttaaaaaagttttaattctatcatttttaattttttgtgatataaattttttatactttacttaaaattaaatagaagtcgtcagacagaaatttaatgggttactaataattaaataatataagcactgtcatttatataactgtattgtgacgcaaaatatttcttgaatagatctatcacacgctcttattaccgcggagctgctggcgccttgctggtgtacgacatcacgcgacgggagaccttcaaccacctgaccacctggctggaggatgcgcgtcagcactcgaactcgaacatggtcattatgctgataggcaacaagagcgatttggattcgcggcgtgaggtgaagaaagaggagggcgaggccttcgcccgcgagcacggactggtcttcatggagacttctgcgcgcacagctgccaacgtagaggaggcgttcataaatacggccaaagagatttacgagaagatccaggaaggtgtcttcgacatcaacaatgaggtaagaaggatacatttaacttagaaacttcttgccactacattattatctcgttactaggcaaacggcattaagatcggccaacagcactcccccacaaacccgtcgctcccaggagccggaggagcagctggagcagcaaacagtggctgctgctaggagtaaaccgcagatgcccgattgcaattctgggataggcgcagccgcttctgtaaaagctactttagtgactaactaatagaaggtagttgaaggaacagatttcttgttttctatctcaaccgtaactaaccacgtaaacatagctaccactaatctagcaattggacactaagctaaatgttaaaaccattaagatcagacagttacaagaaacacatctccttgttcagctacgttttattttaccaaaaaaaaccaaaaggaagaagtaaccagaaataaaccaaaacaaaccacatttgtgtacgtgaatgtcgtgcgtgatttctaaattttataaagtttattgaaacatttttaaatgttttatgcatgtattttgtgtatattgaagttagtttgctagttacttcgtgtaaaatcgatagttatacattgggattttgacaaaatgatgtgtaatatatgaacaaaaatcaaactgtgtgaattttcattgtgattcgatttcagtgaggtccagcttcgcaacgctgcgccacgcccccttttgcaatgggtatctgctccgcttctctatacacacatacataattaaatatattaatatgtttacgtttccttctcaacgcatttgctttgtctattttgttgtgcaatccgcttagtctttatacatacactagaaaaaaagtactttaacaaaatatacaaaacgtgagggccgaaatggggttatataatttacacaatcaacatgcattaaccagtggtaacacgaaatgctgcgattcaatgatcaatttagtattttacgaagtttatatatttaattaacggcgattgctaagacaaaacgaaagatacaactgtaaacgtaaatcaaattatttataatatttgtatttgcccaacacaatgcggaataataaatatacatacttactattaatataattatataaattaaatcggtacttaccttgggttcattagcgtttaatcaagtgatagttaacgactaattagttttttggtgtctagatgagaagtaaaacactaaggcaaatttaatgaggcatttaaagttgtaaacaactcaacttttaaatgaaaagaggtcagacaaataattacgcattagtgtagttttaaccctttttatttagtaagaggctttcggtagataattgttgaattaatgtcttgtaaatattattaaatggtgaatccttttttgtttatgtacatatttcctaaagtgttcggaattaacaatttccactttctatgtcggctatagggatatagtgtcgcatttacttaatttttttaaatgtgcttacatgttaaaacatttttttactactgaaatatactatttagaaatatttttgtatttttttttaataatacttgaacttttaaga

SEQ ID NO: 4820 - DNA, 1169 bp, DROSOPHILA
attggaaaacgtacaagaattgcgtattatctgtggcattacgagatcgtactttctaaaaactagcttaccgtaacccccgtcagcttaaaacatgtcctacgcgtacttgttcaaatacatcattatcggagacacaggcgtgggcaagtcctgtctgctgctccagttcacggacaagcgattccagccggtgcacgacctgaccattggcgtggagttcggagcacgcatgatcaccatcgacggcaagcagatcaagcttcaaatctgggacacggctgggcaggaggctttcagatctatcacacgctcttattaccgcggagctgctggcgccttgctggtgtacgacatcacgcgacgggagaccttcaaccacctgaccacctggctggaggatgcgcgtcagcactcgaactcgaacatggtcattatgctgataggcaacaagagcgatttggattcgcggcgtgaggtgaagaaagaggagggcgaggccttcgcccgcgagcacggactggtcttcatggagacttctgcgcgcacagctgccaacgtagaggaggcgttcataaatacggccaaagagatttacgagaagatccaggaaggtgtcttcgacatcaacaatgaggcaaacggcattaagatcggccaacagcactcccccacaaacccgtcgctcccaggagccggaggagcagctggagcagcaaacagtggctgctgctaggagtaaaccgcagatgcccgattgcaattctgggataggcgcagccgcttctgtaaaagctactttagtgactaactaatagaaggtagttgaaggaacagatttcttgttttctatctcaaccgtaactaaccacgtaaacatagctaccactaatctagcaattggacactaagctaaatgttaaaaccattaagatcagacagttacaagaaacacatctccttgttcagctacgttttattttaccaaaaaaaaccaaaaggaagaagtaaccagaaataaaccaaaacaaaccacatttgtgtacgtgaatgtcgtgcgtgatttctaaattttataaagtttattgaaacatttttaaatgttttatgcatgtattttgtgtatattgaagttagtttgctagttacttcgtgtaaaatcgatagtt

SEQ ID NO: 4821 - protein, 213 aa, DROSOPHILA
MSYAYLFKYIIIGDTGVGKSCLLLQFTDKRFQPVHDLTIGVEFGARMITIDGKQIKLQIWDTAGQEAFRSITRSYYRGAAGALLVYDITRRETFNHLTTWLEDARQHSNSNMVIMLIGNKSDLDSRREVKKEEGEAFAREHGLVFMETSARTAANVEEAFINTAKEIYEKIQEGVFDINNEANGIKIGQQHSPTNPSLPGAGGAAGAANSGCC

SEQ ID NO: 4822 - DNA, 22408 bp, DROSOPHILA
ttcagcaaactcttaaatacggcaccctgctcatatcggtgacatcgttcagcctgatcgtagccggcgtctattacctgaacagcaggcgagagcagcagcttcaggagagcaagacgtccgctgagctggaggcgctgaacggcggtgagaacgtcatcgttgtgcaccacattgacatgcccgttccactgcccgtccaagatgggggcatccatcagggaacgtaaaagtgccactagttgtttagttaagggcgggtatggggaaaattcaaacttaaatgagattttcgaatttgtctgcattaattatagaatagtttgtaaacatatagtcgccagttacctttagtctttagtcatctgatgtatgtaaatatatgtagaatcgtttaataaactgttcattacctataactgttaatatttatatgttttccctataataaattaagttggccacattgcaacacttatttgcccaaggaaagataatgttcatgtagcaaatattttattgttaagtttctaaacaaaaacgaaattcgtatattagttgcgtgttcaacatttgattttctgttatgatctttgttctgtttgaaaaccgttttagttgttaaatgcgtaaattacattgcatcgagtaattctatcggttttatattaaggtagaaaaaatttagaaatcaattttctgtggatttagtctctctttattggtgtttgcgggtttctggatctgagagttaatacgtttattggttgatgtgtgtgttgtattattttacttgatttcgttgaccacttaaatacgccgtcattcgagggatgcgaaaattcttgagtgtgtgtgtttacaacattgttttttttttttgtttaagttttgtcgttataaaaatgttggttttttcgtttacgttttaatttaagtatgtataatagtttatataaaaaataacagagaaattatataaaagaaacattaaatataatcgtttattttgctcttcatcatcaccttcttcctgcgattcaactttttcttcatctaataattaacgcgtcaattggcagaatcctctccatctaatgattcatcctggaccgatgagtcgtcgccgccaccgcctcctcctgcacgctttgatgaaggtgtacccgtgagccgactggagctgagaccaatgccgccggtgcgtctaggaaggaatagaccacgacatataattagtatttctgttcaggacgtattttccgtctttctgtgagcgtgcagtgcaggggcaacatatacacaagtccaaacaggggtacgttggagggttcacgactaagaactttttttgaggaagtttggagaattgcataaatttgcagtttggtctttacgtgagttctgttcctaacatgcaaagaaaacacaattttttggttgctgggttcggttgacattcactggttctaaggatcagggcgaacatcagcacttacagcctacgagaaggaaacgaagcgaatcgaagcgaaacgaaacctaatgcagaccctcacaattcataatgagtgcggcatccttttttggcgaatatgccttggccttttcagtctcggctacttgtatggagcttaaaccaaagataaatttcaaacaataatcaaattgcatctccaagagagaactaaggaacccccgtcatgatcatagaagaaatatgttgacacagtccaagactcaccgtagtttcgttttaagtgagtttatctcacgattcatggcttcctgcgattcaatcatgtcctcgcactcacgctggtatttgcgcttctgcgtcttctccttctgcaattcctcttcggtctcgtccaagttgcgcttgagcagtttaatgcggctattcagctataaaagcaaatacttttcagtaggaattcgtattaatgagccattttattatttaccttatccatttgctccttgtgctggtcgacgtgtctccgttcatcctcgatgttcattgtaagctccttaatcttcttgtccatcttccgattggccttttgctgcaacagcctctccttgccctcattctccagctgctcttctaggttggcgatcttggcctctagcgtggcgattgtcgcctttactttagtgcgctgtgctgtctctatttcggcaagcttagccttcagctccttgttttggcgttcgagcagagcgcgcccgttttcgttcttctgagagttcgatttttcgtttgccaactcagtggtcagctgctcaatctgcagctgcgccttgcggctgcgatccagcagcacctcagagttggactgttcctcctccaactcctcctcaagagtggcaatgcgggcttccaatcggcgcttctcgtcgatcattaaggatcccttgttggcattgttggcaatttcttcggccaattcgtcacgctccgtttcggcagcacgtcgcgccctctctgagctggccagatcttcagtcagctgtaatacttctgcctccagggccttgaccttgcgctccgcctccttgctcaacgcctgtagctcttccttggcggcctttgcctcctcggcgtcgcgcagcgcgtccttgacttgtgcttgcagcttcttcgcatgcttcaacgcatcttccttcaccttgttatgcatctccatggtggtttcgatctctttcaggtcgccctccagtttcttttttgacgccacagcagccgtgcgctgtttacgttcctcgtctagttcggtctcaagatcccgcagttgcttgacaagtccgcgtcttttctcctcggcaccctcttccttagctagcaggtcgcgttcaaactgggaacgaagggcctgcatgttcacctctaggcgcaatttcgcgtcttcggtcagctgtaggtcgtcctcaagttcctcgttttgtgctttcagttcagccagctgagactctagcgcccgcttcgctttctccagttcgtggacgtttttatcggctgtaccctgtgtgttggccaagtcatcgagttcattttggagggtctttcgcttgttctcaagatcttcaattttgtcaaaggcttcgtctagctcgcgggaaaccgacagcaccttggtctccttttcgcgggcctctcgttctgcagtatcacgctcttgggcgatctgttctgatatggctttctcctcggcaagaattttgtcgaagtttttttgttttttctccaattcgagcacctgaccaaggacatgcaatttttttattagaactagtttatttaattcagacaaaaactcaccttcgtacgttgcgcttccaactcaatggtggcatcttcaagctccgactgtatcttttttttgcttttgtcgaggcggtcgttttgggcaataagttccttaacctgccgttctaatgcctcgatatccttattgagccgcttcttcccctcttccagttctttggccagatctgcatcttcctcggccttctttttaatttcttgcatttgggtggtgacttcggccagttttcgttcgtaattacgtttggcttcatcatcctcctcaagctgctcttgtagagcctccttctctgactcgatctgacgcagcttggagctgagacccaacttttggcgcgtttcctcttccaacagctgctgggcttcagtaagctgtgattccatgttgcttgcagactttacggcggccgaggcttttagttcggcttcctccagctggtttgttatgttctcagcttcctgttgcagttttgtgcacttctcctgaagttccgagcgggcgcgttcaatctcagccagttttacctgtccaaaacataggcatacatatacgttattttttttttatagaaatatcatatttatatatatcacacatttttcgtgattatttacctgcaattcagcaatctgcgactctgcctgcttgcgccgtcggtcgttttcttgccgggagctgttgacgctgcgcagttcagtggccaagtcggcgttttccgcctccaaggtgcccttggctttttcaaggactgttttggcttttcgtaggttttcaagctgatcgttgatgctgttgagctcctgcgaatgtttgtgtcgcatgtcggccaaaacaccttcgtggttaacagtctcctcttcgagagacttttttagggtagccaactcctgctcgcgtttagaacgcaattcttgctgagctgtttgtcaaaaaaaatttttttaatttaatagtggtaatgatacggatttcttgaaaacatttttaaaatatagatgcttagtcttaccggctgtggtgtccagcgagtccagcaactcattcttgagagcctctagttcctcgctaaggtcgcgtctaaccttctccgccttggcacgggccgccttttcggcctctaggtcctcttgaatctcggccagctgcgactccagctcgcgttgagccttttgtgcggtggccttcgtggccgattcctcgtcaatgcgcaacagagtctgggtaagttcttcctcgcgtttggccagttgagcctgcatttcatctacttgtacgcgccgttcgttcagctgttctttaagatcagcaacttcagtctcgatcttccgcttagatcgatcagactcctgtcgctgctgctgatccttgtgcaaacgttcctcgagctccgagattgtggcttcgtgcttggctttcagcttggccaggtgtttagccttttcctcctcctcagcaagtgtctgggacagatcgttagcacgctcttccaatagcttcttttccttcagaagcttttggttctggtcgtcagttaacgcaagatcttcttcgtactttttaattttagcgtcgagctgcactttctccaattgtagtttttggcgtgcggcctcttcttcttcgagttgctcttccagatcttgaatattaagctcaagtttctttttttcgcctccaagcgcgaggactcgttcctcttcttcttcgatgcgcgtctcaagctcttgcatcatatcctccagttcttgtttgcgtgccattagtctagagcgcgactcctcggcctcggcgcaaagttcgatttcggcttgaagctgctctgctagagtggtcttctccaccaaagcctgctggtacttgcgctcgtactcctgcgtattcttggccagagtgtcaagcttctcgcgtacctgcttcagctcatcctccttctggacaagcttctcttcctgctttgtaacttccaacaggggcttgaccttagtatagaggcgccaccactgccagttccgaagcttaaggtaggcggcacaattccgctggatgattcgaatagcgtttagttgctgcaagcgcttttggtagttgcgacgcgcaaggaagccacgacagaaggcctggaagttaacgataagatcggatatcttgaaatcacgctcctcctccaggtgagcgaggacaccagcgcggaagaagatcttcgactggcccactcggtacaagttcgagtcaagctccagcgcctgaatcatcttctcgcaggccttctttccgtccatgaatcctttgggaatcacgttgggtgtaaggagttcgtatcgttggcggaactcctggaagggaatgcgatttgggaagccctggcggcagatacgaataccctcgagcacaccgttgcagcgcaactggtcaagcaccaagggagcatcgatcttgccggcgcgcttctcgtggttcggtatgatacagcgcacaaagttcgggttcgtgttgcgcagagtgtccatcaacttagccagctgctccttgtacagatgggacacggtgcggaacatgcccttgcgggtgcgggccccgaactgggtatcagtcagggcctgctgtgccatgccaacgatttcagcatccttccagatgttcaccacgaacggatcctgggagccctggaggagcgacacgatgttctcgttcaatgggtccatgttcttcatcagccacttggccgccgagtagtcaacacgcccggcgtaatgcactattgcaaagtctgcgactcctcgaaagtctgtcttcataaacttggggtgcatagagtgggccgatacgagtttatctacaaacgtcttgtcagtggctttagggaaccagcactcctcatccagcagtgccatgatgccgccgggcttatcgatcaggtcgatggtaggctgcaggtccaacccaaagtcgatgaacttccactcaataccctcgcgctggtactcttcctgctccaggataaacatggtgtggttaaagagctgctgcagtttctcgttagtgtagtttatacacagctgctcaaaggagttgagttcaaatatttcaaaacccgccatatcgagaatgccaataaaggaggctccttggcgcttggtgcggtctaaagaacggttaatccggttcacaagccacttgaacattcgctcgtaacacgccttagcaatggcctccacggcgaactccacctgctcctttgtttgggccttcgtaacaaagtcacgacccactttaatgcgtggcgtcaggaaagccctggtcatgtctgtcacactaagtccgagtagatgcgcaatcttctgggccaccgtgttgtctggtagagttgcctgatcgttgttgcgctcctgacggaatttcatgctaccgaacagtaggacggcgctcacgatgcgaaatatcgagttgaaatcctctgatgtcatgcccatgatgttcatggacttaaccgttgcctgaaactcggcgtaatcgtccacgccaggtacaggcaggctgccattggaaaggaatgcatacgatttaacgtcatccagtatgaacttctcgcgctgctccggcgtggccccagccagcaactggtagaatatatggaatgttcgttcgtcctttgcttgacgaatggcacgcgacttctccagcagatatgtttcgatgttggctcccgagataaatcccgaggcatcgaaattgatccgtatgaatttaccctacaatgaggcaaacggaaattggcattctgtgttgtaaaacaaagaagcaaacaacttacaaaacgtgaagagttatcgtttttgaccgtcttggcgttgccaaaggcctccagaatgggatttgcctgcagcagctgttgctccagctcgccctgtttagaggatagacaagattatatttatgttaggttaatacgtttcacgttatgtaaggttaggggttagacacatatatttacgaaagcagtcttaacacaagaacagtaacatcacaagcaacataaagtatctacaaaactagatatggttagcttaataaatcatgcagaaaggagacaaagccaagcataacgaaggacaataaacactggacgatatcctacagcttctcacgatcaatgccggcgcaatggcatcacccggtttacctcttgacagttggaattaacttccaccatcttcaatccattgactacctcgatcgtctgattctgattttgggccataatcttgacctttatgtacttgtttgtgttgaccgagaagttctgcaattaggtgggaatgggattatggggtacggggtggatattccaggatttcttgatgactctcatcgtttattacgcgcattgatctatccagccttaaaaccatgcttagatttcgaaatacacaggtacaaatgaatcgaagcctacggcacgacaatttactacaaaattatatttaaaagaatttttggacgtcaagcatactttaccgcaaatgtctcttgatgactactctagaatttcgttggcatatgttgtacaatgagggagcagatcaaagcagagcagagagatgagattgagtagatgagtgttgacttggatgggacagcaacaagggaaccaaacgaagagttgggagagttcattcggagagggttaatagtaatatttcggccacatttaaaggattaagaaaataacgtttggaaatcaagggtgttgttgggatcagaaatagacagtgggtgaaaagtaagtttaattaaacaatgaacggggttaaataattcgagttaattttgaaacacaaagagggaaaacgtttcaggattctcaatcctcgaatacttacaatgagcacggcgggatgcggcacctgtcggagttggtgtcaattggttggaggtgttgaggtttgatttggttgttggatatttggattgattgtgacatttggcagcattttatacaaattatatttacaaattttataaacatattgatcagagtttagagtgaagacaacaaccaaagtccaatgtacagggtgagtgtgcgtatatttataggtgtgttgtgtagcatagtggagtgtttatgtgtaggacatgaaaataaataagatcaataataaataataattatatcagatcaaaaatcaatttaaattttgcctcatcctcagcatcaagcaaaaatatttgataagaactgaagtcatgaaaaaaaaaaacgatatcatttttaaacaaatgcaaagttatatccatgtttgttttcgggttttcttatcgctcctcttatcttgacctgataagtaccactaaaacacacattttctaatcaaactaacgaaaattacctttggttcaattcagttctacagtaacttgctatgattcactgcagacaatgttatatggttttttatcgtcagcgtatatttatggaacttagaatcagagataataccacatagacaattttttcttaaaataaggtatgaacagcaaggtataaagcgatatgcttatgcaagatctctgaatggttcaaataaaaggcttgtagatttgtttaatgtcttaagaagctttttaagtatatttgcagcttatcacgttcacagcagaaaaataatctcaacttcgtctgcagcttcagcaccagggtcatataaggcagtaaacaaataaaacatagtaaaaagtgtgtttggagctcaagaacagcttgtttgatctcgaaaggattgagcaagtccgaaatgcactaaaaacggcttgtccccacagttatggatatggcaaccccaacagtagcaaactgtacagagcagcaattgctgccccagaaatttatcgaatgtcgcaattttcgcgatttaatttttttttttttttttatcaattgcctttcaatttcaattctcccaacttttttatggtgtttattttattgctgtaaacgacaaaatttgtcagcaactatggctcttgattaatgaagtgtgctccggctcccgggatcacaaagcacataagccagctgccatgtcatcagccatccacatatttaagcgttaccctcggccatccatccaccatatggggagcatcagtttagcactctgaatctctgaattcaactgaagtttattctagttcttgaggtcgttattgaggaatagcttttacaacctatatatgtataaatagcaatgtcagcggatctgattgctctgttaagcctaataaatttaaaacttgactgatattgctaatttaaaacagatatactgcatactcccacgaataagttctagattagaagggggtttaaagccaatctgccgacaacaaacatatacatatgtgcttatgttagcgtcgtgaaattcccgctaacgttgttggtctcattaattacaataccaaataataacaagtgtctggcttgcgtgcaattaatgtgagtttaataagcacttctagtgaaaaaccccatatggggctgtatttctccggcagatatcaccacccaatggggcatacaactttgcatttgcttccgatctagggtctcatttctgattttgctcttctgtacttaccgcacccgagcccttgggtttcgaagctgccacataggctagaaattggatgaccttcttggtgttctccgttttgccagcacccgattcgccagtacacaaaatcgattggtcttcgcgatctgcaaaaaaaaaaaaaaatgaaagtgaaagtgtaagaaggtaagctgtcacttgcttcatatgcggaacaatgcggctgaccagccaaaaatgtaattaaaatgttaaatgcgcacctcagcttgaattttctgttgacccaaatttaaacgggcaaaaaacgagcccagaaagtaaaacccagaatagttgatgggtgataaatgggacatacatcaaatgaaatcatagcatgcaaataactatcaaccgattttcgcttaggcttcaatgctcaactgttattttgaaattaaaaataaaacagttgatttcagcgtgcatatctgaaagatacaaaagacaacagacacacacaagcagtaaattgctgttgcttggtatggcgccaatgatcccatgtagaatacagcgaactagattcgcactgcaccccgggatcaccacaccccccaccgcaactgacagcctcgtcatacgatccagcattaagctaaccacaaattcaggcagagagacgcgagtaagatatatgtatctactctgagacatggagctccaaacaaccaaacagcttccatatcacgaccccgtacttatttatttttatggatagacccagtcacatatctatacgtacatacaagctacattctatattcgaccatacatgggcctaatttttgtatctccacacttcattttatggaaattttttcacagttttttttgtcattaataaatttaatgctcagaaggcgaattaagagtttctcaaattattacgctgcgaataaggggtatgcgaaatatgtgtcattgatagccaatgcattttatggctcgaagctacaatcgatcataagtttcattcattcactttttgcacttgttgaagagctgtaaaaactttttattttgtatcacacagcagacttcactcccaaaataaacttctttaaacaactgaaaaaatacgtacaggtaaaacatctgcccagtatcggaaatttcgcgacggttttaactgctatatatgtgcatgtaggcagggcgtgttcattttatcacgaattccatgaaaattggaactttggaagattggaagttggaagatttgcgattgctccgagttgggggagcagctggagaatcacagaaagataaatgtttgtgacgtttgtccaactccccaatgttccagggcaatggagtcggaggcgatggggctgggcttagtttattaaaggccagtgaaataaatcaaattaaatgccactccccaatggcttggctttgagagcgaacttctcgaaaaaaatttataccgcgaatatacgaccaagaaaatgtgcatatgccgaaaattaataagcgtgatatatggtgagccagagtgaggtgtcgatatgtttaaacatttttacgacaacaaaaatatagctgatgatggggcaaacaaagttgcctgctgtccaagcgaagccgggctcagttttagatccaaatatggtaatgacacgtatacgcaatattagttaaccaatctcaagcagaggaaacacaacacacacatgtaggaacctatagatatggccgcagtaagatacgcctggcctcgagctggagtctctgctgcgctggagccagcgccgtgagtcatctcccggcgcgacgttacgcttggaacggacatgcaaaccatcgaaactcagtgaagcccgaactaaaaagcacagaagtgaaaaggaaacctgaaaaaatctcatttgaaaattcataccgaaaaaggaaaccagtttgggattatgattcacaacatttgtatgaattcgaatgctaatgcacctctttggagttatatctgcaaagtgtgtcatgtatggaccccgcttcaacgttattcctggaaatgcccctcccttatatacttttccacgccttatctaatcagctctgaaaaaaatttcgcttgcttatttggagaatggaattttgatagcgaccagaaatcgcgctccagagaaaaaaggaaaggctgttgataattctggcattccatctcccatatgtatgtgcagctgtggagcgaaaagggaacgtaagtgcaggatcgagatacttaccacccaacatgtttctataggcactatccgtgattgcaaatacatgcggaggcacttcgtgtcgttttatgcccttgtaccgttccattatcttttcggtgtagatcggaagtttcttgtacgggttgaccacaacacagaaaagaccggaatatgtctgaaatgaagaaattgttccatcaatcgagggatttattgttaggtatacttaatgcttgaatgaagggcttttaggagtatgattcaaaacatgaggtaatattaataaatcgcgtcggataatcttacaccaatgtattcccattcttaaagttgataattttccagctataaatgctatccactgggctgcaggtaatcaaagtgatgcttggactaacggcagctttggacaccggcaactgctttttgtgccctagttattgttgcccaaatgctaacactctcgcatgtgtgtccaagtcaacgtgacatgtgctttaaagttggccagcaccataagcagcgaacgcatgtatctgtatctgccgctccatctgtatccgaatccgttggtggtatctatcgagcggcagcctacataactgcgactgtgattgggaccgagactgcggcgtgggcactaagtatgcggctttgctatttgttgtaccatttaaatacatatctacccaaacattagatgcgagtgcctcgagcttcacggcagcgcgcaagagtgtatcaaagggggcggagaagtgtgggccagcccacacaaatcgaaatggaaagtaccgctggcaattattgtagtagagaaaatgccctcaactttttgcacaggtgagtgtgatgagggcggcaggaaaacgaatcacttttaggcccgcaattaacagtcaaaatcacgtcttgccaatcagccaccttccttgtatgtgtgtgtgtgcgtgtgtgaggcatccaaaaatggtataagaaattgttttctcagtgtctgctgttttggcaaccgcttagaagtggcaatgactcgtgacgatgtttgctcccctcgtctttgaatcacatcggttatgttggcttgactcattgtcctggtgcatatttctacagtccccttgaatgtcattaatcacttaaccggacctgatataaagccttatacggtcacgaaacataatattttgcaagtttagcaaacggccgcaaggcatttaaattacagcgagatataattacatcttggagttttggaaaggaaacgtgaaagaattttaaacaaagaatacaaagaacgtgagcctggagagaaacataaaaaagttaagaatgcacgggcgggcattggaacagagccttttttgttaattatgtgctcgacagacggaggtgttagttttgccaatatctgcgaacaaattgcttagctgatgcgggaatcatattttatttaccacatgtcgtggttcatttacattccttatttaaatctggccaaggaagccacttggctctggttgtcactgcaaccctacattattaagtcatcctgtctaattctgctggtcagtttaattagtgcctcttacagatagtcaggaccgactgggaattgagacaacagcaacagccaagatgccaacgtcatcatctccttcacgctgctgcgttgtcaagtgcgattcttttagatgccaacgcagccgcgcaaaaagcacacgaaatatattaggtaatattaagactgcttttgagcaattgcacccagtcacacggttgacgtaaatcaattaattacaacaacaacaggggcagaagcaaatgttttgtaaaatatttcaaacccgatttcatatgtaaacaagcgcatcagaaggagatgtttgataaaattacaagactagacatttttcaatagacttattgacagtaaaaaatatttataattatcacttcaattacaaaaaagaataatatggtctatacttgtcgcttttgcttccgaattttcgattttctaaggtgttgctaaagtgttgacaatttgattagcatatttgagcaaagcgccatgagtgtgcgtggccgtgcaagacacattcttcttgccgacgcatattaattagattacaagctaccgtcagccggcagctgccaggcgaattaatttaaatgaaatttaaaaatcgaattaaatgtcaacaaattataataattatgccgttaagtgcagcccccgctgccgctccctcgccgtctcaatcccccattgttcatgcaacaagttagcaacaattggcaagagaattaagtgggacaggccgtggtaagagcgacaaagggacgcaagatgtgtgcgtggcatggttgtgtaaacagtaaagcggcgctcgaatttagcaacaacaacgacaatggcaagtgcgctgaagcatggcttgccaacaatgatataaacaaatttaaagtagttcgcgcccacatcaaaaactggcagcaacaaccatttgtgcactaaattaaaacgtgcaggcgagagggagaaagactgcgataagtagcaggcgcagtacataaagtattttaaaagcggcacataatttgttataacaatgaaaaaataagtcgcaatgaacctgcctcagggaatcaacagagaatcaaggctaagaggcgtggcatagacaagcatccagaactgaggccaagtttggcaacatttccttgaaacatgttgttgctagacattgctcagtgacgaaaagtaggtttgtataacgatcgttagcataggaaaatcataaatgagctgcatttgtcatcatagaattcaggaaaagcgagtctactgaagtcaagaaaaaacttgatttatatatttaacgagctacttaaggatgttatttattttcaattaattcaaaaattgttttagatgtttttattaatctacaaatccaaaaagtctaataaacatttaccaactttagaaaacataactagccctcactttaaatttaacttgtatgataaggtatgtcaaaagataaatctttatcaattgcagcccgccattgtaaatactgcaataagttatatttataagaggaacagtcgcaaagcaaagcagctgggatttatggagtcgaatttaaacgcgccacttgaaattcgtttctcatcgaatcgaaaatgaactttttgctggctttctactcagaccaaagcgcttttggcatgccaattaacagcggatatgctttgcgggtgatcgggtgaacagaggacgaaagagtgagttaatggttataaatcatttggcctgtgacgaatgcagcaatgaattgagtgattgagctttggagtcttaaatatttgcgatgcttttaaataaatagatatgcgatgaggcaagacgcctttataaagtttggcctttcaaaatttccagttaagcgaaatcaaatgtgtgaaaggggggggggctgtttacttagtttcatcatcatcgtcacattaccggcagctggcgcggcggaaacttggggcagccaacacaaacatataagatagggaatatgtacgaggtactcacatagattaggccagagtagtatctgtccttgatgttgtgcaaaacggaggcttcgtttagacacgtaagctcggccatgtcctcgactttgtcgaacttaggcggattcatcttctgtatgtcgtcacgtaggatcatcacccgcttgccggtttcggccaactccacttcgacctcgtcgccatgctcccgtttaatactggcggccacgaagccctgtaaaagaaaatagaaagagttattcacggttgccatctctgtttctctgcagtgtggtatgagtgtgttacgcgaaaacaggacgggtacgcttctgttcttcatctcagcgggaaggcgataaacacaacaagtgcaatgacgccgcatgagtcaagcgccagaagaaaaaccactcagcctccgctctctcgctgccaattgaaatgcatagagaagaatgcatagaagacgaagcaagaaccaacccagaacaacgggaggcagatgcaactgtctgtccgcttgtctggttccttctctccgacccgggtacttagcaagttcaaggcgcggattttggggaagcatcacagttttgatgttgaaccgttcgcagcgcagtacccataactaatttagggtaccaaatggggtttacttccgagtcttctccgaaacgtctgcatgaaatttaatcgaacaccaacagaataacatcctcaattagaagtcaagtgaaacaacaacaaagggaagcatgttcacgcgacgcattggcattaatcaaatcaggggcaacccgtaactcagtcattaaagggtggagtggcgtgccgccgctgcaaaacagaaatgcattaagaccaacaacggcctgccgatgcagggcagaagcatctgcaatacatcccagcccggttcgggtccattaagttaaatacgcacacgccccagcgatcagtttcggaaaaaccagagacgtggtggttcttgccttgcctgtgttatctttgcgcttttccggtactgttgataaacagccataagaaagtcgttattctcgggcatatatggcgtatatgaaaccatttagagcatgtaacgacttctttagaatactcagctgggtcctacggcaaattattttcgcgctgcgaaaagtttacagattagtcataaggtaaagtcgtctgcatgtatataggcctaaattttgagtactttcgctgtatctaaattcatttcccaggcgtctgccttttttgtgggcagccgctgtcagcctgcaaaacatttgtgcataaaacgtttgacactttggacaaacaaatacacaaggcttgcgacagtggcagaagaagctaaaagttcgccgaatcggaaaatgctatagccgctgcgacagttggtgcgtgaatcacgatattggaatgccccacaagagaggaattggagttatcggtccagggaagttgtccgaagttacccagcgaggcagccgcgagaggctggggcatatgaggtcatcagtctcggattctcgctcaacggcatctcgggcattccaggcaatcggtgaagcgaaaccaaagaaaatatatcaacaacacctagatgttggtgatgatcagacaggcgggaatcaaagtaagaatgttgggaaggagtgcattccagaggggagcccccgatttgggtttgactatttttgggtgcccaaccgcaaccttgaacatgccaaggtatcggccgaacagcacacataagaatattggtgattttgagatatatctgtggccattatttactctctgggagcgtatgtttttcgccaacttcttttgtttacactattccgaaaatgtaaatatgaacagaataatgaatagatgtctccggtccccctttttccatcacgatccaaatgcgaacgttcgatgggcccattaaaatttgttactcttttattttattccttcgcttaatcgatcaacgtatatgcattgttgaggatggaagtggagatggagagggtaagaagcgtatattacacatacgtgatacgaggcgcaggttcgttgaccgtaaaccggacggacgagagtcgaaagctggctacgtttgtcattgccgtaaccgaaaagaaaacacacactcgcgcggcacgggcatctccgccagaaccaatcgcggcacgccaaagggcgggggcgcggaagcggagtgggagtggtcgcaaacaaagtccaaagtggtttctttggttataaatacgagcagcacacatacaagcgtggaagtatgaaacgcagcatgtgtgggtgagcagagaccccctaatgatcgccgttcgttacaatcgaatcgattctctggacatgacgaaggttaagccgacttcaatttggctaacaatataaaaagttttcagattggtctcgggagtgaggcgttcaggaatgcctgaacaaagacagcggataagaagagcattagcgctgaagaagagggaaaaaagaaaagaggtgtaaacacatttccaccgtgttcacgaattccaaagtattaacttttcaatttcatcgttggacaatggaaaagtaagctatgaactattaaaagcatttaaatagtttcaagatcgcaaatatacattaacctataacccgaaaccttcaatgtacaatatatctaatccccaccaataaacttgctctctgtgcaattgattcgatgaatcatcgctgttcagcaaacaacatgaaacgaaatgtagccacgaacaaaaggtctccttgtgtatccaccagtaaattactgaatttggatatcacgtacgtggactgacgccgccattattcagcgaattcgcttacatttcgaaaagctggaacagttgctggaaacgaaacgagtgttgacacaattggcgaatacccttttggacgggtccgttcccgttaagacgtagctgtatctgtggacattccagcggagcaacagttgcgctatatgcaaatttcttaactatttccacccgtctcatgtgccgttcgtcagtcgcaaagaaattttagcctttagacaatctgacggaccactcatgacaatcgagcgtttcgttattttcgttttatttctgggttttatctctgccgttgtctttttgtgagattccattgtaaagtaaatgtctgttaaagtgatcgcgtaattacacaaaaatgtgaagttgttggcttttgttttcgatgttgcttttattatacgaagtcacccaaaagtgctaccattctatgtacggaattatctctggcaaatacagcaattacgggcagccaggggagaaaggagcggttgataattttatctgtttacgttttttatggtcttgaaattaagtcgttggaatgcagttgaatgacacctgaatgaaatcgctttaaactgaagaagagaataacaagccacaccgaaattagcaaaacaatcggcttgttatcataaggcttgatcgctagcagtcgaccaaagttttgaatttgaatttataggccaagagcgggcgcccgaactccgagggaagcgattctttggcgcaatctcggctcgtttctttgctggcctggctgtgtggttgaggccagaaagccccacacaagcaagtccacaccacaaatacctagccacattgaaaacttgttttggcccgctcttagtgggaactgcgaactggggccattcctgcttccactctccctcggaggtgagtcactgagtcgaagagcgtctgcatgcaaattggtaccaaatggtcgcggatttgaccaagtaagaagttaaatgtgtcacactactacggtgagattaattcagcatcagcgcaggagaaaagagtgattcagcatcgacgccaacggatgtttacccaagtttatcaccgcggtgcgaatgtaatgaaaattcaaagaagttgggcctgttcaaaattaaaaataaacggatcggtgaagcgtgattcatgaccaatcgatgagtgagtcggatggctcaaaaggtgttggctgataagaagcgcaaagccggggacaaacactgtgaaaattgattagagcacgtacagctagggctaaaatattatcacgatgtgtcgaacacactatgttctataataaccattcactgcgaagtaatacttagatattagatagttacatgtagcaattttttacgcaaaagaatatgaaaattaaacgaaaattaagtacatttggtaattttacaaaaaaaaaaaaaaaaaccataatgggctaatgactaccgacttcacgaaataaacagcgttatgatgtatcgactgtatttttatctcagttgtagcagttcctgttgcatttaggctatctatagggtctattcaggtagttcactgaaacgggcgtggcttccggggtagaaatcccgtagcagaggttgcgtccagagtaggaacatgctctacgggtaggcattacatttaagtagactcacctggttctcgtgtggcacccacaccagacgcttctgtgtccactcggcctgcgtggccggatcgttgaactggttgcgctccaccgagaggtacttgagctccggatcgttgcgatctacttcctccgacattttggcggcgatctctaaataattccttgtctgtcggtaattagctgctttcggataatggatattggatactggatattcgcttttcggatgcaatgcacttttctgtcggacaaaacaaatcgatgagaacaatgagtatgttgcctcgctcctcagatacaatatttcgcatttatctcgcgtttgcgttctttatctcggaagtgcggcacaaaacggaggcggcgagaacagcgcgcggcgagagtttcaaaagggagagcgcgaaggcgaaagaaagacggagaggaaaaaatatggccacacattttcattttcttaagccaaagtcaccgctgaacgtagaagaaggggtggtgaagtaatttagcggaaaaatagcgttacgtagcaattaaccagtttgcatctcctaaaactgcagctaaacactatcagagcaccttttcacctccgatttcggatgtttcagttttcggagcaggtacaagcggctctttttcttcctcttcgtcttctctcgctttgcttcccacttggttcgttctgcaacaccgacacacagcacggctcacacacacacacacatagatcgcactgggagccaaggtttcgcatattcgcatatttcgcacacaagtttcggtttttatgctcccatttccccgcgtcagcacagcgtttgtgcaaatgcagccaaattcgaccgtgcagtttcagctggcggcgtcccgacgccggcgaataggtcgctgcattcgctggatgcctgtgcacatttccgattttttttttaccgattttaatgcaagccaggcgcttttcatttgtttggcgacagctgcacccacacacactcacaaagacttcgaccgcagttcctgagcacgtcttttcgctttccccctttttttttcactgtttttcgccgcttgccgttttgccgaccgagtacttttcgagttcgatggtaatcgatgccttccgattccattcggacatatcgatgcatcgatatgtcgtagttcacacgacggccgcggcagcgctttctgaaaacacatacatcgatatgtcaacactgattaaaattctacatatggatcgcatctagattttgtttaaagcacacacctgtaacattttttcaggtcggccattgtattcctctataacagaatatctaagtttttagcaaagtatcgcatcagcttcctctggttcatgactgcacttaagatcgaaatattcgcggcttcaagccaagcggtgtcgattggaatcgaatacttccggaatagaaatgagattaaattattttgccgatttcactcacttgcatattcagatgtagcaaaggatgtttccaactcacttttcaatttataatattggtcaaattagtgcaagctaagtatcgtatatgtcgattttacttttgacatatacgtagttcatttagttggaccgcacgacaacatcaaaataccttaccgcctttttgtttttggtgttttgcggggtctcgcgtgctgtcctctcttcgaatcagttcttggtaaaaccaaacttcaataaaccgttgggttaatgcgcggatgtgcggatactttcagttaattttgaatttttcgaggaacggtgaaggtccgcgcttgaatcagtaagtccagttccgagtatcacagccagatgtgagtgcttggcgccagtcgcaattaaattgactttaataaaatatctggcgggctccttgcgaacttttaattctggggaaacggacttgagtgattccaactaagagcaagaacacagttccttaaatgaagtgctacttctggcagcgttcttgagatgcgcgcagcatccttggcaatgacgtcattcgcctgctgaccagtttctctgtgttcgtgtgtatgtgtggcgagagtgcgtatgcgtgtgtatgtgccgaaa

SEQ ID NO: 4823 - DNA, 6374 bp, DROSOPHILA
aaaagtactcggtcggcaaaacggcaagcggcgaaaaacagtgaaaaaaaaagggggaaagcgaaaagacgtgctcaggaactgcggtcgaagtctttgtgagtgtgtgtgggtgcagctgtcgccaaacaaatgaaaagcgcctggcttgcattaaaatcgaaaagtgcattgcatccgaaaagcgaatatccagtatccaatatccattatccgaaagcagctaattaccgacagacaaggaattatttagagatcgccgccaaaatgtcggaggaagtagatcgcaacgatccggagctcaagtacctctcggtggagcgcaaccagttcaacgatccggccacgcaggccgagtggacacagaagcgtctggtgtgggtgccacacgagaaccagggcttcgtggccgccagtattaaacgggagcatggcgacgaggtcgaagtggagttggccgaaaccggcaagcgggtgatgatcctacgtgacgacatacagaagatgaatccgcctaagttcgacaaagtcgaggacatggccgagcttacgtgtctaaacgaagcctccgttttgcacaacatcaaggacagatactactctggcctaatctatacatattccggtcttttctgtgttgtggtcaacccgtacaagaaacttccgatctacaccgaaaagataatggaacggtacaagggcataaaacgacacgaagtgcctccgcatgtatttgcaatcacggatagtgcctatagaaacatgttgggtgatcgcgaagaccaatcgattttgtgtactggcgaatcgggtgctggcaaaacggagaacaccaagaaggtcatccaatttctagcctatgtggcagcttcgaaacccaagggctcgggtgcggtgccgcatcccgccgtgctcattaacttctcggtcaacacaaacaagtacataaaggtcaagattatggcccaaaatcagaatcagacgatcgaggtagtcaatggattgaagatggtggaagttaattccaactgtcaagagggcgagctggagcaacagctgctgcaggcaaatcccattctggaggcctttggcaacgccaagacggtcaaaaacgataactcttcacgttttggtaaattcatacggatcaatttcgatgcctcgggatttatctcgggagccaacatcgaaacatatctgctggagaagtcgcgtgccattcgtcaagcaaaggacgaacgaacattccatatattctaccagttgctggctggggccacgccggagcagcgcgagaagttcatactggatgacgttaaatcgtatgcattcctttccaatggcagcctgcctgtacctggcgtggacgattacgccgagtttcaggcaacggttaagtccatgaacatcatgggcatgacatcagaggatttcaactcgatatttcgcatcgtgagcgccgtcctactgttcggtagcatgaaattccgtcaggagcgcaacaacgatcaggcaactctaccagacaacacggtggcccagaagattgcgcatctactcggacttagtgtgacagacatgaccagggctttcctgacgccacgcattaaagtgggtcgtgactttgttacgaaggcccaaacaaaggagcaggtggagttcgccgtggaggccattgctaaggcgtgttacgagcgaatgttcaagtggcttgtgaaccggattaaccgttctttagaccgcaccaagcgccaaggagcctcctttattggcattctcgatatggcgggttttgaaatatttgaactcaactcctttgagcagctgtgtataaactacactaacgagaaactgcagcagctctttaaccacaccatgtttatcctggagcaggaagagtaccagcgcgagggtattgagtggaagttcatcgactttgggttggacctgcagcctaccatcgacctgatcgataagcccggcggcatcatggcactgctggatgaggagtgctggttccctaaagccactgacaagacgtttgtagataaactcgtatcggcccactctatgcaccccaagtttatgaagacagactttcgaggagtcgcagactttgcaatagtgcattacgccgggcgtgttgactactcggcggccaagtggctgatgaagaacatggacccattgaacgagaacatcgtgtcgctcctccagggctcccaggatccgttcgtggtgaacatctggaaggatgctgaaatcgttggcatggcacagcaggccctgactgatacccagttcggggcccgcacccgcaagggcatgttccgcaccgtgtcccatctgtacaaggagcagctggctaagttgatggacactctgcgcaacacgaacccgaactttgtgcgctgtatcataccgaaccacgagaagcgcgccggcaagatcgatgctcccttggtgcttgaccagttgcgctgcaacggtgtgctcgagggtattcgtatctgccgccagggcttcccaaatcgcattcccttccaggagttccgccaacgatacgaactccttacacccaacgtgattcccaaaggattcatggacggaaagaaggcctgcgagaagatgattcaggcgctggagcttgactcgaacttgtaccgagtgggccagtcgaagatcttcttccgcgctggtgtcctcgctcacctggaggaggagcgtgatttcaagatatccgatcttatcgttaacttccaggccttctgtcgtggcttccttgcgcgtcgcaactaccaaaagcgcttgcagcaactaaacgctattcgaatcatccagcggaattgtgccgcctaccttaagcttcggaactggcagtggtggcgcctctatactaaggtcaagcccctgttggaagttacaaagcaggaagagaagcttgtccagaaggaggatgagctgaagcaggtacgcgagaagcttgacactctggccaagaatacgcaggagtacgagcgcaagtaccagcaggctttggtggagaagaccactctagcagagcagcttcaagccgaaatcgaactttgcgccgaggccgaggagtcgcgctctagactaatggcacgcaaacaagaactggaggatatgatgcaagagcttgagacgcgcatcgaagaagaagaggaacgagtcctcgcgcttggaggcgaaaaaaagaaacttgagcttaatattcaagatctggaagagcaactcgaagaagaagaggccgcacgccaaaaactacaattggagaaagtgcagctcgacgctaaaattaaaaagtacgaagaagatcttgcgttaactgacgaccagaaccaaaagcttctgaaggaaaagaagctattggaagagcgtgctaacgatctgtcccagacacttgctgaggaggaggaaaaggctaaacacctggccaagctgaaagccaagcacgaagccacaatctcggagctcgaggaacgtttgcacaaggatcagcagcagcgacaggagtctgatcgatctaagcggaagatcgagactgaagttgctgatcttaaagaacagctgaacgaacggcgcgtacaagtagatgaaatgcaggctcaactggccaaacgcgaggaagaacttacccagactctgttgcgcattgacgaggaatcggccacgaaggccaccgcacaaaaggctcaacgcgagctggagtcgcagctggccgagattcaagaggacctagaggccgaaaaggcggcccgtgccaaggcggagaaggttagacgcgaccttagcgaggaactagaggctctcaagaatgagttgctggactcgctggacaccacagccgctcagcaagaattgcgttctaaacgcgagcaggagttggctaccctaaaaaagtctctcgaagaggagactgttaaccacgaaggtgttttggccgacatgcgacacaaacattcgcaggagctcaacagcatcaacgatcagcttgaaaacctacgaaaagccaaaacagtccttgaaaaagccaagggcaccttggaggcggaaaacgccgacttggccactgaactgcgcagcgtcaacagctcccggcaagaaaacgaccgacggcgcaagcaggcagagtcgcagattgctgaattgcaggtaaaactggctgagattgaacgcgcccgctcggaacttcaggagaagtgcacaaaactgcaacaggaagctgagaacataacaaaccagctggaggaagccgaactaaaagcctcggccgccgtaaagtctgcaagcaacatggaatcacagcttactgaagcccagcagctgttggaagaggaaacgcgccaaaagttgggtctcagctccaagctgcgtcagatcgagtcagagaaggaggctctacaagagcagcttgaggaggatgatgaagccaaacgtaattacgaacgaaaactggccgaagtcaccacccaaatgcaagaaattaaaaagaaggccgaggaagatgcagatctggccaaagaactggaagaggggaagaagcggctcaataaggatatcgaggcattagaacggcaggttaaggaacttattgcccaaaacgaccgcctcgacaaaagcaaaaaaaagatacagtcggagcttgaagatgccaccattgagttggaagcgcaacgtacgaaggtgctcgaattggagaaaaaacaaaaaaacttcgacaaaattcttgccgaggagaaagccatatcagaacagatcgcccaagagcgtgatactgcagaacgagaggcccgcgaaaaggagaccaaggtgctgtcggtttcccgcgagctagacgaagcctttgacaaaattgaagatcttgagaacaagcgaaagaccctccaaaatgaactcgatgacttggccaacacacagggtacagccgataaaaacgtccacgaactggagaaagcgaagcgggcgctagagtctcagctggctgaactgaaagcacaaaacgaggaacttgaggacgacctacagctgaccgaagacgcgaaattgcgcctagaggtgaacatgcaggcccttcgttcccagtttgaacgcgacctgctagctaaggaagagggtgccgaggagaaaagacgcggacttgtcaagcaactgcgggatcttgagaccgaactagacgaggaacgtaaacagcgcacggctgctgtggcgtcaaaaaagaaactggagggcgacctgaaagagatcgaaaccaccatggagatgcataacaaggtgaaggaagatgcgttgaagcatgcgaagaagctgcaagcacaagtcaaggacgcgctgcgcgacgccgaggaggcaaaggccgccaaggaagagctacaggcgttgagcaaggaggcggagcgcaaggtcaaggccctggaggcagaagtattacagctgactgaagatctggccagctcagagagggcgcgacgtgctgccgaaacggagcgtgacgaattggccgaagaaattgccaacaatgccaacaagggatccttaatgatcgacgagaagcgccgattggaagcccgcattgccactcttgaggaggagttggaggaggaacagtccaactctgaggtgctgctggatcgcagccgcaaggcgcagctgcagattgagcagctgaccactgagttggcaaacgaaaaatcgaactctcagaagaacgaaaacgggcgcgctctgctcgaacgccaaaacaaggagctgaaggctaagcttgccgaaatagagacagcacagcgcactaaagtaaaggcgacaatcgccacgctagaggccaagatcgccaacctagaagagcagctggagaatgagggcaaggagaggctgttgcagcaaaaggccaatcggaagatggacaagaagattaaggagcttacaatgaacatcgaggatgaacggagacacgtcgaccagcacaaggagcaaatggataagctgaatagccgcattaaactgctcaagcgcaacttggacgagaccgaagaggaattgcagaaggagaagacgcagaagcgcaaataccagcgtgagtgcgaggacatgattgaatcgcaggaagccatgaatcgtgagataaactcacttaaaacgaaactacgacgcaccggcggcattggtctcagctccagtcggctcacgggtacaccttcatcaaagcgtgcaggaggaggcggtggcggcgacgactcatcggtccaggatgaatcattagatggagaggattctgccaattgacgcgttaattattagatgaagaaaaagttgaatcgcaggaagaaggtgatgatgaagagcaaaataaacga

SEQ ID NO: 4824 - protein, 2056 aa, DROSOPHILA
MKSAWLALKSKSALHPKSEYPVSNIHYPKAANYRQTRNYLEIAAKMSEEVDRNDPELKYLSVERNQFNDPATQAEWTQKRLVWVPHENQGFVAASIKREHGDEVEVELAETGKRVMILRDDIQKMNPPKFDKVEDMAELTCLNEASVLHNIKDRYYSGLIYTYSGLFCVVVNPYKKLPIYTEKIMERYKGIKRHEVPPHVFAITDSAYRNMLGDREDQSILCTGESGAGKTENTKKVIQFLAYVAASKPKGSGAVPHPAVLINFSVNTNKYIKVKIMAQNQNQTIEVVNGLKMVEVNSNCQEGELEQQLLQANPILEAFGNAKTVKNDNSSRFGKFIRINFDASGFISGANIETYLLEKSRAIRQAKDERTFHIFYQLLAGATPEQREKFILDDVKSYAFLSNGSLPVPGVDDYAEFQATVKSMNIMGMTSEDFNSIFRIVSAVLLFGSMKFRQERNNDQATLPDNTVAQKIAHLLGLSVTDMTRAFLTPRIKVGRDFVTKAQTKEQVEFAVEAIAKACYERMFKWLVNRINRSLDRTKRQGASFIGILDMAGFEIFELNSFEQLCINYTNEKLQQLFNHTMFILEQEEYQREGIEWKFIDFGLDLQPTIDLIDKPGGIMALLDEECWFPKATDKTFVDKLVSAHSMHPKFMKTDFRGVADFAIVHYAGRVDYSAAKWLMKNMDPLNENIVSLLQGSQDPFVVNIWKDAEIVGMAQQALTDTQFGARTRKGMFRTVSHLYKEQLAKLMDTLRNTNPNFVRCIIPNHEKRAGKIDAPLVLDQLRCNGVLEGIRICRQGFPNRIPFQEFRQRYELLTPNVIPKGFMDGKKACEKMIQALELDSNLYRVGQSKIFFRAGVLAHLEEERDFKISDLIVNFQAFCRGFLARRNYQKRLQQLNAIRIIQRNCAAYLKLRNWQWWRLYTKVKPLLEVTKQEEKLVQKEDELKQVREKLDTLAKNTQEYERKYQQALVEKTTLAEQLQAEIELCAEAEESRSRLMARKQELEDMMQELETRIEEEEERVLALGGEKKKLELNIQDLEEQLEEEEAARQKLQLEKVQLDAKIKKYEEDLALTDDQNQKLLKEKKLLEERANDLSQTLAEEEEKAKHLAKLKAKHEATISELEERLHKDQQQRQESDRSKRKIETEVADLKEQLNERRVQVDEMQAQLAKREEELTQTLLRIDEESATKATAQKAQRELESQLAEIQEDLEAEKAARAKAEKVRRDLSEELEALKNELLDSLDTTAAQQELRSKREQELATLKKSLEEETVNHEGVLADMRHKHSQELNSINDQLENLRKAKTVLEKAKGTLEAENADLATELRSVNSSRQENDRRRKQAESQIAELQVKLAEIERARSELQEKCTKLQQEAENITNQLEEAELKASAAVKSASNMESQLTEAQQLLEEETRQKLGLSSKLRQIESEKEALQEQLEEDDEAKRNYERKLAEVTTQMQEIKKKAEEDADLAKELEEGKKRLNKDIEALERQVKELIAQNDRLDKSKKKIQSELEDATIELEAQRTKVLELEKKQKNFDKILAEEKAISEQIAQERDTAEREAREKETKVLSVSRELDEAFDKIEDLENKRKTLQNELDDLANTQGTADKNVHELEKAKRALESQLAELKAQNEELEDDLQLTEDAKLRLEVNMQALRSQFERDLLAKEEGAEEKRRGLVKQLRDLETELDEERKQRTAAVASKKKLEGDLKEIETTMEMHNKVKEDALKHAKKLQAQVKDALRDAEEAKAAKEELQALSKEAERKVKALEAEVLQLTEDLASSERARRAAETERDELAEEIANNANKGSLMIDEKRRLEARIATLEEELEEEQSNSEVLLDRSRKAQLQIEQLTTELANEKSNSQKNENGRALLERQNKELKAKLAEIETAQRTKVKATIATLEAKIANLEEQLENEGKERLLQQKANRKMDKKIKELTMNIEDERRHVDQHKEQMDKLNSRIKLLKRNLDETEEELQKEKTQKRKYQRECEDMIESQEAMNREINSLKTKLRRTGGIGLSSSRLTGTPSSKRAGGGGGGDDSSVQDESLDGEDSAN

SEQ ID NO: 4825 - DNA, 5523 bp, DROSOPHILA
ggctccgcatcgccaacagcgatgagcagatcaaagagcagtggcacagagatcaggtagttgctgtacagcaggctgccgtgttgcttcgggctaatccactccgagtccgattccttaccggtgcacagtcgcattatcagacgcacgacgagatcgagcagctgtccgtacagcagatgggcctggtccaactccttgtcccggctgacatctgtctgtctgtagtagggattagcgcgctgcaggaatgtgacaacggccgccatggccgattcatcgtacaccatgtaggaccagaatctggcggggatcaagtgttaatgtcttcggtatactgagcgcaacacgatgtagcttactcgtgctgcgtcaggctcagcaggaactccatgtccccacggaaattgttcgccgcgaaggtccattcctccagtgcagctccggattttaggcgtccataggagctcaacatgcacaaatagctggcaaagggcttctcgcgctgcacccagtgctcgtcctgtccacaaaaaaaaaaaacacatatgcatagtactatctcgccggaggtgcaccaacatgtccacttaccagcgccggaacgttcctgcgcaccccatccttgccggaaagtgcaaacttgagttcgtccagtggcagattctgtgggttgcagttgttgttgttgctggtgtcgttgtccagcatgtcggccccccctttggctggcaacactctcgaattgttgctagggtatttcttcaataacaaaattcaataaaactagcgaatttcgtgcgatgcaaggtggcagcacattgataaggtggcgcacgcaggctcagcttgtaatgtcataaggtgcgtgaacaagagttgccagacgatcagagtggttcgatgattatcgatattgagtagtaatcgaacttgaagcttaagtgtcgaaagaattcagttggtttaaaattttcaaaccaaaaggagtttctctctgctcaagtggaaggcgataaaaaagccattagtacgcgatttgtttatttacttggcaaagcgctgcacgtgaccttgctagccgtacatatattaggcgcagcatggagccaattggagatctgcaagtgcccagcttcaaggtggtgtccgggggaaccaccttcacgtacgccagtccgaaatccggagcagcctccctcgactttctcgcgcacaccctgcggaaaagggaggcgaacacagaaaaaactattctgatatgtcagcagaatttcgaggccgagcgtctgaaatttgagctcgccgagcgggatgtcaacactattctcctgcccccgcatggggcaatggtcggtcaagtgctgctcctctggtccaagggggtgagtttgaatcggatcactaacattacatcagcggaggttatttatcctctttccagtacatcaaccaagctctaattctctgcgatggcatgctcgagcatcttggagtagtcgaggcgaacctggtgatccacacaacgctgccggaactgaacaagttcgaggagcgtttgaagtggctgagcatatcggcgagaaacgccgagatgttggtcataactccgtgcgacgaagagaatgaaaaagaaggcaagggagagaccgaaccggagatcgtccagcaaagaatgccactcaaagtagatgccctaaattccatgcagctttatgaaataaaggagaatacgccgccgacatcatcggaggattacaaggcggaggcggatgtcctgctaagtgctgcaactccagcgacaatcccaaacgacaataaggagcaagagataaatttaagcgtggaggatgctacagtaaagctcctggcttcttttgagttgggcagcactgattcggcggcagtggacgaatcctctccagctgctgctaagttcaatgctcctgtctactctcctttcgttactgaaaatccaacgaagtctttggacgccgagtttcaagagctcgtaaagtcgtttaaggtgcaaaacgtattcaaaaacatgaacttgccgcctcctccctctgttagcattgaagaaccggtgtccagtgcctccgcttctgattatcgacatcagatcgacaccacttcgctggattccattcgaactgtgaaggattcacctgcctctctagcagtggttcccttttctgcagggggaataacttacaacaactatggcgttctcggctggagtcgccacgcggtcgtgccgtgctacggtttgaccgaagcgccggacataagcaccatcatcaggcgggccatgcagcagatgggtgtggctaggtcgcgagcgcgggcggtccagagattcgcctggccacatgtctcgttgggtaaatccgttttagttgtgggcaacttacagatcgggaagacgtggtcctacctgcccaccgtgtgccagcgcagccacgaggatctgcagcgacggccagatgttggccgtggacctacctgcatctttgtgtgtcccaaccaggggcagggcaaacagatcgaacgctggatgagcacgttgctctgtttgctgggcagtgcgtcggggtttgaggatgtcgttacccactgggacaagacccaattggtggacatcgttcgccggctcaaaaagcccgttggaatcctgctaaccagcgtggacttgttgctccaactgctgaaccataacccggtcgggagcattttcgatgcccaggcggtgaagtgcatagccttggataacctgaacgacatggttcgtgtcctgccaaacgacacgatgaagctgctgcaacgattgcccgaaatgttccagctcacccaaaataagtgccaactgctcgtctccggccgcatttggcacaccgatctaatggtgcagcacattctgcctctgatgcccgacgtcctcgttctcttcgacgacgccttggaggcgagtgtctatggcggcgtccagctggacgtgagagtcgtggcggatgagccggagaagatcgagcatttgaaggcgctgatcgctgagcgcaggaactttgccaatgagcccgccgttatggtctgctccaactcgacagaggtactcctactccgccgtagtctgcaagcgattggggtgaatgcacatatctgcgtatcggaggcgtgctactccaatgtcgccgagtggctacgccagtccccgagtggcctgctgctggtcacggatgatgtggtgccgagactgaaatgcggaaagatcccgctgctcatccactacagctttgccagcatgtgggcgcgcttcaagaaccgcttcagcctgttctacgcaaacctcaaatcgccaacgacgcgcccagtcggccagtccgtggtctttgccaagcccactgatttggagaacatctggaagctgtgcgacttttacatgaagcacaagctgcccaggcccggccatttgctgggaatcctttcgcagcgacgcctggaagagcaaccgacaagcagaagtctctgccaccaaatggccgctttcggggattgcctgaggcacaagtgcatgtatcgccatgtgatgtggcgggacgaggtgctgccgccagatcactatcccaaaaatggattgattcggttcttggttctagttgtaagtactctcgatatgatcgctaacaaggcttcaccactaaatccttttccattttctagtgctacagcccagctgcgttggctgtgcgcttgagcgaccagtttcccacagcgatccgcttcctcaactttccgatgagcgatctgggcgagcgagtgcagcgccactacgaactggaggcgaaccggcacatgcatcccaatcccgtgcccggcgagatggcggtggtcaagaacatcaaccgctacgagcgggtgcacattgtcagtgtggaaagcaatgtcatggtgttggtgcaactgttggacacgtccaccgaatgtttttcctacaaaaccagccagctgtacagctgcgataagatcttcaaggtatggccatacatgatgatagatgatagtagtatggattcactgcaaactgttgttctctgtcacaggattcacccagagaagcgatggatttgaggatccttggcctgcagcccgagagcctcgatcgcatctggcccgatgacgcccgcaatttggtgcgcaaggatttctttcgtcgcacgcataacaagcggaatcgccaattccacgccgtcgtccagtccgccatccatcgcacgatcttcgttcgcaacatatacgacgacgagggcaacgacctgctcagcttcgtcatcaatcgctttcgctcgcatcaggatgagtgctgccagctcaagctcgatgcgatggtgatgagctccaaggactgtccatatatgtagcttctagtttcatcactgtccactgaccactggccagcattctcttgcgaaagaaaccagcttcttcggaaaaccaattcaatttcctattacatttaaacgcatttatataaatatttttcaaaatattgttttacaaatattaatgataatcgaacgtgagctttaatcgttcgacatcatcggattcaaaatatttgagcaagctaagatcttgccatgtgctattcttaaacttgaacttgaaagtgaaataaagggcatgcgctcaagagttttttttttaagtgtactgagtgctttcgtttgttacatgttcatagctaacaatcgatatacctagtctagatctcctagatctagttgagagattagctgccatatctagccaaagaaccgtttcatttccgtgcaaaggtgtatgtccatgtgtgttaagttcgcaacttgcgcatttaatgtcgttttccaatgtcctaatcatgcgacagcccgacgaggtaggctccaaacgcatccaaacgttccatccgtagtgactccaccttgatttccagggcaagtgccacatttgcaagcgtgtcttctgttgcggcaaatgccgccagaagcatcagttcaaagcgcacgccattgctgtgcgcgagccattgggattgaggtctgccggcggcggtatcatcgagcatcgccatcaaatggagtccggcgcgaccaccatctatgtgttctgtccgatctgcgagcggcgtcccctgctgctgcgcgaggagatgcacggcgagctgctggcccacatcgagacctgccacctgccgctgcgatgccgcaagtgccagcgcaactacacgcgcgtcgatgacctgcgggagttcagcaagtgcgtggaccagcagcagagctgcactgatgtcaccggcgccacggagacatcgaaggcgacgctaaagaaggcagcgaatagcaccgccatttcaacgcaaacgtcgccgtccgtaacgcccatttcactgatcaacatgcgctggaaggccaagagccgtgtcacccacgaggagttcatcagcgacagcgtctcctccatacgcaacctgtcgtcgtt

SEQ ID NO: 4826 - DNA, 3334 bp, DROSOPHILA
ctcaagtggaaggcgataaaaaagccattagtacgcgatttgtttatttacttggcaaagcgctgcacgtgaccttgctagccgtacatatattaggcgcagcatggagccaattggagatctgcaagtgcccagcttcaaggtggtgtccgggggaaccaccttcacgtacgccagtccgaaatccggagcagcctccctcgactttctcgcgcacaccctgcggaaaagggaggcgaacacagaaaaaactattctgatatgtcagcagaatttcgaggccgagcgtctgaaatttgagctcgccgagcgggatgtcaacactattctcctgcccccgcatggggcaatggtcggtcaagtgctgctcctctggtccaaggggtacatcaaccaagctctaattctctgcgatggcatgctcgagcatcttggagtagtcgaggcgaacctggtgatccacacaacgctgccggaactgaacaagttcgaggagcgtttgaagtggctgagcatatcggcgagaaacgccgagatgttggtcataactccgtgcgacgaagagaatgaaaaagaaggcaagggagagaccgaaccggagatcgtccagcaaagaatgccactcaaagtagatgccctaaattccatgcagctttatgaaataaaggagaatacgccgccgacatcatcggaggattacaaggcggaggcggatgtcctgctaagtgctgcaactccagcgacaatcccaaacgacaataaggagcaagagataaatttaagcgtggaggatgctacagtaaagctcctggcttcttttgagttgggcagcactgattcggcggcagtggacgaatcctctccagctgctgctaagttcaatgctcctgtctactctcctttcgttactgaaaatccaacgaagtctttggacgccgagtttcaagagctcgtaaagtcgtttaaggtgcaaaacgtattcaaaaacatgaacttgccgcctcctccctctgttagcattgaagaaccggtgtccagtgcctccgcttctgattatcgacatcagatcgacaccacttcgctggattccattcgaactgtgaaggattcacctgcctctctagcagtggttcccttttctgcagggggaataacttacaacaactatggcgttctcggctggagtcgccacgcggtcgtgccgtgctacggtttgaccgaagcgccggacataagcaccatcatcaggcgggccatgcagcagatgggtgtggctaggtcgcgagcgcgggcggtccagagattcgcctggccacatgtctcgttgggtaaatccgttttagttgtgggcaacttacagatcgggaagacgtggtcctacctgcccaccgtgtgccagcgcagccacgaggatctgcagcgacggccagatgttggccgtggacctacctgcatctttgtgtgtcccaaccaggggcagggcaaacagatcgaacgctggatgagcacgttgctctgtttgctgggcagtgcgtcggggtttgaggatgtcgttacccactgggacaagacccaattggtggacatcgttcgccggctcaaaaagcccgttggaatcctgctaaccagcgtggacttgttgctccaactgctgaaccataacccggtcgggagcattttcgatgcccaggcggtgaagtgcatagccttggataacctgaacgacatggttcgtgtcctgccaaacgacacgatgaagctgctgcaacgattgcccgaaatgttccagctcacccaaaataagtgccaactgctcgtctccggccgcatttggcacaccgatctaatggtgcagcacattctgcctctgatgcccgacgtcctcgttctcttcgacgacgccttggaggcgagtgtctatggcggcgtccagctggacgtgagagtcgtggcggatgagccggagaagatcgagcatttgaaggcgctgatcgctgagcgcaggaactttgccaatgagcccgccgttatggtctgctccaactcgacagaggtactcctactccgccgtagtctgcaagcgattggggtgaatgcacatatctgcgtatcggaggcgtgctactccaatgtcgccgagtggctacgccagtccccgagtggcctgctgctggtcacggatgatgtggtgccgagactgaaatgcggaaagatcccgctgctcatccactacagctttgccagcatgtgggcgcgcttcaagaaccgcttcagcctgttctacgcaaacctcaaatcgccaacgacgcgcccagtcggccagtccgtggtctttgccaagcccactgatttggagaacatctggaagctgtgcgacttttacatgaagcacaagctgcccaggcccggccatttgctgggaatcctttcgcagcgacgcctggaagagcaaccgacaagcagaagtctctgccaccaaatggccgctttcggggattgcctgaggcacaagtgcatgtatcgccatgtgatgtggcgggacgaggtgctgccgccagatcactatcccaaaaatggattgattcggttcttggttctagtttgctacagcccagctgcgttggctgtgcgcttgagcgaccagtttcccacagcgatccgcttcctcaactttccgatgagcgatctgggcgagcgagtgcagcgccactacgaactggaggcgaaccggcacatgcatcccaatcccgtgcccggcgagatggcggtggtcaagaacatcaaccgctacgagcgggtgcacattgtcagtgtggaaagcaatgtcatggtgttggtgcaactgttggacacgtccaccgaatgtttttcctacaaaaccagccagctgtacagctgcgataagatcttcaaggattcacccagagaagcgatggatttgaggatccttggcctgcagcccgagagcctcgatcgcatctggcccgatgacgcccgcaatttggtgcgcaaggatttctttcgtcgcacgcataacaagcggaatcgccaattccacgccgtcgtccagtccgccatccatcgcacgatcttcgttcgcaacatatacgacgacgagggcaacgacctgctcagcttcgtcatcaatcgctttcgctcgcatcaggatgagtgctgccagctcaagctcgatgcgatggtgatgagctccaaggactgtccatatatgtagcttctagtttcatcactgtccactgaccactggccagcattctcttgcgaaagaaaccagcttcttcggaaaaccaattcaatttcctattacatttaaacg

SEQ ID NO: 4827 - protein, 1042 aa, DROSOPHILA
MEPIGDLQVPSFKVVSGGTTFTYASPKSGAASLDFLAHTLRKREANTEKTILICQQNFEAERLKFELAERDVNTILLPPHGAMVGQVLLLWSKGYINQALILCDGMLEHLGVVEANLVIHTTLPELNKFEERLKWLSISARNAEMLVITPCDEENEKEGKGETEPEIVQQRMPLKVDALNSMQLYEIKENTPPTSSEDYKAEADVLLSAATPATIPNDNKEQEINLSVEDATVKLLASFELGSTDSAAVDESSPAAAKFNAPVYSPFVTENPTKSLDAEFQELVKSFKVQNVFKNMNLPPPPSVSIEEPVSSASASDYRHQIDTTSLDSIRTVKDSPASLAVVPFSAGGITYNNYGVLGWSRHAVVPCYGLTEAPDISTIIRRAMQQMGVARSRARAVQRFAWPHVSLGKSVLVVGNLQIGKTWSYLPTVCQRSHEDLQRRPDVGRGPTCIFVCPNQGQGKQIERWMSTLLCLLGSASGFEDVVTHWDKTQLVDIVRRLKKPVGILLTSVDLLLQLLNHNPVGSIFDAQAVKCIALDNLNDMVRVLPNDTMKLLQRLPEMFQLTQNKCQLLVSGRIWHTDLMVQHILPLMPDVLVLFDDALEASVYGGVQLDVRVVADEPEKIEHLKALIAERRNFANEPAVMVCSNSTEVLLLRRSLQAIGVNAHICVSEACYSNVAEWLRQSPSGLLLVTDDVVPRLKCGKIPLLIHYSFASMWARFKNRFSLFYANLKSPTTRPVGQSVVFAKPTDLENIWKLCDFYMKHKLPRPGHLLGILSQRRLEEQPTSRSLCHQMAAFGDCLRHKCMYRHVMWRDEVLPPDHYPKNGLIRFLVLVCYSPAALAVRLSDQFPTAIRFLNFPMSDLGERVQRHYELEANRHMHPNPVPGEMAVVKNINRYERVHIVSVESNVMVLVQLLDTSTECFSYKTSQLYSCDKIFKDSPREAMDLRILGLQPESLDRIWPDDARNLVRKDFFRRTHNKRNRQFHAVVQSAIHRTIFVRNIYDDEGNDLLSFVINRFRSHQDECCQLKLDAMVMSSKDCPYM

SEQ ID NO: 4828 - DNA, 6255 bp, DROSOPHILA
gaaagtgactacgaatagtcctataaaaacaaactcggagaatcgctttcattatgcgctacaacaattcacagtactttgtattccccattttccctttggtaaacacttttaacaatgtgtttcgagctaacattttgtcaacgttatgcttagtctaaaatagaaaggattaaacttccctttgctaagagacataacgtgacattgttgaatctttaagttttatagttccaaaaatctatgcgtttatagagataggaggacatgaacagatcgaatcggttaatgatcctcaataagaataaatgtaaattctagggacggaaacgtttccttccagcagtcaactattatgtaaaaatcaacaaatataccaaattttgaataggatctagagaatgatttaaagttactgttaaataagccttctcgaaaactgttggtcatcgaaaacatggaagatgagaccggatttacaagtggttttctgtccttaatagctttatttgtattgattaatgtaagaattctcaaattctaaagattggcatcaaaacctgatccaactaataatgaatccttttcaactggttatcaactatgacctttgttaacgtcaaaccaccctcgcgaattatttggagttcgtttctgcaacacacacaaaaatgaaagtctcggtatcttggtacctgtattaatgttatggaggtttattcaatattttacaataaagctaggcaagtgataaatcagaaatgttttaatcaattcggatatgttcaaaaaatctagtgatgcagttgcactttttctcggagactcccttgtttataatttgcaggacaaataaacaaaaataatacagcctattttgggctttcaaacaaacaacatggccgccatttggatttgaatagctatcgataggtgccgtcggccagctgacaatccatccactgcctatcgataatatctagctgagcaagatgtacggatttgtgagcacacactttagtttttcgttaggaacgggacgttcgttctgttgcgcaccaaattttttcggacccaatgcaaatgcaaacgcttttgcggcgtgtgtagtgcattcaaaattaccagatacccaacgggatccaaagttcccagagcagtggcaccggaatcgatgcgaccagcagtcagcggaagcgtaagaaattcgcgcctaggtggacaaaaatcgatctgtgacgcggtttaaaccaaggtaactccgctatccatgaataaaatcagctcttcccacgggtgcttccgccatggggccacagtgcgggtcctgtggccaattcaccttgaacccagtattgcagaaggggccgcataccaagtccaattccctgcgcttgtgtgtatacctgcgcctcttccgcatgtgtgtgcataaacattgacgcccacccgcccgataaacagctgttagaccgattgccgtccgcttccccagatttccaaggcggtcgaggcggaaaaggggaaggccccttatgagcgtaggcttgacgggggcgggcccgtgtttgtggcaaggcgaaggtgaaagtcatcagctgatatgggccagcctgctaaacccgttatgcagagcagctgttcgacgccaacttcatatgtgggacaaaatcccagccgcgaactcacatactgggttccccagttatatccggatagcgggcacctcgctatcgcaggccgatataaattagaggctttcgcgctgcagatgtgaggcctaattgaagatttctttgttcgttcgcaggctgcacgacacttcgaggacttttatgtgattattactatgaaattggatgaaatagttgcatggtaagcgaacaatgcttcattactctctccctctccggactatcaaattatccgctgttgaatttttgtaggtaccagaagagaatcggcacctatgacaagcaagaatgggaaaagaccgtcgaacagaggatattggacggcttcaatagtgtcaatttaaaaaacaccaagctgaagacggagctaatcgatgtggacttggtgcgaggtgtgtttaacctgactgaccccaaatagtgcccataattgaaacacattttttaggttccacgttccctaaggccaagcccaagcagtcgttactcactgtgatacgcctggccattctgcgctatgtcctgctgcccctctatgcccagtggtgggtcaagcagaccacgccaaacgccttcggcttcatccttgtgctttacctcacacagttaaccaactgggctatctacgtgcttcacagcagtcgcatagtgccccttgactatgagaagccgccaaatggaaccctgcttcaggcagaggcagatggagatgcctccgataaggatgcagataaggagtccgaggaacatgccgccctcctcagtgccctgcttattccgtgcgccctaagcttgctgatcagtctcatccactcacaaattgtagccactaacaccgcctcgggtgtctctggcgggagtagcaagaacaagctgcgtcgcatatctgcaagctacttaagcgacaaagcagcaaccagggagaaccgggtgcgacgtcgcaagaagattgtgcggtaagaacgaagctcttttcggaaccaaatattgaattctttttttagagttcgacaagtggaggctgacttgtcccaggccagcagtaacatatcacttccaaacagaagaaccgcaaccagcacaatcgaagttcttcccagaccggtcacgcctttgccttcaccaacagttacctgtgccacggtgccagaccccaccacgccgactacgccttcgccatctgttatcaggcggagcaccaacgaggagacctatttgacaacgactgcaatcagcccactaacgcaaccgctggcagccatagacgcatgctacgatctcagcagaaaggcagggggagctgctcccgaaagccccaaaaagcgcaacgtcaactggcacacgcctattcagatatacgctacctacgagctgggcgaagagccgtgctccagcagaaaagtcgcagaagaaagtgcgcctgagtcggttggagaaagattgtgttccgtcaagccagactaccagacgcgtcgaaacatcggggaggacgatggcttcgagagtctgaatggaaagagctcaagtggagaggacaacaaccattcgcctttgccaaacgcggtggctgttgcggctccaccagctcctgttcagaccaatcagttgcgtctgcgattaaacacaacaaacggtgtgaccgccagtgcttctccaaccgagaagaaaccccagtcgcgcggcaatgaatcctcaacgagttgcgccgaatcggatgagtgcgatgatgccgacattatgtccagtcccgcctcgggctgtaaccaagagtgcaccacttctgccaccgactggctgggggtgacgacaaatagcgaagactgcagttacacctctgatctggatcactctgacgggggcttgaagcacacggcctttagcgacgaagatcctggagagctggacatcacccctaccactatactaaatccacatagcagcctcgaccgtagtatgtattaccaaccaaatttgcatcttcgttcacgctataacattgaacttataaagttagctgcaccatttgggatcagcgagatgccaaaaaggcgcagctttccgtgctggagatcgcgtcttgcataatcgaacgcgtggactcaatgggcgaggccaacgactacatctacataggcgtggtcttctctttcctgctcacattgattcccatcttctgccgtctctgcgaggtatgttgccgggaaggttttggtggaggagactacttattactggtcaaatgcactcaggtcacactcgggagcgatgcagagaaggccagtgagattagctactttaacatgccgcagctgctgtgggagaagtcatcggcatcgctcttcaccctgctgggccttgccttcggcgacagccagtgggagcgcatggtattggctctgggctttgtccaacgcctttgcctgaccctcatactgttcataatattcgccgttgcagagcgcaccttcaagcaacgcttcctttacgccaaactcttctcccacctaacttcatcacgtagggctcgaaagtcaaatcttccccacttccgtttgaacaaggtgcgtaacatcaagacctggctgagcgtgaggtcgtatttgaaggtaaatataaacatccgcgtatttcttgatcaaaggcactgagttgcattccccatagaaacgcggaccccagcgatcggtggatatcatcgtttccgccgccttcatagtaaccctcctgttgctggccttcctcagcgtcgagtggctgaaggattcggctcatctgcacacacaccttaccttggaggccctaatctggtccataacaatcggtatctttctgctgcgcttcatgaccctaggtcagaagatacagcacaagtaccgcagtgtgtcggtgctgattacggagcaaattaacttgtatctgcagatcgagcagaagccaaagaaaaaggacgagctgatggtgtcgaacagcgtgctcaagctggccgccgatctgctaaaggaactcgaaacgccattcaagctctctggccttagtgccaatccatatctattcacaaccatcaaggtggtaatcctgtcggccctatcgggcgtgcttagcgaagttttaggctttaaactgaagctgcataaaatcaagatcaagtaacctatgcaaggcgcagacccatcatatttttgtagtacaactttttagaaacgctttaagagaaatctaacactacactctaaattagttaagtgaataaatttaagcgagccaatgtttatgcttgtcacgtgattgtttagctacgttaacaagcccactaacgactacgtaaaccaacagaaattagtatttacctacttaccttctagagcgacctgcacaatcacaaatcatgtttaggcaaattgtgcaatgcaatgaatcgcatgaaagttcatagaactttaagcctaaaatcagtgcacctattgtagttggctgttcattctgttacagtcccaagttaaattcctaaggcggtctcagctagtgttgcaattaataaatgttagtaaactataataaaaatctcgtttaaaataatatgctttgtctatcttactagtatataccaattggatgtttatagctgtgaaagcaacaaattggttctacctttttcttcattggatagaaagatctgatctagatgttaatctttaatctttgttgaaaactatatccttttttctttctgtgcaacacccgtctgctcttcgttaatcgatagttggctcaatagcgatcgaccagctgttgctgttatcgttatcagttcggccacccacaactgacgtaactttcgcctccactcgcgtggtaattttcgcatttagctcccttaaaatcccaccccccacaaaatgatccggcttaattggctattcaggagctcctcggtgctgctgcgcagccaggtgcgactgctccatgtgggagatgccaatgttttgcatagcgaggtagacaagcagtccgccgagtacaaggtgcatataaacaggctgtatttatgtttacataccagctaaagtccaagcttttttaggaaaatgccagagagatggccagtttggttggagatctgcggaacttcaccagccaggtgctcaagggaggcggacaaaaggccatcgagcgacacacatcgcggggtaaactcttagccagggagcgcatcaacctgctcctggataaaggatcgcccttcctagaactcagtgctttggccggacacgagttatatggcgaagaggtggtcaactccgggggaatcgtcaccggagtgggacgcgtttgcgggtaggtctgaaaaatccaagttgatcgaagttccacatcagaacttttagcgcttgcatagcacattcagtctgcagaagacaaggttacgcgtcattagggttaattaggtcgtagattatatttagattataattatagatcggcataaatagccgatccgatctagccgtgcccccagtctgtctgttcgtataaacgtaacgatctccggaactattcaaga

SEQ ID NO: 4829 - DNA, 3408 bp, DROSOPHILA
atttgtgagcacacactttagtttttcgttaggaacgggacgttcgttctgttgcgcaccaaattttttcggacccaatgcaaatgcaaacgcttttgcggcgtgtgtagtgcattcaaaattaccagatacccaacgggatccaaagttcccagagcagtggcaccggaatcgatgcgaccagcagtcagcggaagcgtaagaaattcgcgcctaggtggacaaaaatcgatctgtgacgcggtttaaaccaaggctgcacgacacttcgaggacttttatgtgattattactatgaaattggatgaaatagttgcatggtaccagaagagaatcggcacctatgacaagcaagaatgggaaaagaccgtcgaacagaggatattggacggcttcaatagtgtcaatttaaaaaacaccaagctgaagacggagctaatcgatgtggacttggtgcgaggttccacgttccctaaggccaagcccaagcagtcgttactcactgtgatacgcctggccattctgcgctatgtcctgctgcccctctatgcccagtggtgggtcaagcagaccacgccaaacgccttcggcttcatccttgtgctttacctcacacagttaaccaactgggctatctacgtgcttcacagcagtcgcatagtgccccttgactatgagaagccgccaaatggaaccctgcttcaggcagaggcagatggagatgcctccgataaggatgcagataaggagtccgaggaacatgccgccctcctcagtgccctgcttattccgtgcgccctaagcttgctgatcagtctcatccactcacaaattgtagccactaacaccgcctcgggtgtctctggcgggagtagcaagaacaagctgcgtcgcatatctgcaagctacttaagcgacaaagcagcaaccagggagaaccgggtgcgacgtcgcaagaagattgtgcgagttcgacaagtggaggctgacttgtcccaggccagcagtaacatatcacttccaaacagaagaaccgcaaccagcacaatcgaagttcttcccagaccggtcacgcctttgccttcaccaacagttacctgtgccacggtgccagaccccaccacgccgactacgccttcgccatctgttatcaggcggagcaccaacgaggagacctatttgacaacgactgcaatcagcccactaacgcaaccgctggcagccatagacgcatgctacgatctcagcagaaaggcagggggagctgctcccgaaagccccaaaaagcgcaacgtcaactggcacacgcctattcagatatacgctacctacgagctgggcgaagagccgtgctccagcagaaaagtcgcagaagaaagtgcgcctgagtcggttggagaaagattgtgttccgtcaagccagactaccagacgcgtcgaaacatcggggaggacgatggcttcgagagtctgaatggaaagagctcaagtggagaggacaacaaccattcgcctttgccaaacgcggtggctgttgcggctccaccagctcctgttcagaccaatcagttgcgtctgcgattaaacacaacaaacggtgtgaccgccagtgcttctccaaccgagaagaaaccccagtcgcgcggcaatgaatcctcaacgagttgcgccgaatcggatgagtgcgatgatgccgacattatgtccagtcccgcctcgggctgtaaccaagagtgcaccacttctgccaccgactggctgggggtgacgacaaatagcgaagactgcagttacacctctgatctggatcactctgacgggggcttgaagcacacggcctttagcgacgaagatcctggagagctggacatcacccctaccactatactaaatccacatagcagcctcgaccgtattagctgcaccatttgggatcagcgagatgccaaaaaggcgcagctttccgtgctggagatcgcgtcttgcataatcgaacgcgtggactcaatgggcgaggccaacgactacatctacataggcgtggtcttctctttcctgctcacattgattcccatcttctgccgtctctgcgaggtatgttgccgggaaggttttggtggaggagactacttattactggtcaaatgcactcaggtcacactcgggagcgatgcagagaaggccagtgagattagctactttaacatgccgcagctgctgtgggagaagtcatcggcatcgctcttcaccctgctgggccttgccttcggcgacagccagtgggagcgcatggtattggctctgggctttgtccaacgcctttgcctgaccctcatactgttcataatattcgccgttgcagagcgcaccttcaagcaacgcttcctttacgccaaactcttctcccacctaacttcatcacgtagggctcgaaagtcaaatcttccccacttccgtttgaacaaggtgcgtaacatcaagacctggctgagcgtgaggtcgtatttgaagaaacgcggaccccagcgatcggtggatatcatcgtttccgccgccttcatagtaaccctcctgttgctggccttcctcagcgtcgagtggctgaaggattcggctcatctgcacacacaccttaccttggaggccctaatctggtccataacaatcggtatctttctgctgcgcttcatgaccctaggtcagaagatacagcacaagtaccgcagtgtgtcggtgctgattacggagcaaattaacttgtatctgcagatcgagcagaagccaaagaaaaaggacgagctgatggtgtcgaacagcgtgctcaagctggccgccgatctgctaaaggaactcgaaacgccattcaagctctctggccttagtgccaatccatatctattcacaaccatcaaggtggtaatcctgtcggccctatcgggcgtgcttagcgaagttttaggctttaaactgaagctgcataaaatcaagatcaagtaacctatgcaaggcgcagacccatcatatttttgtagtacaactttttagaaacgctttaagagaaatctaacactacactctaaattagttaagtgaataaatttaagcgagccaatgtttatgcttgtcacgtgattgtttagctacgttaacaagcccactaacgactacgtaaaccaacagaaattagtatttacctacttaccttctagagcgacctgcacaatcacaaatcatgtttaggcaaattgtgcaatgcaatgaatcgcatgaaagttcatagaactttaagcctaaaatcagtgcacctattgtagttggctgttcattctgttacagtcccaagttaaattcctaaggcggtctcagctagtgttgcaattaataaatgttagtaaactataataaaaa

SEQ ID NO: 4830 - protein, 900 aa, DROSOPHILA
MKLDEIVAWYQKRIGTYDKQEWEKTVEQRILDGFNSVNLKNTKLKTELIDVDLVRGSTFPKAKPKQSLLTVIRLAILRYVLLPLYAQWWVKQTTPNAFGFILVLYLTQLTNWAIYVLHSSRIVPLDYEKPPNGTLLQAEADGDASDKDADKESEEHAALLSALLIPCALSLLISLIHSQIVATNTASGVSGGSSKNKLRRISASYLSDKAATRENRVRRRKKIVRVRQVEADLSQASSNISLPNRRTATSTIEVLPRPVTPLPSPTVTCATVPDPTTPTTPSPSVIRRSTNEETYLTTTAISPLTQPLAAIDACYDLSRKAGGAAPESPKKRNVNWHTPIQIYATYELGEEPCSSRKVAEESAPESVGERLCSVKPDYQTRRNIGEDDGFESLNGKSSSGEDNNHSPLPNAVAVAAPPAPVQTNQLRLRLNTTNGVTASASPTEKKPQSRGNESSTSCAESDECDDADIMSSPASGCNQECTTSATDWLGVTTNSEDCSYTSDLDHSDGGLKHTAFSDEDPGELDITPTTILNPHSSLDRISCTIWDQRDAKKAQLSVLEIASCIIERVDSMGEANDYIYIGVVFSFLLTLIPIFCRLCEVCCREGFGGGDYLLLVKCTQVTLGSDAEKASEISYFNMPQLLWEKSSASLFTLLGLAFGDSQWERMVLALGFVQRLCLTLILFIIFAVAERTFKQRFLYAKLFSHLTSSRRARKSNLPHFRLNKVRNIKTWLSVRSYLKKRGPQRSVDIIVSAAFIVTLLLLAFLSVEWLKDSAHLHTHLTLEALIWSITIGIFLLRFMTLGQKIQHKYRSVSVLITEQINLYLQIEQKPKKKDELMVSNSVLKLAADLLKELETPFKLSGLSANPYLFTTIKVVILSALSGVLSEVLGFKLKLHKIKIK

SEQ ID NO: 4831 - DNA, 4271 bp, DROSOPHILA
ggcgaaccggcacatgcatcccaatcccgtgcccggcgagatggcggtggtcaagaacatcaaccgctacgagcgggtgcacattgtcagtgtggaaagcaatgtcatggtgttggtgcaactgttggacacgtccaccgaatgtttttcctacaaaaccagccagctgtacagctgcgataagatcttcaaggtatggccatacatgatgatagatgatagtagtatggattcactgcaaactgttgttctctgtcacaggattcacccagagaagcgatggatttgaggatccttggcctgcagcccgagagcctcgatcgcatctggcccgatgacgcccgcaatttggtgcgcaaggatttctttcgtcgcacgcataacaagcggaatcgccaattccacgccgtcgtccagtccgccatccatcgcacgatcttcgttcgcaacatatacgacgacgagggcaacgacctgctcagcttcgtcatcaatcgctttcgctcgcatcaggatgagtgctgccagctcaagctcgatgcgatggtgatgagctccaaggactgtccatatatgtagcttctagtttcatcactgtccactgaccactggccagcattctcttgcgaaagaaaccagcttcttcggaaaaccaattcaatttcctattacatttaaacgcatttatataaatatttttcaaaatattgttttacaaatattaatgataatcgaacgtgagctttaatcgttcgacatcatcggattcaaaatatttgagcaagctaagatcttgccatgtgctattcttaaacttgaacttgaaagtgaaataaagggcatgcgctcaagagttttttttttaagtgtactgagtgctttcgtttgttacatgttcatagctaacaatcgatatacctagtctagatctcctagatctagttgagagattagctgccatatctagccaaagaaccgtttcatttccgtgcaaaggtgtatgtccatgtgtgttaagttcgcaacttgcgcatttaatgtcgttttccaatgtcctaatcatgcgacagcccgacgaggtaggctccaaacgcatccaaacgttccatccgtagtgactccaccttgatttccagggcaagtgccacatttgcaagcgtgtcttctgttgcggcaaatgccgccagaagcatcagttcaaagcgcacgccattgctgtgcgcgagccattgggattgaggtctgccggcggcggtatcatcgagcatcgccatcaaatggagtccggcgcgaccaccatctatgtgttctgtccgatctgcgagcggcgtcccctgctgctgcgcgaggagatgcacggcgagctgctggcccacatcgagacctgccacctgccgctgcgatgccgcaagtgccagcgcaactacacgcgcgtcgatgacctgcgggagttcagcaagtgcgtggaccagcagcagagctgcactgatgtcaccggcgccacggagacatcgaaggcgacgctaaagaaggcagcgaatagcaccgccatttcaacgcaaacgtcgccgtccgtaacgcccatttcactgatcaacatgcgctggaaggccaagagccgtgtcacccacgaggagttcatcagcgacagcgtctcctccatacgcaacctgtcgtcgttcagcaacagctccattcgtcgctccattggccaactgggcgtgaatccgtccgaaacgatggagaagggcaaggtcatacgctcgacgtccacaccactgcacgtggagtccgtgttcgccaagcccaaggagccgattaccttcaatgcttccactggcggccacgtgtccagcatctaccacgaggagcccagtccgacacccgaaagcaatcccgtccagcagcagcagcagcagcagcagccgttgcagcagcgcgcctggaaaatgggcgcccgcaacaagatgagcgccgcaacgccgctgcgccaggtcatgtccaagagcattcagaaggccttcgtcgagcacggcggcatgatggtccaccagccaccatccgcagtggtgcaacgtcgcgtgcgcctcgatctcagcgagcacagttcgcacgaggcagcaggctcgtccgctctggacctgcgactctcgccagctatgcggcgcacccagagcgagtccagcgcctcggaggtcaacagcggcagcagctccagctacagcacctcgcggaatgccgatctatgcaagcggcagttcttgctgtccgcacagaaactcaccaccgagtcgatcatcatcacgcggacgaactccagctcacagaagacctcttccacggtgtacaactcatgcgagagcgtcgagatcatacgctccacctcggaatcagcggaagtgtgccacgtgccggccataacgcccatccgtgtcaccggtgccggcatcaacaagaagcagatcaagttcgagacgccgcccaagagcagccaacagatgcgatcgaatggcgagggcgatgaaaccaaggaccagtttttcacgccggaaccgggaacgccggaaattccagagcgtcgtcatcgccaggcgattgtgccgcgccagctgagcggcgagttttcgcccaagaaggataagccgaaggagaaggggctggcggtgatggccctgatctcgccgccattgcagcaacccagggtgcgtcctccgttgcgggaatgccgtcagcagagggtctatagcggcgtgcaggatgtgggcgagccggaggtcgtggacgcagaagaggaggacgaggtgttccgccccacaaacgcctccacgtgcaacgacaaaaagctggaggcgcccaactccggtcgcctgtggtcgctgatgagttccatgatgcgactgccggccagcttgcgcggcgaacgcgaaaaggacagggacagggacagggattcggataaggagaacgctggttcgggctcactcatccgtcgctgcgcctccatcgctggatccctggtgcgccccagtgcaagggactcctccatggaggaccagcagtgcctcaagagaaagcgcactcagacgctggacagccagtactgtagcccgctgtcgccgtccagctcctcgaagcgctaccgcatccggcccagggagcccatcgagcgcatgcgtcgccagtaggttttaagcttttgcctgcgaatctgtgttttaattgtgaaattcttctttttttttatcgtttaataaatgtttggtcttgcattaaccgttatgcgcagcaggagttggcaggtccaggagcttagctcgtctcattcagagctgccaactctatctattgattctgttattaattagttgcgcacaagatcgaaaagcttaacggagcgcccatggcgaaatcacaagcaggtcagactgtcgagccggaggcgtccaagctgtggatccactgcaacagctgctgcgccctgttctgcgataagaagcacaccttcttcctgctcgcctgccatcacgtgttctgcgagcggtgcgtcaaggtctccgccggccgcacgcccagcgacgcgcccatattcgaatgctccacctgtcggcggagcgtgcgcggccgccagttgaccaactcgatgcccaaccacttcaagcagctcttccatccggagcccttcaccatcggcaacgactttgtggagacgttccagcgcggcaatcatcggcacttcgacaagtacaaggagaggaaggaactggagatggataagctgttcaaggacatcgaggtggccaagtccgtgtgccagaaacgcttcctggaggcgcagatgctgcgcgtggagcgcaagaagctgatgcagaggtcgcgctacattaaggcggaagtcgccaatcggaaggcggaaatgcatcggtgcgacatttggattccattgaaaatagttcccattaatgcattatatttctacccgccttaggatggcccaggcctaccgaagccgctcgctgacttcgcaatcctcgtcatccgcccaacgctcggcgcgcggacgtcctcgtggccgtggaacagccacacagtcctccagtcgacgccgatcaacggaatcagcaaagcggcagcaaatcaccagcttcatacacccgccgaacaactcgttcgatctgtgagctagtgctgataggtaaagctctgttttacaaccgagtatatattttttgtaaataatcagcttaaaacaataaaatggtgtcataagcttt

SEQ ID NO: 4832 - DNA, 2213 bp, DROSOPHILA
atgtccatgtgtgttaagttcgcaacttgcgcatttaatgtcgttttccaatgtcctaatcatgcgacagcccgacgaggcaagtgccacatttgcaagcgtgtcttctgttgcggcaaatgccgccagaagcatcagttcaaagcgcacgccattgctgtgcgcgagccattgggattgaggtctgccggcggcggtatcatcgagcatcgccatcaaatggagtccggcgcgaccaccatctatgtgttctgtccgatctgcgagcggcgtcccctgctgctgcgcgaggagatgcacggcgagctgctggcccacatcgagacctgccacctgccgctgcgatgccgcaagtgccagcgcaactacacgcgcgtcgatgacctgcgggagttcagcaagtgcgtggaccagcagcagagctgcactgatgtcaccggcgccacggagacatcgaaggcgacgctaaagaaggcagcgaatagcaccgccatttcaacgcaaacgtcgccgtccgtaacgcccatttcactgatcaacatgcgctggaaggccaagagccgtgtcacccacgaggagttcatcagcgacagcgtctcctccatacgcaacctgtcgtcgttcagcaacagctccattcgtcgctccattggccaactgggcgtgaatccgtccgaaacgatggagaagggcaaggtcatacgctcgacgtccacaccactgcacgtggagtccgtgttcgccaagcccaaggagccgattaccttcaatgcttccactggcggccacgtgtccagcatctaccacgaggagcccagtccgacacccgaaagcaatcccgtccagcagcagcagcagcagcagcagccgttgcagcagcgcgcctggaaaatgggcgcccgcaacaagatgagcgccgcaacgccgctgcgccaggtcatgtccaagagcattcagaaggccttcgtcgagcacggcggcatgatggtccaccagccaccatccgcagtggtgcaacgtcgcgtgcgcctcgatctcagcgagcacagttcgcacgaggcagcaggctcgtccgctctggacctgcgactctcgccagctatgcggcgcacccagagcgagtccagcgcctcggaggtcaacagcggcagcagctccagctacagcacctcgcggaatgccgatctatgcaagcggcagttcttgctgtccgcacagaaactcaccaccgagtcgatcatcatcacgcggacgaactccagctcacagaagacctcttccacggtgtacaactcatgcgagagcgtcgagatcatacgctccacctcggaatcagcggaagtgtgccacgtgccggccataacgcccatccgtgtcaccggtgccggcatcaacaagaagcagatcaagttcgagacgccgcccaagagcagccaacagatgcgatcgaatggcgagggcgatgaaaccaaggaccagtttttcacgccggaaccgggaacgccggaaattccagagcgtcgtcatcgccaggcgattgtgccgcgccagctgagcggcgagttttcgcccaagaaggataagccgaaggagaaggggctggcggtgatggccctgatctcgccgccattgcagcaacccagggtgcgtcctccgttgcgggaatgccgtcagcagagggtctatagcggcgtgcaggatgtgggcgagccggaggtcgtggacgcagaagaggaggacgaggtgttccgccccacaaacgcctccacgtgcaacgacaaaaagctggaggcgcccaactccggtcgcctgtggtcgctgatgagttccatgatgcgactgccggccagcttgcgcggcgaacgcgaaaaggacagggacagggacagggattcggataaggagaacgctggttcgggctcactcatccgtcgctgcgcctccatcgctggatccctggtgcgccccagtgcaagggactcctccatggaggaccagcagtgcctcaagagaaagcgcactcagacgctggacagccagtactgtagcccgctgtcgccgtccagctcctcgaagcgctaccgcatccggcccagggagcccatcgagcgcatgcgtcgccagtaggttttaagcttttgcctgcgaatctgtgttttaattgtgaaattcttctttttttttatcgtttaataaatgtttggtcttgcatt

SEQ ID NO: 4833 - protein, 708 aa, DROSOPHILA
MSMCVKFATCAFNVVFQCPNHATARRGKCHICKRVFCCGKCRQKHQFKAHAIAVREPLGLRSAGGGIIEHRHQMESGATTIYVFCPICERRPLLLREEMHGELLAHIETCHLPLRCRKCQRNYTRVDDLREFSKCVDQQQSCTDVTGATETSKATLKKAANSTAISTQTSPSVTPISLINMRWKAKSRVTHEEFISDSVSSIRNLSSFSNSSIRRSIGQLGVNPSETMEKGKVIRSTSTPLHVESVFAKPKEPITFNASTGGHVSSIYHEEPSPTPESNPVQQQQQQQQPLQQRAWKMGARNKMSAATPLRQVMSKSIQKAFVEHGGMMVHQPPSAVVQRRVRLDLSEHSSHEAAGSSALDLRLSPAMRRTQSESSASEVNSGSSSSYSTSRNADLCKRQFLLSAQKLTTESIIITRTNSSSQKTSSTVYNSCESVEIIRSTSESAEVCHVPAITPIRVTGAGINKKQIKFETPPKSSQQMRSNGEGDETKDQFFTPEPGTPEIPERRHRQAIVPRQLSGEFSPKKDKPKEKGLAVMALISPPLQQPRVRPPLRECRQQRVYSGVQDVGEPEVVDAEEEDEVFRPTNASTCNDKKLEAPNSGRLWSLMSSMMRLPASLRGEREKDRDRDRDSDKENAGSGSLIRRCASIAGSLVRPSARDSSMEDQQCLKRKRTQTLDSQYCSPLSPSSSSKRYRIRPREPIERMRRQ

SEQ ID NO: 4834 - DNA, 4349 bp, DROSOPHILA
gttcctccttgcgacgctcctggcgactggctcgctcctcgcgctgctggcgacgcaggtggcgccatcgttgcgcctgactcagcacggccctctccagctgacagtcatactggtaatccggatgatccgtgtagaaaccttctcggaattgcgacaggcgattgagggtcgcctgcggcaggtggtacacggcaggcggtggtttgtagcgctcgactatcttgaccgggacatcttccatgttatgctagcgcattcaccacgaattttgttaattaagttgctactacgcgtttttttttctctgttctcttttgttgtttctcgagcagcagcgataggcgattggtattgtcatcggtcactgctgattcgccaatttcgactagtgttgaatatcgtttttccttgagatgctcacctaattaggtgtactcaggcttggttgcgagtttgacaacagctgatattaaatctacccaaattttcgccaatttgagggcgtatgaaaggcttaacaaaaatcggaatacattaatagtttctacagatcacgttatacaacataaaaaaattaaaattacaaaacattttgacatactaaatattttttgttaccaagggtatcattatttagtgcatggcggatagttttaagatctttattctaaaaaactatttttgaccaaacttttgtttaaaataatcccgcgcttttacaactgagtttattgaaatcatgttctttccactagataaaaccaaagtttctgggaataaataaggacgaaaaatggcagttatgatatctattttatctctatctattctttaataggtcttagtccaataatacagcaatttcctatgtaatgttcaatgttactttatttgcagggtattaatttgcttaatgcagttcgaccattgcaaccattttatcgatagttgatgccgggaatagttcatcgctaaagtcaaaggcaatgtaaacaaaacaacctgagcaatggacgatgccgatgatctgcgcataaaccagcagcagcttatggacgagatttcggccctcttgcagaacacagcgaagccgagcgccgccaacgcactgcagctgaatcaggagctccagcgccggctcatgcaagtccggaccaaaattctggccatgttacaagtagtaagggcccgcttctctcggaacgaggacatcctggtgcgccggctgcgacctcgttcccatttcggcccgaattccctcaatcttagcggggcgatcctgcggaagggcacgtttcgcttcaagggcaacctgtttttccgagacatcgatggtcgaagctgtcctaacaacgaggattacgaggcgcggtgccacacggagatgtttcccaccgactttgacatgcactccagacatgtatggacattgctagacaaaaagaatgtgataatgggtataaaacaacaggtgagtggacccttcgagtggttcagattgattgccaaatacccatttaatagcaatgaaaagttaaatagcaatactaatattctgttttataaaaaactcaattctcagttactggagcatagggcccacagtacgaatgcgctgcccagcggaagcctgaagcgcaagccaatcgagcgacacttaagtacactggtaagtctgctggcaactgcggatagtagcttcagcatcgactggaaccagatcagcaccctggacttggaatatcggcactcaccatatagctgtgaggcaatgtggagggtctacttaacaccagatctcaggcgagacgattggtcacccgaggaggacgaaactttactggcggtggccactgcgaacaggatgcagaactgggagttgatagccgcgtcgctagaccgacgttccgactatcagtgcttcgtacgctttcataccgccctacgttttctgctggagccaaagaacagccaccgctggagcgaagaggacaacgataaactaagggcgatcgttgataggaatacggcaaacagtgtaataaactggaaaaaagtcgtggaatacttcccggacaagtccaaatcaacgctgattggtcgttactactacgtgttgcatcctagcatcagtcacggtaggtacccaatatattgaataatttttaatttattatttcgctcctttgaaactgcagaacccttcactaccaaggaggacatgatgctgttcgccgccgttgaagagtacaatggaaagtttcactgttttccgcgttctcttttcccaaaccggtcgttaacccaactccgaactcgctaccacaatgtactggcacaacgcaacaagaccgactcctggtccgttcaggacgacacacggctgatgagcttcgtaacgcaatacggggcttcccagtggcttaactgtgccacgttcttgggcaatcacacgcggaccagctgtcgaacccgcttcctagtcatcaagaaattccttgaacaaaatcccaatgcaaaagtggaagacctgccacgccgccgatcgaagaaggtgtccttggttaactctgataactgggcgcagcgtttgcaagagtggcaagaggacccagagtcattagttaatgataaccccccgaaaggaactcgggtgcgcggtcccaaatcgaaaaaggctaggatcgagcgacaggcagagagtttctcaagactttcgaaagttgatatagagttctgcaacttctttaagtttagttataatctgacgctgagcactccaaaaacttttccagttccaaaagacgtttataaccttgcctacgtgatcagagctcttgcatataagccaccaattcgaccctcgctcttacaaaacatatttatgccaaatgatgtgcttaagtgctacaacagcatgatccgaaaccttccggacgaggaaggtgatatgaagagcccacttttgccacccaactggtcaactatgatggggtttcgagccttatgcattctttccggagattgtcgcaaggatacggaaacacgtagcttcgaatacaatgaatctttaccacccatccagcttttccgcaagcggttgcaagctcttttctatcgtaccactcttctcagccgcttggaatcacaactctttacggacttaccatcagcattagtttctttaccacgccccaaacacgattatgcaaaaatgggtacacatgttgaattaatcgatccagagccggcaccacagaatgatctaaaatccgagccgcttagcgagaatgaagtgattaatacagtcaagcaggaattggaaatggaatatacagttccataggaactaataagtaaatatgtaatattgattaatttaagctttaaaagtttatattttttacttcatatcgcgttatataatagttcattacaatggctaacaaataatttataaacttgtaggtacttttaacgtatttcacatacagcaaaatcaaatgccggaccgatgtgcattagggtggctcatttttctgattgtagtttaaaaatattgcttaggtttgaaaaaaggtatatttatagcaaaacgccctgcaaaacgaaacaatttaatacacaagcagtcaaaaaaactaatgtatattttagttgccgttttacaatcctttcaaaacttttatcccggatatttagttattagagcaaaattgtctaaaccttattttcaatataaaaagaaccgatccatcctattgttcatgcggtaacaatgtattacaaagcatttttatgatagcactagcagcttgagaactattttgttcgattcccgggggaggcgctcattggaagttactgaaatccgtcttcagcttgatcgtaggcttctgcggcttggccagcaggttcctctgcgcctcgcttgctttttgggcaatgttaatcgactgctgttggctgcgaatggccgcttctagtttttgtcgcagttccggtgtttgacccatcagggccttaaactcctgcggatatttcggaccgatcttcagtagccactgcagcgcctggtcgtgcagctgccgttgatactttggcagcgtccggagtcgactgggttccgctaggaagccaatgagcacagggaccaacagagtcagcatctgaatatctgtgaagtgtggacaaggaacaattaatattataatcctaagtttaagggcttgctaaacggaacatcaattcacagagatggacaagtcgcttcatcccgtacttttacttcatacgtgcaacatttaaagcgtaattttaattgacaacaagaactaggaactatg

SEQ ID NO: 4835 - DNA, 2178 bp, DROSOPHILA
acaacctgagcaatggacgatgccgatgatctgcgcataaaccagcagcagcttatggacgagatttcggccctcttgcagaacacagcgaagccgagcgccgccaacgcactgcagctgaatcaggagctccagcgccggctcatgcaagtccggaccaaaattctggccatgttacaagtagtaagggcccgcttctctcggaacgaggacatcctggtgcgccggctgcgacctcgttcccatttcggcccgaattccctcaatcttagcggggcgatcctgcggaagggcacgtttcgcttcaagggcaacctgtttttccgagacatcgatggtcgaagctgtcctaacaacgaggattacgaggcgcggtgccacacggagatgtttcccaccgactttgacatgcactccagacatgtatggacattgctagacaaaaagaatgtgataatgggtataaaacaacagttactggagcatagggcccacagtacgaatgcgctgcccagcggaagcctgaagcgcaagccaatcgagcgacacttaagtacactggtaagtctgctggcaactgcggatagtagcttcagcatcgactggaaccagatcagcaccctggacttggaatatcggcactcaccatatagctgtgaggcaatgtggagggtctacttaacaccagatctcaggcgagacgattggtcacccgaggaggacgaaactttactggcggtggccactgcgaacaggatgcagaactgggagttgatagccgcgtcgctagaccgacgttccgactatcagtgcttcgtacgctttcataccgccctacgttttctgctggagccaaagaacagccaccgctggagcgaagaggacaacgataaactaagggcgatcgttgataggaatacggcaaacagtgtaataaactggaaaaaagtcgtggaatacttcccggacaagtccaaatcaacgctgattggtcgttactactacgtgttgcatcctagcatcagtcacgaacccttcactaccaaggaggacatgatgctgttcgccgccgttgaagagtacaatggaaagtttcactgttttccgcgttctcttttcccaaaccggtcgttaacccaactccgaactcgctaccacaatgtactggcacaacgcaacaagaccgactcctggtccgttcaggacgacacacggctgatgagcttcgtaacgcaatacggggcttcccagtggcttaactgtgccacgttcttgggcaatcacacgcggaccagctgtcgaacccgcttcctagtcatcaagaaattccttgaacaaaatcccaatgcaaaagtggaagacctgccacgccgccgatcgaagaaggtgtccttggttaactctgataactgggcgcagcgtttgcaagagtggcaagaggacccagagtcattagttaatgataaccccccgaaaggaactcgggtgcgcggtcccaaatcgaaaaaggctaggatcgagcgacaggcagagagtttctcaagactttcgaaagttgatatagagttctgcaacttctttaagtttagttataatctgacgctgagcactccaaaaacttttccagttccaaaagacgtttataaccttgcctacgtgatcagagctcttgcatataagccaccaattcgaccctcgctcttacaaaacatatttatgccaaatgatgtgcttaagtgctacaacagcatgatccgaaaccttccggacgaggaaggtgatatgaagagcccacttttgccacccaactggtcaactatgatggggtttcgagccttatgcattctttccggagattgtcgcaaggatacggaaacacgtagcttcgaatacaatgaatctttaccacccatccagcttttccgcaagcggttgcaagctcttttctatcgtaccactcttctcagccgcttggaatcacaactctttacggacttaccatcagcattagtttctttaccacgccccaaacacgattatgcaaaaatgggtacacatgttgaattaatcgatccagagccggcaccacagaatgatctaaaatccgagccgcttagcgagaatgaagtgattaatacagtcaagcaggaattggaaatggaatatacagttccatag

SEQ ID NO: 4836 - protein, 721 aa, DROSOPHILA
MDDADDLRINQQQLMDEISALLQNTAKPSAANALQLNQELQRRLMQVRTKILAMLQVVRARFSRNEDILVRRLRPRSHFGPNSLNLSGAILRKGTFRFKGNLFFRDIDGRSCPNNEDYEARCHTEMFPTDFDMHSRHVWTLLDKKNVIMGIKQQLLEHRAHSTNALPSGSLKRKPIERHLSTLVSLLATADSSFSIDWNQISTLDLEYRHSPYSCEAMWRVYLTPDLRRDDWSPEEDETLLAVATANRMQNWELIAASLDRRSDYQCFVRFHTALRFLLEPKNSHRWSEEDNDKLRAIVDRNTANSVINWKKVVEYFPDKSKSTLIGRYYYVLHPSISHEPFTTKEDMMLFAAVEEYNGKFHCFPRSLFPNRSLTQLRTRYHNVLAQRNKTDSWSVQDDTRLMSFVTQYGASQWLNCATFLGNHTRTSCRTRFLVIKKFLEQNPNAKVEDLPRRRSKKVSLVNSDNWAQRLQEWQEDPESLVNDNPPKGTRVRGPKSKKARIERQAESFSRLSKVDIEFCNFFKFSYNLTLSTPKTFPVPKDVYNLAYVIRALAYKPPIRPSLLQNIFMPNDVLKCYNSMIRNLPDEEGDMKSPLLPPNWSTMMGFRALCILSGDCRKDTETRSFEYNESLPPIQLFRKRLQALFYRTTLLSRLESQLFTDLPSALVSLPRPKHDYAKMGTHVELIDPEPAPQNDLKSEPLSENEVINTVKQELEMEYTVP

SEQ ID NO: 4837 - DNA, 2783 bp, DROSOPHILA
tgtgccacgtgccggccataacgcccatccgtgtcaccggtgccggcatcaacaagaagcagatcaagttcgagacgccgcccaagagcagccaacagatgcgatcgaatggcgagggcgatgaaaccaaggaccagtttttcacgccggaaccgggaacgccggaaattccagagcgtcgtcatcgccaggcgattgtgccgcgccagctgagcggcgagttttcgcccaagaaggataagccgaaggagaaggggctggcggtgatggccctgatctcgccgccattgcagcaacccagggtgcgtcctccgttgcgggaatgccgtcagcagagggtctatagcggcgtgcaggatgtgggcgagccggaggtcgtggacgcagaagaggaggacgaggtgttccgccccacaaacgcctccacgtgcaacgacaaaaagctggaggcgcccaactccggtcgcctgtggtcgctgatgagttccatgatgcgactgccggccagcttgcgcggcgaacgcgaaaaggacagggacagggacagggattcggataaggagaacgctggttcgggctcactcatccgtcgctgcgcctccatcgctggatccctggtgcgccccagtgcaagggactcctccatggaggaccagcagtgcctcaagagaaagcgcactcagacgctggacagccagtactgtagcccgctgtcgccgtccagctcctcgaagcgctaccgcatccggcccagggagcccatcgagcgcatgcgtcgccagtaggttttaagcttttgcctgcgaatctgtgttttaattgtgaaattcttctttttttttatcgtttaataaatgtttggtcttgcattaaccgttatgcgcagcaggagttggcaggtccaggagcttagctcgtctcattcagagctgccaactctatctattgattctgttattaattagttgcgcacaagatcgaaaagcttaacggagcgcccatggcgaaatcacaagcaggtcagactgtcgagccggaggcgtccaagctgtggatccactgcaacagctgctgcgccctgttctgcgataagaagcacaccttcttcctgctcgcctgccatcacgtgttctgcgagcggtgcgtcaaggtctccgccggccgcacgcccagcgacgcgcccatattcgaatgctccacctgtcggcggagcgtgcgcggccgccagttgaccaactcgatgcccaaccacttcaagcagctcttccatccggagcccttcaccatcggcaacgactttgtggagacgttccagcgcggcaatcatcggcacttcgacaagtacaaggagaggaaggaactggagatggataagctgttcaaggacatcgaggtggccaagtccgtgtgccagaaacgcttcctggaggcgcagatgctgcgcgtggagcgcaagaagctgatgcagaggtcgcgctacattaaggcggaagtcgccaatcggaaggcggaaatgcatcggtgcgacatttggattccattgaaaatagttcccattaatgcattatatttctacccgccttaggatggcccaggcctaccgaagccgctcgctgacttcgcaatcctcgtcatccgcccaacgctcggcgcgcggacgtcctcgtggccgtggaacagccacacagtcctccagtcgacgccgatcaacggaatcagcaaagcggcagcaaatcaccagcttcatacacccgccgaacaactcgttcgatctgtgagctagtgctgataggtaaagctctgttttacaaccgagtatatattttttgtaaataatcagcttaaaacaataaaatggtgtcataagctttaaaataataaactgctaagttaacagcgaccgttaagtttcaattaacagtttcgttaggataacagaagtgttgaaagtgaattcgattaatcgaaatccatcgatgactgctgcaccgataatatcgcataagcatctgctctaaaaacgcataaaaattgaattgcaagaagtagaagagcgaaacgtcataaaagcggcaaatccggcgctgtccgacaagaaccacaggggaaagcggataaggacatcatgatgaatagcaagatcgccgaggtagtggtgctcaactgccggacgtgcacgcgtgcctgcaagctgcacaagccgctgcaggaggagatcgatctgggttcggagggcagcaccacgctggccagcatgctaaactactgcacgggactctcgttcgagccgcaagacggcgccgccatgccgcagcacatctgcctccactgcctgcagctgctggaacaggcgttcaacttcaagcgcatggtcatcgattcggacgagctgctccgcctgggcctggacgaggcgcgctgctccagctttcacgagagtcagactcatagccccaaccagagccagcagcacgaccagcaacagcaggcgttcgactccaccgaggagtacgtcatgatcgagatgctcaacgaggagcaggagaacgtcgccaatgtaagtatctatcacttcacggtgcaatggaatgcaatggttcttgtccactcccatagaggattaacgattgctcacagcgggcaccagtcactcaaatcgattcacttatattgtggctctttgggatgtagtagggtaggtcggtgccaaaggagtgcaacctgtacctccatacaatggataacttgtctgctcttggtgacactacgtctaaataggagat

SEQ ID NO: 4838 - DNA, 719 bp, DROSOPHILA
atggcgaaatcacaagcaggtcagactgtcgagccggaggcgtccaagctgtggatccactgcaacagctgctgcgccctgttctgcgataagaagcacaccttcttcctgctcgcctgccatcacgtgttctgcgagcggtgcgtcaaggtctccgccggccgcacgcccagcgacgcgcccatattcgaatgctccacctgtcggcggagcgtgcgcggccgccagttgaccaactcgatgcccaaccacttcaagcagctcttccatccggagcccttcaccatcggcaacgactttgtggagacgttccagcgcggcaatcatcggcacttcgacaagtacaaggagaggaaggaactggagatggataagctgttcaaggacatcgaggtggccaagtccgtgtgccagaaacgcttcctggaggcgcagatgctgcgcgtggagcgcaagaagctgatgcagaggtcgcgctacattaaggcggaagtcgccaatcggaaggcggaaatgcatcggatggcccaggcctaccgaagccgctcgctgacttcgcaatcctcgtcatccgcccaacgctcggcgcgcggacgtcctcgtggccgtggaacagccacacagtcctccagtcgacgccgatcaacggaatcagcaaagcggcagcaaatcaccagcttcatacacccgccgaacaactcgttcgatctgtgagctag

SEQ ID NO: 4839 - protein, 237 aa, DROSOPHILA
MAKSQAGQTVEPEASKLWIHCNSCCALFCDKKHTFFLLACHHVFCERCVKVSAGRTPSDAPIFECSTCRRSVRGRQLTNSMPNHFKQLFHPEPFTIGNDFVETFQRGNHRHFDKYKERKELEMDKLFKDIEVAKSVCQKRFLEAQMLRVERKKLMQRSRYIKAEVANRKAEMHRMAQAYRSRSLTSQSSSSAQRSARGRPRGRGTATQSSSRRRSTESAKRQQITSFIHPPNNSFDL

SEQ ID NO: 4840 - DNA, 4332 bp, DROSOPHILA
aggtcagactgtcgagccggaggcgtccaagctgtggatccactgcaacagctgctgcgccctgttctgcgataagaagcacaccttcttcctgctcgcctgccatcacgtgttctgcgagcggtgcgtcaaggtctccgccggccgcacgcccagcgacgcgcccatattcgaatgctccacctgtcggcggagcgtgcgcggccgccagttgaccaactcgatgcccaaccacttcaagcagctcttccatccggagcccttcaccatcggcaacgactttgtggagacgttccagcgcggcaatcatcggcacttcgacaagtacaaggagaggaaggaactggagatggataagctgttcaaggacatcgaggtggccaagtccgtgtgccagaaacgcttcctggaggcgcagatgctgcgcgtggagcgcaagaagctgatgcagaggtcgcgctacattaaggcggaagtcgccaatcggaaggcggaaatgcatcggtgcgacatttggattccattgaaaatagttcccattaatgcattatatttctacccgccttaggatggcccaggcctaccgaagccgctcgctgacttcgcaatcctcgtcatccgcccaacgctcggcgcgcggacgtcctcgtggccgtggaacagccacacagtcctccagtcgacgccgatcaacggaatcagcaaagcggcagcaaatcaccagcttcatacacccgccgaacaactcgttcgatctgtgagctagtgctgataggtaaagctctgttttacaaccgagtatatattttttgtaaataatcagcttaaaacaataaaatggtgtcataagctttaaaataataaactgctaagttaacagcgaccgttaagtttcaattaacagtttcgttaggataacagaagtgttgaaagtgaattcgattaatcgaaatccatcgatgactgctgcaccgataatatcgcataagcatctgctctaaaaacgcataaaaattgaattgcaagaagtagaagagcgaaacgtcataaaagcggcaaatccggcgctgtccgacaagaaccacaggggaaagcggataaggacatcatgatgaatagcaagatcgccgaggtagtggtgctcaactgccggacgtgcacgcgtgcctgcaagctgcacaagccgctgcaggaggagatcgatctgggttcggagggcagcaccacgctggccagcatgctaaactactgcacgggactctcgttcgagccgcaagacggcgccgccatgccgcagcacatctgcctccactgcctgcagctgctggaacaggcgttcaacttcaagcgcatggtcatcgattcggacgagctgctccgcctgggcctggacgaggcgcgctgctccagctttcacgagagtcagactcatagccccaaccagagccagcagcacgaccagcaacagcaggcgttcgactccaccgaggagtacgtcatgatcgagatgctcaacgaggagcaggagaacgtcgccaatgtaagtatctatcacttcacggtgcaatggaatgcaatggttcttgtccactcccatagaggattaacgattgctcacagcgggcaccagtcactcaaatcgattcacttatattgtggctctttgggatgtagtagggtaggtcggtgccaaaggagtgcaacctgtacctccatacaatggataacttgtctgctcttggtgacactacgtctaaataggagatgggcttcatcaagtctaactccaaagtaaaaccataacaccttcttcatccgcagttggatgaagaactagcagaggaggatcgtcgcatcttcgcgatgaccgtggatgaggaggaggagtttctcaccgaggaggtggatcaggatgacgagctgtcggaggaggagcaccagctggcacagtcgggcgaccagcaggaggaacacatcactatggagagcgtgcatgagtttcagcccgccgaagtggagtatgtgaccattaagaatgagttcgaaacgatcgtcacggaggaggatgagttcgaggtgatgaacgactccggcgcccacgacgccatactggactgtcagatgattgtgatacccgccgagggagccattgacgaggtcatcggcgaggagaccctcgaattggagggggatgggcgcgaggagcatctggtgagaaaggtcaaattatattgcactagaataccatttatcctccattcacctacacacagctgccggaggcggaggatgtctgcgaagatgaggacttcctggaggagtcgctggactcagcgccgccgaccgctggcgaggcgctgccgtacgtgtgcaccgtgtgccagaaggcgttccgccagcagtgccgtctcaaccagcacatgcgctcccacgtggacgagaagcaatacgagtgcgaggagtgtggcaagcgtctgaagcacctacgcaactacaaggaacacatgctgacacacacaaatgtcaagccgcaccagtgcagcatatgcggccgcttctatcgtaccacctccagtctggcagtgcacaagagaactcatgcggagaagaaaccctacaactgcgatcagtgcggccgcggatatgcggcgttcgatcatctgcggcgccacaagctcacgcacacgggcgagcgaccatacgcctgcgatctgtgcgacaaggcctactacgattcgtcctcgctgcgccagcacaagataagccacaccggcaagaaggctttcacctgcgagatctgcggcgtgggactgtctcagaagtcgggctacaagaagcacatgatggtccacagtggcgtcaaggcgcacaagtgtgatgtttgcgggcatgccttcacctttaccagcaacctcaatgcccatgttcgcctccattccggcgaaaagccgtttaagtgcgaggtctgcgttaaggcctttcccacaaagaagcgactggccagtcatatgcgcgtccacaacaaggagtcgccggtgacggccaccgttgctgttcagtccatcaatcctcccagccgacaagcgggcgcagaaggtgcgacaggcggaggtgcgacaggtggaagtccgaccggtggaggtgcgaccggtggatcggcaaccaaccttcacataaccgaagttcatgagcagccggtgtccacctccaaagtggtgatggtgctgtgagcggccaccaagccgtgggagcggctctagaatgtaagcctaggctaaggattagacacttagttcaataaaactgatttttgttccagaaaaaactgaaagaaaattcgacacttattttttacatacataaaaataattttgttttcacgataactatctcagcaggtttagccactcttatccatcaattgtgattagataacgcacagcaagttctccactttcgtaacgaaacacatggatgtcttgtttttggttttacggttaagtcgtctctttataataataatattacgattaaattgccaaaaaacaaaaacaagcaagtttagttattcaataaaacaaaaacatgcgcctcgtcttttcccaaaggagcaaaagacagagcgtgcctcccaatcctgctgtctgctgtctgctactgcttcccactaactactccaaaagtcgacgaaaaatatggccagtgtgctgctgcagggcgtgtttgttgctccggcgcaggcggaaggttaaggtatgcgtatggaacgggttgtgcggtatggccagcctcctagcggccgagaatgttgcgcgaccactgtttgaccattggcttggtcttggactgctcgatgcgttccgcctccagcatttgttcggccagcttgcgctggttctcccggaactggttgatgggatcgtcgaactggcgatagtagtggagcacctcgcgcacgtcgtccacgttgttctgcgcaattactgtagcgaattgcaagggtcagtgtttagctttcaatgtcacttgtggcgcaacttactctttaggaaagcgataaggtccagcagttggccatcatcgtcgttgccatgccagcgggccaagccgaatgtgttgtccggatgcatcttggtggcattcgcatcccagtccacaacaatcacctaaaatactcccttctttatagatgattgcaatagaaaatacgttgtgcatgacttgccttcttgaggtcgcgattaaggttgtccaggttcttcacatgatggccgtccacaaagtgcgtggcatccctgaccaggcggtacataatgtagccgttgggatcga

SEQ ID NO: 4841 - DNA, 1989 bp, DROSOPHILA
aaaacgcataaaaattgaattgcaagaagtagaagagcgaaacgtcataaaagcggcaaatccggcgctgtccgacaagaaccacaggggaaagcggataaggacatcatgatgaatagcaagatcgccgaggtagtggtgctcaactgccggacgtgcacgcgtgcctgcaagctgcacaagccgctgcaggaggagatcgatctgggttcggagggcagcaccacgctggccagcatgctaaactactgcacgggactctcgttcgagccgcaagacggcgccgccatgccgcagcacatctgcctccactgcctgcagctgctggaacaggcgttcaacttcaagcgcatggtcatcgattcggacgagctgctccgcctgggcctggacgaggcgcgctgctccagctttcacgagagtcagactcatagccccaaccagagccagcagcacgaccagcaacagcaggcgttcgactccaccgaggagtacgtcatgatcgagatgctcaacgaggagcaggagaacgtcgccaatttggatgaagaactagcagaggaggatcgtcgcatcttcgcgatgaccgtggatgaggaggaggagtttctcaccgaggaggtggatcaggatgacgagctgtcggaggaggagcaccagctggcacagtcgggcgaccagcaggaggaacacatcactatggagagcgtgcatgagtttcagcccgccgaagtggagtatgtgaccattaagaatgagttcgaaacgatcgtcacggaggaggatgagttcgaggtgatgaacgactccggcgcccacgacgccatactggactgtcagatgattgtgatacccgccgagggagccattgacgaggtcatcggcgaggagaccctcgaattggagggggatgggcgcgaggagcatctgctgccggaggcggaggatgtctgcgaagatgaggacttcctggaggagtcgctggactcagcgccgccgaccgctggcgaggcgctgccgtacgtgtgcaccgtgtgccagaaggcgttccgccagcagtgccgtctcaaccagcacatgcgctcccacgtggacgagaagcaatacgagtgcgaggagtgtggcaagcgtctgaagcacctacgcaactacaaggaacacatgctgacacacacaaatgtcaagccgcaccagtgcagcatatgcggccgcttctatcgtaccacctccagtctggcagtgcacaagagaactcatgcggagaagaaaccctacaactgcgatcagtgcggccgcggatatgcggcgttcgatcatctgcggcgccacaagctcacgcacacgggcgagcgaccatacgcctgcgatctgtgcgacaaggcctactacgattcgtcctcgctgcgccagcacaagataagccacaccggcaagaaggctttcacctgcgagatctgcggcgtgggactgtctcagaagtcgggctacaagaagcacatgatggtccacagtggcgtcaaggcgcacaagtgtgatgtttgcgggcatgccttcacctttaccagcaacctcaatgcccatgttcgcctccattccggcgaaaagccgtttaagtgcgaggtctgcgttaaggcctttcccacaaagaagcgactggccagtcatatgcgcgtccacaacaaggagtcgccggtgacggccaccgttgctgttcagtccatcaatcctcccagccgacaagcgggcgcagaaggtgcgacaggcggaggtgcgacaggtggaagtccgaccggtggaggtgcgaccggtggatcggcaaccaaccttcacataaccgaagttcatgagcagccggtgtccacctccaaagtggtgatggtgctgtgagcggccaccaagccgtgggagcggctctagaatgtaagcctaggctaaggattagacacttagttcaataaaactgatttttgttccagaaaaaactgaaag

SEQ ID NO: 4842 - protein, 591 aa, DROSOPHILA
MNSKIAEVVVLNCRTCTRACKLHKPLQEEIDLGSEGSTTLASMLNYCTGLSFEPQDGAAMPQHICLHCLQLLEQAFNFKRMVIDSDELLRLGLDEARCSSFHESQTHSPNQSQQHDQQQQAFDSTEEYVMIEMLNEEQENVANLDEELAEEDRRIFAMTVDEEEEFLTEEVDQDDELSEEEHQLAQSGDQQEEHITMESVHEFQPAEVEYVTIKNEFETIVTEEDEFEVMNDSGAHDAILDCQMIVIPAEGAIDEVIGEETLELEGDGREEHLLPEAEDVCEDEDFLEESLDSAPPTAGEALPYVCTVCQKAFRQQCRLNQHMRSHVDEKQYECEECGKRLKHLRNYKEHMLTHTNVKPHQCSICGRFYRTTSSLAVHKRTHAEKKPYNCDQCGRGYAAFDHLRRHKLTHTGERPYACDLCDKAYYDSSSLRQHKISHTGKKAFTCEICGVGLSQKSGYKKHMMVHSGVKAHKCDVCGHAFTFTSNLNAHVRLHSGEKPFKCEVCVKAFPTKKRLASHMRVHNKESPVTATVAVQSINPPSRQAGAEGATGGGATGGSPTGGGATGGSATNLHITEVHEQPVSTSKVVMVL

SEQ ID NO: 4843 - DNA, 3939 bp, DROSOPHILA
acaaggaacacatgctgacacacacaaatgtcaagccgcaccagtgcagcatatgcggccgcttctatcgtaccacctccagtctggcagtgcacaagagaactcatgcggagaagaaaccctacaactgcgatcagtgcggccgcggatatgcggcgttcgatcatctgcggcgccacaagctcacgcacacgggcgagcgaccatacgcctgcgatctgtgcgacaaggcctactacgattcgtcctcgctgcgccagcacaagataagccacaccggcaagaaggctttcacctgcgagatctgcggcgtgggactgtctcagaagtcgggctacaagaagcacatgatggtccacagtggcgtcaaggcgcacaagtgtgatgtttgcgggcatgccttcacctttaccagcaacctcaatgcccatgttcgcctccattccggcgaaaagccgtttaagtgcgaggtctgcgttaaggcctttcccacaaagaagcgactggccagtcatatgcgcgtccacaacaaggagtcgccggtgacggccaccgttgctgttcagtccatcaatcctcccagccgacaagcgggcgcagaaggtgcgacaggcggaggtgcgacaggtggaagtccgaccggtggaggtgcgaccggtggatcggcaaccaaccttcacataaccgaagttcatgagcagccggtgtccacctccaaagtggtgatggtgctgtgagcggccaccaagccgtgggagcggctctagaatgtaagcctaggctaaggattagacacttagttcaataaaactgatttttgttccagaaaaaactgaaagaaaattcgacacttattttttacatacataaaaataattttgttttcacgataactatctcagcaggtttagccactcttatccatcaattgtgattagataacgcacagcaagttctccactttcgtaacgaaacacatggatgtcttgtttttggttttacggttaagtcgtctctttataataataatattacgattaaattgccaaaaaacaaaaacaagcaagtttagttattcaataaaacaaaaacatgcgcctcgtcttttcccaaaggagcaaaagacagagcgtgcctcccaatcctgctgtctgctgtctgctactgcttcccactaactactccaaaagtcgacgaaaaatatggccagtgtgctgctgcagggcgtgtttgttgctccggcgcaggcggaaggttaaggtatgcgtatggaacgggttgtgcggtatggccagcctcctagcggccgagaatgttgcgcgaccactgtttgaccattggcttggtcttggactgctcgatgcgttccgcctccagcatttgttcggccagcttgcgctggttctcccggaactggttgatgggatcgtcgaactggcgatagtagtggagcacctcgcgcacgtcgtccacgttgttctgcgcaattactgtagcgaattgcaagggtcagtgtttagctttcaatgtcacttgtggcgcaacttactctttaggaaagcgataaggtccagcagttggccatcatcgtcgttgccatgccagcgggccaagccgaatgtgttgtccggatgcatcttggtggcattcgcatcccagtccacaacaatcacctaaaatactcccttctttatagatgattgcaatagaaaatacgttgtgcatgacttgccttcttgaggtcgcgattaaggttgtccaggttcttcacatgatggccgtccacaaagtgcgtggcatccctgaccaggcggtacataatgtagccgttgggatcgagggcatccaggatggggaacacggtcatgccctgttcggcggtgaagacgacaatttcaaagtccttggcgcactcggccagaaagtggtcgacgccgggacgcttcttgaagcgccagccagtttggtaagtccagtccggatgcaccagcacgtccttcatctccagcacaagcgtgtagcgcggctgcacgtacggcggcttgagcggatcgggcagcagtttggcgcgcgacggctcctggatcatgcgctgatagtagtgaatgctcttccacatccgctgcagatactgctgtaccagcggcttgtgtgtgaactcgtcctcgatgggctgcccgttggggtccacctcgggcttgccgaactcgtagacggcccagaatccagcagccacggcgctgcctccgaatattgcaaagctgcagcaggaagtattgttataatactgttacgcattgaatgggcgtcagcttaccccagcttcatgcgcttccaggcacgctcgttctccttttcctcctcctcctcgcgcttcttgcgctcctgctcggcgttgctgtccacctccggcgaggtctgaggaaagagcttggccagcagcggggcattcggtgcgacctcgggcgcatcattggggccagtggctccagcttcctgctctgcgaaacgaaagtggccaaggatgaatgtttaggactctactgtttaggactctaccgtgaatcacttactggttgtgctgctgtagccacgcgctgtgtgcaggatcgagaagagcgccggagcagccgctggcagtgctgtgcaagtgaatagtcggaggtactgctgctggtggtggaggaggtggtgctggtgctggtagtgttggtggtagtggtggtagtgattacccaatgcgcggtgctggtggatgtgggtaagaagacgcggcgtgctaaggccgcgcagcaactggaggacggtggccggtgccatgctcatgctcatgcttcccccttccttcccgatatcgagtcctagagccgttcacgagtcctgctcggatggcagcgactttttacttataaaaaattccaacaaaaatttcaacttcccaccggcacggcgttggcgttagggattttatatactgtccactgccaggcggcaccaggcgttagtacatttagcacgtggctctcagcaggtatagatcggcgattttcaagccaaatctggcgggattttgcagataactgcgtgtgtacatatgttgcctccggcaatctgactaatcacagtattaagaaaattttaaattaaaatattttaaataatatggaaatacacaacctttgaccaaccaccaagccactgtgcctctggtcacttccaagctgatgtgcctggctagctattttgagtgccaccactaacgcatcagctggactttggcatcactgttcgggacgctaaattaagttatttatttaaacgtgtattatctactgtcgagttcaatccatgacgaccatgtcgccgccgtcccccatggacgccttgtgccgcgtgtgccacacagcatcgccgcgctgcctgccgctcttcaaaccgctcgacgatccaatttccggcaaaccagcgacgctggccagcattttaagctactgcagcggtctggagatcctagaggcggagctcttcctgccccaccacatctgcccggactgcgtggccaagttgcggctctcgctggaattcaagcggagtgtccatcgcatggacagaattctgcggcagagtcatgcggacttttgccgcagcaaaaagatcagcgcggtgaatactagggccaggctgtcaaccgagattccggaggattttgtactcgtgctcgatgaccaggaagtgactgaatatccagcagaaacgatacgagatgaggagcaactcctggtcgtagaatcagatgaggcggagagccggctggaagcgccaattgtacaggaggagaggctggatattgcactggaacagcacgaagacgatctctgcgagattgtcgacgatccggatccggagcaacgtaggagcaggttagaaagatccgagcca

SEQ ID NO: 4844 - DNA, 1654 bp, DROSOPHILA
ggaagttgaaatttttgttggaattttttataagtaaaaagtcgctgccatccgagcaggactcgtgaacggctctaggactcgatatcgggaaggaagggggaagcatgagcatgagcatggcaccggccaccgtcctccagttgctgcgcggccttagcacgccgcgtcttcttacccacatccaccagcaccgcgcattgggtaatcactaccaccactaccaccaacactaccagcaccagcaccacctcctccaccaccagcagcagtacctccgactattcacttgcacagcactgccagcggctgctccggcgctcttctcgatcctgcacacagcgcgtggctacagcagcacaaccaagcaggaagctggagccactggccccaatgatgcgcccgaggtcgcaccgaatgccccgctgctggccaagctctttcctcagacctcgccggaggtggacagcaacgccgagcaggagcgcaagaagcgcgaggaggaggaggaaaaggagaacgagcgtgcctggaagcgcatgaagctgggctttgcaatattcggaggcagcgccgtggctgctggattctgggccgtctacgagttcggcaagcccgaggtggaccccaacgggcagcccatcgaggacgagttcacacacaagccgctggtacagcagtatctgcagcggatgtggaagagcattcactactatcagcgcatgatccaggagccgtcgcgcgccaaactgctgcccgatccgctcaagccgccgtacgtgcagccgcgctacacgcttgtgctggagatgaaggacgtgctggtgcatccggactggacttaccaaactggctggcgcttcaagaagcgtcccggcgtcgaccactttctggccgagtgcgccaaggactttgaaattgtcgtcttcaccgccgaacagggcatgaccgtgttccccatcctggatgccctcgatcccaacggctacattatgtaccgcctggtcagggatgccacgcactttgtggacggccatcatgtgattgttgtggactgggatgcgaatgccaccaagatgcatccggacaacacattcggcttggcccgctggcatggcaacgacgatgatggccaactgctggaccttatcgctttcctaaagataattgcgcagaacaacgtggacgacgtgcgcgaggtgctccactactatcgccagttcgacgatcccatcaaccagttccgggagaaccagcgcaagctggccgaacaaatgctggaggcggaacgcatcgagcagtccaagaccaagccaatggtcaaacagtggtcgcgcaacattctcggccgctaggaggctggccataccgcacaacccgttccatacgcataccttaaccttccgcctgcgccggagcaacaaacacgccctgcagcagcacactggccatatttttcgtcgacttttggagtagttagtgggaagcagtagcagacagcagacagcaggattgggaggcacgctctgtcttttgctcctttgggaaaagacgaggcgcatgtttttgttttattgaataactaaacttgcttgtttttgttttttggcaatttaatcgtaatattattattataaagagacgacttaaccgt

SEQ ID NO: 4845 - protein, 415 aa, DROSOPHILA
MSMSMAPATVLQLLRGLSTPRLLTHIHQHRALGNHYHHYHQHYQHQHHLLHHQQQYLRLFTCTALPAAAPALFSILHTARGYSSTTKQEAGATGPNDAPEVAPNAPLLAKLFPQTSPEVDSNAEQERKKREEEEEKENERAWKRMKLGFAIFGGSAVAAGFWAVYEFGKPEVDPNGQPIEDEFTHKPLVQQYLQRMWKSIHYYQRMIQEPSRAKLLPDPLKPPYVQPRYTLVLEMKDVLVHPDWTYQTGWRFKKRPGVDHFLAECAKDFEIVVFTAEQGMTVFPILDALDPNGYIMYRLVRDATHFVDGHHVIVVDWDANATKMHPDNTFGLARWHGNDDDGQLLDLIAFLKIIAQNNVDDVREVLHYYRQFDDPINQFRENQRKLAEQMLEAERIEQSKTKPMVKQWSRNILGR

SEQ ID NO: 4846 - DNA, 3676 bp, DROSOPHILA
tcagcttaccccagcttcatgcgcttccaggcacgctcgttctccttttcctcctcctcctcgcgcttcttgcgctcctgctcggcgttgctgtccacctccggcgaggtctgaggaaagagcttggccagcagcggggcattcggtgcgacctcgggcgcatcattggggccagtggctccagcttcctgctctgcgaaacgaaagtggccaaggatgaatgtttaggactctactgtttaggactctaccgtgaatcacttactggttgtgctgctgtagccacgcgctgtgtgcaggatcgagaagagcgccggagcagccgctggcagtgctgtgcaagtgaatagtcggaggtactgctgctggtggtggaggaggtggtgctggtgctggtagtgttggtggtagtggtggtagtgattacccaatgcgcggtgctggtggatgtgggtaagaagacgcggcgtgctaaggccgcgcagcaactggaggacggtggccggtgccatgctcatgctcatgcttcccccttccttcccgatatcgagtcctagagccgttcacgagtcctgctcggatggcagcgactttttacttataaaaaattccaacaaaaatttcaacttcccaccggcacggcgttggcgttagggattttatatactgtccactgccaggcggcaccaggcgttagtacatttagcacgtggctctcagcaggtatagatcggcgattttcaagccaaatctggcgggattttgcagataactgcgtgtgtacatatgttgcctccggcaatctgactaatcacagtattaagaaaattttaaattaaaatattttaaataatatggaaatacacaacctttgaccaaccaccaagccactgtgcctctggtcacttccaagctgatgtgcctggctagctattttgagtgccaccactaacgcatcagctggactttggcatcactgttcgggacgctaaattaagttatttatttaaacgtgtattatctactgtcgagttcaatccatgacgaccatgtcgccgccgtcccccatggacgccttgtgccgcgtgtgccacacagcatcgccgcgctgcctgccgctcttcaaaccgctcgacgatccaatttccggcaaaccagcgacgctggccagcattttaagctactgcagcggtctggagatcctagaggcggagctcttcctgccccaccacatctgcccggactgcgtggccaagttgcggctctcgctggaattcaagcggagtgtccatcgcatggacagaattctgcggcagagtcatgcggacttttgccgcagcaaaaagatcagcgcggtgaatactagggccaggctgtcaaccgagattccggaggattttgtactcgtgctcgatgaccaggaagtgactgaatatccagcagaaacgatacgagatgaggagcaactcctggtcgtagaatcagatgaggcggagagccggctggaagcgccaattgtacaggaggagaggctggatattgcactggaacagcacgaagacgatctctgcgagattgtcgacgatccggatccggagcaacgtaggagcaggttagaaagatccgagccagcgctgcaatgtcccgtgagttgcctttccgaattagaagtaagtaatcacgaaatagtttcccatcttcggcagatttgcggcaaacaactggctaggaagcggacctttcagtaccacatgaggctacatggccagccaaaaattcgccaagaagacaacgaccactgcattgaagagtgcctccaagtggagcccgttttgcaggccaaagctggcgaagatgtctacgagattgtggagaaatcagcacagacttcggcgacgcagaaaactttgcccagtggaagccggccttggaaacccctcaatccctccctacagtgtaaagtaagttggtcatcgcagctcgcaaataactcaaagccgaaggtcatcaattctccctccattcctttagatctgtggcaagcaactaagcaccaacaactccttcaagtaccatatgcagctacatggcacggccacgccctacgtttgcacaatctgcggagagtcctttaagacgcgaaacgcccgcgacggccatgtcacgctgcacgatcgtaacaatccgaacaggtgccccacctgcttcaaggtctaccggcaggcgtcctcgctgcgcacacaccttctaatccacagcggaatcaagccattcgagtgcagcatctgcggcaagaggctaacacagaagtcgggctacaagaagcacatgctcacccacacgggcgagaagccgcacggctgcgacatttgcggccgtcgcttccgctactcgagcaatctgattgcccacaagcgctgccacagccaggagaagccccacccgtgcccggtgtgccagaagcgcagcttcggcagcacatccgagctcaaccgccacatgctcgtccacagcagcgagcgaccgttcggctgtgagcagtgcggcaagtccttcaagcgccgcatctcactcgccatccatcgccagtcgcacaaggcgggcagacagcggaggcgggccgagcatgaagtgggtgtccaactggaggagcaggacgagaatgtggagacctgaagctagatcgcttatactatcggcttaatgtacaaatcgggacatttagttttagttcaattcgcttttattttcggtactttccttcgcacaataacaagttttaagtgtgttcctattgttaggataaatttgattggttttcccacccaaaataatgcgtgtttcatacatacatatatattatatatggtcaacaaacatttcgagtcttctgacgatcctttcgatttgatttaatgtaatgagctttagtttatcaggtggaggcgggagaatctctatacatatggaagtttcgattgggttttgtagttgatagtggctaagggtgagggtgcgggtgcgggtgtggggaccttaagctaagctactatgctgcattgaacttacgcgctagaaaccaattagagtagtgcggaacgagtgtgcgagcgggtaacaaacaaaatggggctgggaattaaaagtgtggattgggagctacgcgttacgctgccgcgcgatacataaagttaatgtataaataaatatatatgttcagacaatgtgagtgcttgctaatacttggcatacataaaatgagtatagatcacaaaaagtcgcgtaaaaacataaatgttagtgggtataacgtgggtgggtgggatgagtgagtaatgagtaatatcagtgggacatgaggcttggaggcacacgtggctttcctttccatcgtccagcttggacgactctcatctcaagatccggacttgggtacacaaacgaagaggacacgaccggattgccgcagtggccactgctaatctttctcctgctgctgcagcagggcggcgatttcctggaacttgtgccgaaagtccacgctgctctcgctgatcaccgacatgcttgacgacggatcctgtggattaggttagaggtcggtccacaatgaatgtcgcaagtggggagtgtggcatgcgttctggcttaccagtatatccctggtggcatcaat

SEQ ID NO: 4847 - DNA, 1606 bp, DROSOPHILA
atttatttaaacgtgtattatctactgtcgagttcaatccatgacgaccatgtcgccgccgtcccccatggacgccttgtgccgcgtgtgccacacagcatcgccgcgctgcctgccgctcttcaaaccgctcgacgatccaatttccggcaaaccagcgacgctggccagcattttaagctactgcagcggtctggagatcctagaggcggagctcttcctgccccaccacatctgcccggactgcgtggccaagttgcggctctcgctggaattcaagcggagtgtccatcgcatggacagaattctgcggcagagtcatgcggacttttgccgcagcaaaaagatcagcgcggtgaatactagggccaggctgtcaaccgagattccggaggattttgtactcgtgctcgatgaccaggaagtgactgaatatccagcagaaacgatacgagatgaggagcaactcctggtcgtagaatcagatgaggcggagagccggctggaagcgccaattgtacaggaggagaggctggatattgcactggaacagcacgaagacgatctctgcgagattgtcgacgatccggatccggagcaacgtaggagcaggttagaaagatccgagccagcgctgcaatgtcccgtgagttgcctttccgaattagaagtaagtaatcacgaaatagtttcccatcttcggcagatttgcggcaaacaactggctaggaagcggacctttcagtaccacatgaggctacatggccagccaaaaattcgccaagaagacaacgaccactgcattgaagagtgcctccaagtggagcccgttttgcaggccaaagctggcgaagatgtctacgagattgtggagaaatcagcacagacttcggcgacgcagaaaactttgcccagtggaagccggccttggaaacccctcaatccctccctacagtgtaaaatctgtggcaagcaactaagcaccaacaactccttcaagtaccatatgcagctacatggcacggccacgccctacgtttgcacaatctgcggagagtcctttaagacgcgaaacgcccgcgacggccatgtcacgctgcacgatcgtaacaatccgaacaggtgccccacctgcttcaaggtctaccggcaggcgtcctcgctgcgcacacaccttctaatccacagcggaatcaagccattcgagtgcagcatctgcggcaagaggctaacacagaagtcgggctacaagaagcacatgctcacccacacgggcgagaagccgcacggctgcgacatttgcggccgtcgcttccgctactcgagcaatctgattgcccacaagcgctgccacagccaggagaagccccacccgtgcccggtgtgccagaagcgcagcttcggcagcacatccgagctcaaccgccacatgctcgtccacagcagcgagcgaccgttcggctgtgagcagtgcggcaagtccttcaagcgccgcatctcactcgccatccatcgccagtcgcacaaggcgggcagacagcggaggcgggccgagcatgaagtgggtgtccaactggaggagcaggacgagaatgtggagacctga

SEQ ID NO: 4848 - protein, 518 aa, DROSOPHILA
MSPPSPMDALCRVCHTASPRCLPLFKPLDDPISGKPATLASILSYCSGLEILEAELFLPHHICPDCVAKLRLSLEFKRSVHRMDRILRQSHADFCRSKKISAVNTRARLSTEIPEDFVLVLDDQEVTEYPAETIRDEEQLLVVESDEAESRLEAPIVQEERLDIALEQHEDDLCEIVDDPDPEQRRSRLERSEPALQCPVSCLSELEVSNHEIVSHLRQICGKQLARKRTFQYHMRLHGQPKIRQEDNDHCIEECLQVEPVLQAKAGEDVYEIVEKSAQTSATQKTLPSGSRPWKPLNPSLQCKICGKQLSTNNSFKYHMQLHGTATPYVCTICGESFKTRNARDGHVTLHDRNNPNRCPTCFKVYRQASSLRTHLLIHSGIKPFECSICGKRLTQKSGYKKHMLTHTGEKPHGCDICGRRFRYSSNLIAHKRCHSQEKPHPCPVCQKRSFGSTSELNRHMLVHSSERPFGCEQCGKSFKRRISLAIHRQSHKAGRQRRRAEHEVGVQLEEQDENVET

SEQ ID NO: 4849 - DNA, 6531 bp, DROSOPHILA
actggctaggaagcggacctttcagtaccacatgaggctacatggccagccaaaaattcgccaagaagacaacgaccactgcattgaagagtgcctccaagtggagcccgttttgcaggccaaagctggcgaagatgtctacgagattgtggagaaatcagcacagacttcggcgacgcagaaaactttgcccagtggaagccggccttggaaacccctcaatccctccctacagtgtaaagtaagttggtcatcgcagctcgcaaataactcaaagccgaaggtcatcaattctccctccattcctttagatctgtggcaagcaactaagcaccaacaactccttcaagtaccatatgcagctacatggcacggccacgccctacgtttgcacaatctgcggagagtcctttaagacgcgaaacgcccgcgacggccatgtcacgctgcacgatcgtaacaatccgaacaggtgccccacctgcttcaaggtctaccggcaggcgtcctcgctgcgcacacaccttctaatccacagcggaatcaagccattcgagtgcagcatctgcggcaagaggctaacacagaagtcgggctacaagaagcacatgctcacccacacgggcgagaagccgcacggctgcgacatttgcggccgtcgcttccgctactcgagcaatctgattgcccacaagcgctgccacagccaggagaagccccacccgtgcccggtgtgccagaagcgcagcttcggcagcacatccgagctcaaccgccacatgctcgtccacagcagcgagcgaccgttcggctgtgagcagtgcggcaagtccttcaagcgccgcatctcactcgccatccatcgccagtcgcacaaggcgggcagacagcggaggcgggccgagcatgaagtgggtgtccaactggaggagcaggacgagaatgtggagacctgaagctagatcgcttatactatcggcttaatgtacaaatcgggacatttagttttagttcaattcgcttttattttcggtactttccttcgcacaataacaagttttaagtgtgttcctattgttaggataaatttgattggttttcccacccaaaataatgcgtgtttcatacatacatatatattatatatggtcaacaaacatttcgagtcttctgacgatcctttcgatttgatttaatgtaatgagctttagtttatcaggtggaggcgggagaatctctatacatatggaagtttcgattgggttttgtagttgatagtggctaagggtgagggtgcgggtgcgggtgtggggaccttaagctaagctactatgctgcattgaacttacgcgctagaaaccaattagagtagtgcggaacgagtgtgcgagcgggtaacaaacaaaatggggctgggaattaaaagtgtggattgggagctacgcgttacgctgccgcgcgatacataaagttaatgtataaataaatatatatgttcagacaatgtgagtgcttgctaatacttggcatacataaaatgagtatagatcacaaaaagtcgcgtaaaaacataaatgttagtgggtataacgtgggtgggtgggatgagtgagtaatgagtaatatcagtgggacatgaggcttggaggcacacgtggctttcctttccatcgtccagcttggacgactctcatctcaagatccggacttgggtacacaaacgaagaggacacgaccggattgccgcagtggccactgctaatctttctcctgctgctgcagcagggcggcgatttcctggaacttgtgccgaaagtccacgctgctctcgctgatcaccgacatgcttgacgacggatcctgtggattaggttagaggtcggtccacaatgaatgtcgcaagtggggagtgtggcatgcgttctggcttaccagtatatccctggtggcatcaatctcatccaaatgccccagcagcgacgtcaacgagaagtcattgatattgtcctccagccagcgtgcgttggatgttgaatctctgagcaagtgcatcggactcatgctgccttggaagaagctttgagctgccgcgaagaagataatataaaatttatacaaaaatgaaaagcgaaaacatgctgatgctcctacttgtgctcccgtcttgggccgcctcgttcagggaactgctgacgtccgtcctgttggtggccacgcaaatgtccagattgggcatgtctcgagcgctgacctgcgtggcctcgtcgttgaggaactccaatgccccctgatcccctggctcttgatcctgtgaagcggtcgtggcattcatgctggaatcgggtttcgagccagaggtgctgatgccagcggaacttatgccatccacgcgatcaatcggctcgaaaaggccactgtggagttggcgcacactcagcagatcgtacggacgatcgccagcggatgtgggtggtaggagacggcgctgcacaagcacctgacgactgatcttttgccgtgtgagctagaatgcacgcaatgaatgcaaatcaattgggatttgggtaacgccaataaggaaagaccacttaccgctgagagttggcgcacaggatcgatgttggatatcggccgccgcactggcagcatcggcgttcggaaattgccctcaaccatgccgcccactccgccggtggccgtcgcctctgccagctgctgcgccttggtcatcaggtcccgcttgcgatcgcacgtgtggccgcagttgcattggcgcttgcgcacgcgctcgctgagattggccacgagtagcaggtgcttcagcttgttgctcaccgacgatgtggtgacggccctgacgcgttccacgctatcacagtcgttgggattgtagggcagcgaagtgctcgaggtgctcgaattgctcgatgcgctgacgtagcagttggaagatgcgcctgtttggttggcgttcgaggcggcgctgccggtttgggtggccaccgacgaggagctaggcgttaccgtgttgattgttagtatgctggatgccatggccgtcgaactgtcgacctcacaccaataatactccagctccagcttggaatcctggccaaaaacgacatacagatcaccgatggttatatccgccgcattcgcctgcgtccagcccttgcggattctcttcagtatatcgtcgctgagcagtggcttaaaatttcgagcctgtgccgcggccgccgcctccttagcttctttgcgtttggagcgggctacggatggagccgccaaagaaccggttacaggagtcgaaggagcgggagctgcagcacaggaagtttgtagaacagatgtcgccatggcattagatagatccgcgttggccggataagcctgttgtacaggatcgtgcgatgtttcaagcgcaacagcaacagttgtggtatcaccagtggtggccgaaagagctggaatagtggctgcttgcggatgctgcatggcctccaatatatcgcccagaaactcatgaatctcctcgcccagctcatcaccgctgctattctccatcttcatcagattgccctccaagggcccgtcgtccaaactcttctccagcggcgggctggcactcgatttgggtttctttgtctccggcgaacgcttctcggagccgctttccgttcgtagtcgcttgttggccgccaccgacatgccggccaaattgcccaaggtctcgctgcgcactttgaagcccatgcgctcctcgtatgccgtcaagcaaatactgatgctgcttaggtaggcggtgatgctgagcaaaggtcggtggatggccactcccggccggggctggaagcacattgagggatccagcgatgcaactgacggctgtaatggttccgtttcattgttgttgttattgttgttggacgcagcagatggcaggctgctggaaaagtatgcactcttctcctcgtgcaaacgctgattggcgctgcgccatttgtactcgaacgtcttgatgaagctgattagtttcttgtgcagcggaactatgatcctgccgcgtggattctgcgccagtgactggacgcgtccgaaggcctccatattggcgggagtcaccagcacctccaccttgctgggcagccggatatcctccagtgagtctacggtttgtcattgggtattattgggcaaacatatcgaatggaagcggactcaccatccaattgatttagccgccggagcgccttgcacgatggcgtcttaatgcgaatgttcttgcccttgcaacgcacggttatttggccctggtagaccagctgcttcagcttcatgaagtgcttctccgtgaggaactgcagcttgcgccgcatctcgccgtagttgatcagcgtgtacaactcctgggcgggctttttcagttctaaaacgattgattaaagttacaaaattgtccagcaattgcgaaatgaaatgaaggccaatggcaaaatggcaacgctagttgaattctaggaattaaccgaggcacgaggtttttggcgccgaaaatctatttttccgggaaaccgaaacaagctaactgtgaccttattaacgcattattttgccaatagcttgttaatttaacatttcgggacatgtcatatccagtttgacccttcttcttaccctccgagaagcgcacatatttgcaaatcttgtgatgggtctggtaatagtgctggcgaacttggtccttggttttgaaactatagtcgctgttggcattgcggcgcttcagcttggcattgatgcagttggccaccgcctcgaagtccttgccgaattcgttgagggcgtcgaagaagcagttgcgctccacattcgtccaggtggtcttcccgctgcccgtcttcagctggctgggcgtcttttgggcggccttctcctcctttttgttcggctcccgttcgctgggcggcggtgtcatcgggcgcgtctggtcctgcttcatcttctgtatgacccgggcactggcccgcgttcccggacaattgtgcatggtcaccgagccgaggagctcctcctcgggcagcttagctatcgagttaacaactactgctcctcctcccttgccatttggcagcggctcctcaatggacacggatgacgacggcggcggcggctgcgtcagcgggggtggcggcggctgcttggacagttcctccatgttggccaatccacatccgcttgcctcctagacaggatcaatcaatggcaatatcaattaaactgcgtagtcttccgggaaaagtgggaaaatggcgccgaaccgtccgattgcttggtattgtcgctgaaccgcgcgcccgggctaatccactaccgaccagaaatgatctcgaaggctttcccaagctccgacgtgcactcacctacaaatcagacatggaaaatcggtgccaaacgactatataaaaaacttattaacgagacgccagggatgttgatgttggccaacagtgtggtatcaacagtgcagtgtgtgctgttaggcgcgaagtggttgctgttaagttgttttgtttacccgcagcgatgcccgctcggttgttttacagccgccaatggctagttctagccgcagctttcgtttcctggctgctttccagctaaatgcgtaccctttgaactaaccgttatcttatttacatattaaatttaataaaaatatacaaaatccacacgaaacaaacaaactaatgatttaaagggactcagaatagagcacgctctcaatagcataagcttttattgatttcctttacctgttgattaattgcaaaaattcttcttgaggttttaaagtttattttcttacgtataaattttaaaaataggccaaaaaaataaagtttctcgcgtgcatcacaaataaataccaacaaggagtaatactagcaacacggctgcgagtatcacgatgagcattatctttttctgcaaatacaagggaaaatgccttttagaacccaacgctctcggggattcgcagtgtgcccaccttgcgcgccttcttctggtgctgctccgcctggtccagctcgtcggcgcccttgtccacgtggagcgtggcctgctgggcgtgaaactccacccgctggatcacctcgctctgctccattaccagggtctggatgcgcatgaacagggcgtgcacctcctcgatggacttctccaggcggcgcagctcgttgaatcgatccatcatttcgcgcagtgtctgccgctccttttccgtttcctgcagaaactaaaaatacaaaaattgttattataaagattaagcaaatgtctacatttatttactatttgcaatacaaataccttttgatctttacattttgtgttaaattgaaggttaattaacagagaatgttagaaagggcgggtgaagatcttattttattgatttaccgttggtccttgatcgttttctcttcaagtcttcctcttccctttttctcagccacatccaaatac

SEQ ID NO: 4850 - DNA, 3842 bp, DROSOPHILA
actgcactgttgataccacactgttggccaacatcaacatccctggcgtctcgttaataagttttttatatagtcgtttggcaccgattttccatgtctgatttgtaggaggcaagcggatgtggattggccaacatggaggaactgtccaagcagccgccgccacccccgctgacgcagccgccgccgccgtcgtcatccgtgtccattgaggagccgctgccaaatggcaagggaggaggagcagtagttgttaactcgatagctaagctgcccgaggaggagctcctcggctcggtgaccatgcacaattgtccgggaacgcgggccagtgcccgggtcatacagaagatgaagcaggaccagacgcgcccgatgacaccgccgcccagcgaacgggagccgaacaaaaaggaggagaaggccgcccaaaagacgcccagccagctgaagacgggcagcgggaagaccacctggacgaatgtggagcgcaactgcttcttcgacgccctcaacgaattcggcaaggacttcgaggcggtggccaactgcatcaatgccaagctgaagcgccgcaatgccaacagcgactatagtttcaaaaccaaggaccaagttcgccagcactattaccagacccatcacaagatttgcaaatatgtgcgcttctcggaggaactgaaaaagcccgcccaggagttgtacacgctgatcaactacggcgagatgcggcgcaagctgcagttcctcacggagaagcacttcatgaagctgaagcagctggtctaccagggccaaataaccgtgcgttgcaagggcaagaacattcgcattaagacgccatcgtgcaaggcgctccggcggctaaatcaattggatgactcactggaggatatccggctgcccagcaaggtggaggtgctggtgactcccgccaatatggaggccttcggacgcgtccagtcactggcgcagaatccacgcggcaggatcatagttccgctgcacaagaaactaatcagcttcatcaagacgttcgagtacaaatggcgcagcgccaatcagcgtttgcacgaggagaagagtgcatacttttccagcagcctgccatctgctgcgtccaacaacaataacaacaacaatgaaacggaaccattacagccgtcagttgcatcgctggatccctcaatgtgcttccagccccggccgggagtggccatccaccgacctttgctcagcatcaccgcctacctaagcagcatcagtatttgcttgacggcatacgaggagcgcatgggcttcaaagtgcgcagcgagaccttgggcaatttggccggcatgtcggtggcggccaacaagcgactacgaacggaaagcggctccgagaagcgttcgccggagacaaagaaacccaaatcgagtgccagcccgccgctggagaagagtttggacgacgggcccttggagggcaatctgatgaagatggagaatagcagcggtgatgagctgggcgaggagattcatgagtttctgggcgatatattggaggccatgcagcatccgcaagcagccactattccagctctttcggccaccactggtgataccacaactgttgctgttgcgcttgaaacatcgcacgatcctgtacaacaggcttatccggccaacgcggatctatctaatgccatggcgacatctgttctacaaacttcctgtgctgcagctcccgctccttcgactcctgtaaccggttctttggcggctccatccgtagcccgctccaaacgcaaagaagctaaggaggcggcggccgcggcacaggctcgaaattttaagccactgctcagcgacgatatactgaagagaatccgcaagggctggacgcaggcgaatgcggcggatataaccatcggtgatctgtatgtcgtttttggccaggattccaagctggagctggagtattattggtgtgaggtcgacagttcgacggccatggcatccagcatactaacaatcaacacggtaacgcctagctcctcgtcggtggccacccaaaccggcagcgccgcctcgaacgccaaccaaacaggcgcatcttccaactgctacgtcagcgcatcgagcaattcgagcacctcgagcacttcgctgccctacaatcccaacgactgtgatagcgtggaacgcgtcagggccgtcaccacatcgtcggtgagcaacaagctgaagcacctgctactcgtggccaatctcagcgagcgcgtgcgcaagcgccaatgcaactgcggccacacgtgcgatcgcaagcgggacctgatgaccaaggcgcagcagctggcagaggcgacggccaccggcggagtgggcggcatggttgagggcaatttccgaacgccgatgctgccagtgcggcggccgatatccaacatcgatcctgtgcgccaactctcagcgctcacacggcaaaagatcagtcgtcaggtgcttgtgcagcgccgtctcctaccacccacatccgctggcgatcgtccgtacgatctgctgagtgtgcgccaactccacagtggccttttcgagccgattgatcgcgtggatggcataagttccgctggcatcagcacctctggctcgaaacccgattccagcatgaatgccacgaccgcttcacaggatcaagagccaggggatcagggggcattggagttcctcaacgacgaggccacgcaggtcagcgctcgagacatgcccaatctggacatttgcgtggccaccaacaggacggacgtcagcagttccctgaacgaggcggcccaagacgggagcacaactcaaagcttcttccaaggcagcatgagtccgatgcacttgctcagagattcaacatccaacgcacgctggctggaggacaatatcaatgacttctcgttgacgtcgctgctggggcatttggatgagattgatgccaccagggatatactggatccgtcgtcaagcatgtcggtgatcagcgagagcagcgtggactttcggcacaagttccaggaaatcgccgccctgctgcagcagcaggagaaagattagcagtggccactgcggcaatccggtcgtgtcctcttcgtttgtgtacccaagtccggatcttgagatgagagtcgtccaagctggacgatggaaaggaaagccacgtgtgcctccaagcctcatgtcccactgatattactcattactcactcatcccacccacccacgttatacccactaacatttatgtttttacgcgactttttgtgatctatactcattttatgtatgccaagtattagcaagcactcacattgtctgaacatatatatttatttatacattaactttatgtatcgcgcggcagcgtaacgcgtagctcccaatccacacttttaattcccagccccattttgtttgttacccgctcgcacactcgttccgcactactctaattggtttctagcgcgtaagttcaatgcagcatagtagcttagcttaaggtccccacacccgcacccgcaccctcacccttagccactatcaactacaaaacccaatcgaaacttccatatgtatagagattctcccgcctccacctgataaactaaagctcattacattaaatcaaatcgaaaggatcgtcagaagactcgaaatgtttgttgaccatatataatatatatgtatgtatgaaacacgcattattttgggtgggaaaaccaatcaaatttatcctaacaataggaacacacttaaaacttgttattgtgcgaaggaaagtaccgaaaataaaagcgaattgaactaaaactaaa

SEQ ID NO: 4851 - protein, 982 aa, DROSOPHILA
MEELSKQPPPPPLTQPPPPSSSVSIEEPLPNGKGGGAVVVNSIAKLPEEELLGSVTMHNCPGTRASARVIQKMKQDQTRPMTPPPSEREPNKKEEKAAQKTPSQLKTGSGKTTWTNVERNCFFDALNEFGKDFEAVANCINAKLKRRNANSDYSFKTKDQVRQHYYQTHHKICKYVRFSEELKKPAQELYTLINYGEMRRKLQFLTEKHFMKLKQLVYQGQITVRCKGKNIRIKTPSCKALRRLNQLDDSLEDIRLPSKVEVLVTPANMEAFGRVQSLAQNPRGRIIVPLHKKLISFIKTFEYKWRSANQRLHEEKSAYFSSSLPSAASNNNNNNNETEPLQPSVASLDPSMCFQPRPGVAIHRPLLSITAYLSSISICLTAYEERMGFKVRSETLGNLAGMSVAANKRLRTESGSEKRSPETKKPKSSASPPLEKSLDDGPLEGNLMKMENSSGDELGEEIHEFLGDILEAMQHPQAATIPALSATTGDTTTVAVALETSHDPVQQAYPANADLSNAMATSVLQTSCAAAPAPSTPVTGSLAAPSVARSKRKEAKEAAAAAQARNFKPLLSDDILKRIRKGWTQANAADITIGDLYVVFGQDSKLELEYYWCEVDSSTAMASSILTINTVTPSSSSVATQTGSAASNANQTGASSNCYVSASSNSSTSSTSLPYNPNDCDSVERVRAVTTSSVSNKLKHLLLVANLSERVRKRQCNCGHTCDRKRDLMTKAQQLAEATATGGVGGMVEGNFRTPMLPVRRPISNIDPVRQLSALTRQKISRQVLVQRRLLPPTSAGDRPYDLLSVRQLHSGLFEPIDRVDGISSAGISTSGSKPDSSMNATTASQDQEPGDQGALEFLNDEATQVSARDMPNLDICVATNRTDVSSSLNEAAQDGSTTQSFFQGSMSPMHLLRDSTSNARWLEDNINDFSLTSLLGHLDEIDATRDILDPSSSMSVISESSVDFRHKFQEIAALLQQQEKD

SEQ ID NO: 4852 - DNA, 6226 bp, DROSOPHILA
cccgggcactggcccgcgttcccggacaattgtgcatggtcaccgagccgaggagctcctcctcgggcagcttagctatcgagttaacaactactgctcctcctcccttgccatttggcagcggctcctcaatggacacggatgacgacggcggcggcggctgcgtcagcgggggtggcggcggctgcttggacagttcctccatgttggccaatccacatccgcttgcctcctagacaggatcaatcaatggcaatatcaattaaactgcgtagtcttccgggaaaagtgggaaaatggcgccgaaccgtccgattgcttggtattgtcgctgaaccgcgcgcccgggctaatccactaccgaccagaaatgatctcgaaggctttcccaagctccgacgtgcactcacctacaaatcagacatggaaaatcggtgccaaacgactatataaaaaacttattaacgagacgccagggatgttgatgttggccaacagtgtggtatcaacagtgcagtgtgtgctgttaggcgcgaagtggttgctgttaagttgttttgtttacccgcagcgatgcccgctcggttgttttacagccgccaatggctagttctagccgcagctttcgtttcctggctgctttccagctaaatgcgtaccctttgaactaaccgttatcttatttacatattaaatttaataaaaatatacaaaatccacacgaaacaaacaaactaatgatttaaagggactcagaatagagcacgctctcaatagcataagcttttattgatttcctttacctgttgattaattgcaaaaattcttcttgaggttttaaagtttattttcttacgtataaattttaaaaataggccaaaaaaataaagtttctcgcgtgcatcacaaataaataccaacaaggagtaatactagcaacacggctgcgagtatcacgatgagcattatctttttctgcaaatacaagggaaaatgccttttagaacccaacgctctcggggattcgcagtgtgcccaccttgcgcgccttcttctggtgctgctccgcctggtccagctcgtcggcgcccttgtccacgtggagcgtggcctgctgggcgtgaaactccacccgctggatcacctcgctctgctccattaccagggtctggatgcgcatgaacagggcgtgcacctcctcgatggacttctccaggcggcgcagctcgttgaatcgatccatcatttcgcgcagtgtctgccgctccttttccgtttcctgcagaaactaaaaatacaaaaattgttattataaagattaagcaaatgtctacatttatttactatttgcaatacaaataccttttgatctttacattttgtgttaaattgaaggttaattaacagagaatgttagaaagggcgggtgaagatcttattttattgatttaccgttggtccttgatcgttttctcttcaagtcttcctcttccctttttctcagccacatccaaatacgcacgtgatttttaattgtgcgtcgcgaaatgaggtttgttgtatttaacatggtttagatgtaaatgtaagtatcggcattgtgatacgaagcatttgcgcgctttttctttctaagttcgcggtaatttggcgttttcaatggcgcgcgaaatatgtttgtgtgtatagaatgtgcgcgctaaaatccgcatttacatatgtatgtatgaacatacacaatgtgtgtgttgcgctaaataagcttccactttttttttatggtgaaccactgagtttctattatatatataaatatgtatagcttagctatacggctaatgtaattaatctatgtacgtgataatctgtattgcagaacataatgctttatttaacatcctcattaactaatagatgatgttaaaacaacagcggcaaacagagagagtgcatatgagtttgatttaccgttggcccttgatcattccctgtttaaatcttcctcattccttcttcttcccgagcatcgacatacgcacgtgttttttaactgcgcgccgcgaaataaagtttattgaattcaacgatctttagatggtgaaaagtgttacttgagtaaatgcgagtatgcgcattgtgatgcgaagcatttgcgcgtttttcttcctaaattcgctgtaattttgcgttttcaatggcgcgcgaaatatgtttgtatgtatagaatgtgtgtgctaacatctatttacacatgtatgtaatgtaatgtgtgtgttgcggtaaattagcttccacttctttttttatattttttgatggtgaaccactgagtttgaaaatatattctattcaatataaaaatgtatagcctaaccactcaaccaatataattaatcaacgtatgtgataatctgtattgcagaacataatgccttatttaacagcctcattaactaatagatgatgttaatacaacagcgggaaacagagagagtatgtatgagtttgatttaccgttggcccttgatcattccctgtttaaacttcctctttccttcttcttcgtgagcatcgacatacgcacgtgttttttaactgcgcaccgcgaaattaagtttattgaatttaccgttgtttagtgctgttactcgagtaaatgcgagtataggcattgtgatacgaagcattttttttcctaaattcgcggtaattttgcgtttgagcaaaataatttcatacatatgtatgtatgtatgaaggtgtgtgggtgttacaccaaatgagcttcagtgttttttttttcattttttttatggtgttccagtgttgaaaaagttgcgaaagtgattatatcctattagctattaaaatcccaaattttttttttttctgtgtaaagctttacttaaagtgatatgaaaatgatcgtctcgcaaattatagatgcgataaagtcaaatgaaatgaaaaatgaatacaacatcgaggtgagttgcgctctactgagtaatatttagtagctaatagtcctagattgtataaaatgtcatttaaactacatactaaatgccgaacatattaaaatatatatgtttatgaaacctttgataaggaatcatatcagacagaagacttagttgtttgtataattctttctttactcacattatccacaaagagtttggttgtcttgttctcgatgagtaactcgatttcttgttcgctggcttcagaattaactaaaaagtagattgtaacgaagttcttaaacaaaataatgtaatagttgcaaagcatttaatcagactcgtccattttgtatcacacttactgatttttgtatgcagtctcagattctttttgaccttggtctcgtagttctgcaggaatagttcgtttttgtgccacagattgatgaaagtctggtggagtccatagaaaagggttcttttcatccttgcctccaagctgtaatcgttttccgccggcagattcgccttgaagtcgttgaatcgcgtcattagctgattgcccagcctcaggtttttgttgtgaagctcatccatctcgttctctgtgcgaattggatttagaccgtgatgcagtggaagtattcacaactttagattcaaattcttaccgttgaaagttcgcagattgacagtttgggccatgcggttcatcgtctccaagttggcggctatctgtgcgagttgttggcgaatctccgtgtactgaaaaggaaggataccgtaaaaatctattaaaatcgtatattcacttccattgcatttccagtacatttccttgctcaggaggaagcagtgcttgtattgcttttttgctttgcaagagttgtctaccgttgtttacgtttacatggcgactacttgccttctcttcgtccgctctcttaaccacaataaaaaacgtatttaatgagaaaatgtttttttttttttctggacttatcacgagttttcgcgctacgccggcagcgattgagtaatacagctgattcataagtgcacacatgtgtgggtaagccataaaaaagaaaaaaagggtttccctctctccggctctctgatcttttatttccattgaggggaaacgtttaactatgctagatattagctgctttctgttgtatgttcttgcttcgctaagtatttataactttcaagatagctatcttaggagttaaagtttcttctattaactatttcaatactcaataatagtaaaaacttgtatgaattctgaagttgtgttttgtatacacttcgatccttaaactcaccggattgagtatgtcatccacattcgagccatactgcgtcatctttgaactggaccgatccttgggttcggtgctgctgttattgttgctgcagctgtgagagttttggctaacgacactgtagctattattgttaccgccggtgttgccaatgatgaactccgtggttccactgtacacgttcaaaagcagtgaaccgttcgacgacgagttcgacgagttcgtgctcaatgagcgctggaattagtacagcaaaaatgagaagaaaaaaaaataaataaataaaaataaaataggtccatgcgatcctaacgaactgcagggaaaaactgagaaaaaactaaattgaaactaacaactttggttgagtttatttacgtttgtgtgttcacaatctggcgcggtgtaaatgaactataaaaatgacttcggtactgaaattcacttggtgctaaaagtttgtcggcggaaacgcggggttgccccgtaagtgtgatgtgtggccacattatcgtcgttatctctggccgatctgataaatgccatagcgaacacccaccaaacccccttggctcacaagtcgaaatagtgccaaaagcgccaacagaaatgtgagagattgggccaattgtaaagaaggtggcagcaccttggtcagaatgtgtttcaacgtgccgcaaaaaaaaaaaaaactttgattaggattactttttaccgagaaaagtggaatccttttcctggcaaataccaccaaatgtatttcatcgtgttaagtagattttattcgtattgcggtttgagtgatgccaaaccactgtgcttcaaactaattagcagttacctcatcccaacctcccaaccaaccacccacgtttctaatattttcttacctgcaaaagctcgggcagtcgatctttacccatttctgcaacttggactgcctttggtttgaattatgccaattatatgccaaatttatgccaattccttgaattcctttccagtactccaaaatgtccactttatatcctttacagcagcttctgagctttgttcctggtttgttgttgccgttgcctccaacagctgttcgcgaatgggaaaatttgattgagagcgcaggagagagcgaaacctgctatcaaagcttatcagcgcacaagtttctgataagagccgcctaatatttaccgtctgcccttcggaaagcgacagggcggggtggaaagtcatggagagagagagagagagagagagggacagtcagaaaggcctaaacacagattatcacctatcacatatttgccatttattggcggctctttgctctcttactcgctcttttgttgcacacacacacaaacacaaaaaagaaaaaaattggattatgggaaaaactagctttatgtatttttaaaatttaacatgtaaatacattcggctacattttattcgatttattgaaaatcaattcctttgtcttcaccgcgccgcatacgttttcgaactaaaaaatcgacgccggcacaaaaacgcagagcctcccagtcgcgtcgagatttctttcaattcaaaaagattaaagacagcaaacactctggctacagcctgggccaaaataataggcattttatggtataaattcattgggcctaatccaaattcaaattagttatgaaaaattcaaaaatgtacattaaatgcagcaatagaattgtgatttgaatatacgaaggtattcgatttcatgaacttcggtgtatttgatatgtacgttcatgtgctttagctggagagagataaagatagagactcgtactacattatgtgtagttagtggcgatctacattttttgttgtctccgaataaaatgaataaatcgtctttgccaccgaaatgaaaactggttaggcggcggagaa

SEQ ID NO: 4853 - DNA, 948 bp, DROSOPHILA
atgggtaaagatcgactgcccgagcttttgcagcgctcattgagcacgaactcgtcgaactcgtcgtcgaacggttcactgcttttgaacgtgtacagtggaaccacggagttcatcattggcaacaccggcggtaacaataatagctacagtgtcgttagccaaaactctcacagctgcagcaacaataacagcagcaccgaacccaaggatcggtccagttcaaagatgacgcagtatggctcgaatgtggatgacatactcaatccgtacacggagattcgccaacaactcgcacagatagccgccaacttggagacgatgaaccgcatggcccaaactgtcaatctgcgaactttcaacgagaacgagatggatgagcttcacaacaaaaacctgaggctgggcaatcagctaatgacgcgattcaacgacttcaaggcgaatctgccggcggaaaacgattacagcttggaggcaaggatgaaaagaacccttttctatggactccaccagactttcatcaatctgtggcacaaaaacgaactattcctgcagaactacgagaccaaggtcaaaaagaatctgagactgcatacaaaaatcaccagcgaacaagaaatcgagttactcatcgagaacaagacaaccaaactctttgtggataatgaaacggaaaaggagcggcagacactgcgcgaaatgatggatcgattcaacgagctgcgccgcctggagaagtccatcgaggaggtgcacgccctgttcatgcgcatccagaccctggtaatggagcagagcgaggtgatccagcgggtggagtttcacgcccagcaggccacgctccacgtggacaagggcgccgacgagctggaccaggcggagcagcaccagaagaaggcgcgcaaggtgggcacactgcgaatccccgagagcgttgggttctaa

SEQ ID NO: 4854 - protein, 315 aa, DROSOPHILA
MGKDRLPELLQRSLSTNSSNSSSNGSLLLNVYSGTTEFIIGNTGGNNNSYSVVSQNSHSCSNNNSSTEPKDRSSSKMTQYGSNVDDILNPYTEIRQQLAQIAANLETMNRMAQTVNLRTFNENEMDELHNKNLRLGNQLMTRFNDFKANLPAENDYSLEARMKRTLFYGLHQTFINLWHKNELFLQNYETKVKKNLRLHTKITSEQEIELLIENKTTKLFVDNETEKERQTLREMMDRFNELRRLEKSIEEVHALFMRIQTLVMEQSEVIQRVEFHAQQATLHVDKGADELDQAEQHQKKARKVGTLRIPESVGF

SEQ ID NO: 4855 - DNA, 5183 bp, DROSOPHILA
ggtatacggccactccggcaaagataaaggccagcaggaccatgtcagtctggcctgatattctgttggtctccctttgcacttttattcgatcgtatttggcctgggcggcttgtctccggtcaaatgatttaccatagtgatttcgcgaccactcgtcgaagtcatagatgggcgtacggcccgcagaatcagatacacgcgatttctgaaatcgcgacttgtaaaacttagtctccgcatcgtcctcgactacgggttccgctacatcgtggacatcttgggcatattgggcgcctgccgtatgtacgattcccttgtcgtaaagtcgacgcagccggtaatttcccagaatctcataagcctgattgatctcccgaaatttcttggctgcgttctcacttccttggttcctgtccggatgataaagcatcgagagcttatagtaagctgccttgatctcgttctgcgtgcactgacgcctgattcccagtgcgtcgtagtggctcatctggtggcgttgactgaggtagaggccacgcagcagaagcagaggtcgccacaacattgggctgtgctggtacatcttggatgtgttctttcgcccgcttcacttgttttggtttcgttatatcacatgaaaattaaaaacaaatcgaatcagctgtttgaacttgaacttgttcaccctcgccatcgttgttatcgatagatcgatagtattctgaaccaatggtgcaggtacagcaaaaaattagctgaaagaggaaaaagagcttgtaattgattaatttataaaagatagattttgaaaatatttacagaataaatgattttcaaaaaagtttttacagatatatcagaaaaatatttgtaatccctggcttagttaaaaatttaagactttagtaaagttgaaattcgtcagctgtttgggctatgatgaaaaaagcaaaacgtaagctccacggttccagtcagctgtttggccgattcgctgcgaatggcaactgttgcaactattttggtttgagtcttctcaatttttatttatatatagaacagggcagcagccggttcaatagtctcacgcagcgtgcttgattttcccgctaaacgcctgcaactgtatctgtgtgtattcgagagcgatcgagaagtttctggtggtcgaaatttaggccagaaggcacaaaaccgaactgaatagtgagtcatccgttaacaataaaaagttgcagctacagtttttgtctttttatacagaaaattgtgtaaccatgacaaacaccatcaacagcgaggaagtgtccgacgcaggaagctacaaagataagggcaacgaggcgttcaaggcctcccgctgggaggaggcagtggagcactatggcaaagccattaaggcgggctctaagcacaaggagctggcggttttctataagaatcgtgctgccgcttatctgaagctaggaaagtatgaaaatgcggtagaggactgcactgaatctttgaaagcggctccgggggatcccaaggcactgttccgtagggctcaggcgtacgaagctctggagaagttcgaagaggcctacaaagacgcaaccgctttgtttaaagcggatcccggcaacaaaaccgtacagcccatgctccagaggcttcatgtcgtcgtggaagagcgctctgcccgtaatgccaagacatccacaaaagtcaagcagatgatggatcttacttttgatttggccacgcccatcgataagcgtcgcgcggcagccaataacctagtagttttggccaaagagcagactggcgctgaactgctttacaaggaccactgcatcgccaaagtggcctcactaacaaaggtggaaaaggatcaggacatttatgtgaatatggtgcatttggtggctgctctttgcgaaaatagcgtcgagcgtacaaagggcgttttaactgaactcggagtaccgtggttcatgagggttctcgaccaaaaacacgagaactgtgtgtccaccgcccagttttgcctacaaacaatattgaacgcattgtctgggcttaagaacaaacccgattcgaagccggagaaggagctgtgcactaggaacaaccgggaaattgacactctcctaacatgcctagtttatagtatcacggatcgcacgatttctggagcagctagggatggcgttattgagcttataaccaggaatgtccactacacagctctagaatgggccgaacgcctggttgagatcaggggactgtgccgtctgctggatgtgtgctccgaactggaggattataagtacgagagtgcaatggatatcacaggctcatcatccacaattgcatccgtttgtctggcccggatatatgagaacatgtactacgatgaagctaaggcacggttcacggaccagatcgacgaatacattaaggacaagcttttggcgcctgatatggaatccaaggtgcgggtcaccgttgcgattactgccctgcttaacggtccattggatgtgggcaatcaggttgtggccagagaaggtgagttctgttattggatttagaaaatggtacttaattaatggtgaaatttgtaacaggaatactgcagatgattctagcaatggctacgaccgacgatgagttgcagcagcgagtatcatgtgagtgcctaatcgccgcttcctctaaaaaggacaaggccaaggctctttgtgagcagggagtagatattttaaagcggctctaccactccaagaacgatggtattagagtacgcgccctggtgggtctttgcaagctgggtagctacggcggtcaggacgcggccatccgaccatttggcgatggagctgcccttaagctggcggaggcatgccgtcggtttttgatcaaacctggaaaggataaggatatccgtcgttgggctgccgatggtctggcttatttaacactggatgctgaatgtaaggagaagctcattgaggataaggcttccattcacgctttaatggatttggcccgcggaggaaatcagtcctgtctctatggtgtggtcactacttttgtgaatctgtgcaatgcgtatgagaagcaggagatgttgcctgagatgatagaacttgccaagtttgctaagcaacacataccggaggagcacgagctggacgacgtagatttcatcaataagcgtattactgtgctggcaaatgagggcataacaactgctctttgtgcactggcgaaaactgaaagccacaattcacaggagctgattgccagggttttgaatgcggtttgtggactgaaagagttgcgaggaaaagtggttcaagaaggcggcgttaaggcgctgcttcgtatggcgcttgagggaactgagaaaggaaaacgccatgctacccaggcgttggctaggattggcataaccattaatccggaagtatctttcagtggccagcgatcgcttgatgtaatccgtcctttgttgaaccttttgcaacaggactgcacagcgctggagaattttgagtcgctaatggcactcaccaatctagccagcatgaacgagagcgtgcgccagaggattatcaaggagcagggggtctccaagatagagtattatctgatggaggaccatctgtacctgactcgtgcagctgcccagtgtctgtgtaatctggttatgagtgaggatgtcattaaaatgttcgagggcaataacgaccgagtgaagttcttggcgcttctctgcgaggatgaggacgaggagaccgcaacagcttgtgccggagctctggccattattacttcagtgtctgtcaagtgctgtgagaagatcttggccatcgccagctggctggacattctgcacactctgatcgccaatcccagtccggcggtccagcatcgaggcattgtgattattctaaacatgatcaatgctggagaggagatcgccaaaaagctgtttgaaacggacattatggaactgctgagcggtttggggcagctgcccgatgacacgcgtgccaaggcccgagaggtggccacccagtgcctggcggcggcggagcgttataggatcatcgagcggtccgacaacgcggaaatccccgatgtgtttgccgaaaattcgaaaatatctgagattatcgatgattaagcgaaattcgtttgtagtgccttttgtttttcctccatttcatcttctttactttactcacagtgtcatcgcgaaatttaacttatttttcaaaatatcaaatgtacttaactgttttataaatattgttcgaatttatttcgtttttaaaggtagtttgttttattccttagtgggtaatataatatattatttagttatttcatgaatacgcgattttttaatttaactaatttaatacagaccaagcctaatccaagcctaattgctgcggcctaatgtgatttggattgtaatatggatggccactaggatggcctagtgttttcccaccgactccattttccccggtgcactgcctcggtacgttttctattcattgccacacattagtcgccagctcgaggtagctgacttcctctaatgcagaagatgcttctgatgcggcagtgttgcagtgtcaggtagccgggaattccgagccgagcatctcttccagctgattgctcaatctcaatgaagtgtgattaaataaataatagttgctttaatttagtttggctcagcgcagtgggaaatggccgagggtttcggttgctatgattcggttgccatgacttaacggcatttattccgaaatccatcccgctttttgtctttggccatttggcattccttttcccgcgattatttcgcattttcctcttctccttaaaccatatactgtgctcaatttgaccaatataaataacgtggttagaaggtaaagtaatgaggaagatgaattcttcaggacccttatatgctaaagggatataagctgaaataaaatatgttgatgtaagaccccagaaggaaacaaactaatgcttggcaatatatttaaaaaattggtgtataaaaacaattaagttaggggaataaacattttaaaaaatggtaaaaaaagacattttaaaaaatgtaaaaaggatatttccgtggaaatatattagcaaat

SEQ ID NO: 4856 - DNA, 3067 bp, DROSOPHILA
cgaatggcaactgttgcaactattttggtttgagtcttctcaatttttatttatatatagaacagggcagcagccggttcaatagtctcacgcagcgtgcttgattttcccgctaaacgcctgcaactgtatctgtgtgtattcgagagcgatcgagaagtttctggtggtcgaaatttaggccagaaggcacaaaaccgaactgaataaaaattgtgtaaccatgacaaacaccatcaacagcgaggaagtgtccgacgcaggaagctacaaagataagggcaacgaggcgttcaaggcctcccgctgggaggaggcagtggagcactatggcaaagccattaaggcgggctctaagcacaaggagctggcggttttctataagaatcgtgctgccgcttatctgaagctaggaaagtatgaaaatgcggtagaggactgcactgaatctttgaaagcggctccgggggatcccaaggcactgttccgtagggctcaggcgtacgaagctctggagaagttcgaagaggcctacaaagacgcaaccgctttgtttaaagcggatcccggcaacaaaaccgtacagcccatgctccagaggcttcatgtcgtcgtggaagagcgctctgcccgtaatgccaagacatccacaaaagtcaagcagatgatggatcttacttttgatttggccacgcccatcgataagcgtcgcgcggcagccaataacctagtagttttggccaaagagcagactggcgctgaactgctttacaaggaccactgcatcgccaaagtggcctcactaacaaaggtggaaaaggatcaggacatttatgtgaatatggtgcatttggtggctgctctttgcgaaaatagcgtcgagcgtacaaagggcgttttaactgaactcggagtaccgtggttcatgagggttctcgaccaaaaacacgagaactgtgtgtccaccgcccagttttgcctacaaacaatattgaacgcattgtctgggcttaagaacaaacccgattcgaagccggagaaggagctgtgcactaggaacaaccgggaaattgacactctcctaacatgcctagtttatagtatcacggatcgcacgatttctggagcagctagggatggcgttattgagcttataaccaggaatgtccactacacagctctagaatgggccgaacgcctggttgagatcaggggactgtgccgtctgctggatgtgtgctccgaactggaggattataagtacgagagtgcaatggatatcacaggctcatcatccacaattgcatccgtttgtctggcccggatatatgagaacatgtactacgatgaagctaaggcacggttcacggaccagatcgacgaatacattaaggacaagcttttggcgcctgatatggaatccaaggtgcgggtcaccgttgcgattactgccctgcttaacggtccattggatgtgggcaatcaggttgtggccagagaaggaatactgcagatgattctagcaatggctacgaccgacgatgagttgcagcagcgagtatcatgtgagtgcctaatcgccgcttcctctaaaaaggacaaggccaaggctctttgtgagcagggagtagatattttaaagcggctctaccactccaagaacgatggtattagagtacgcgccctggtgggtctttgcaagctgggtagctacggcggtcaggacgcggccatccgaccatttggcgatggagctgcccttaagctggcggaggcatgccgtcggtttttgatcaaacctggaaaggataaggatatccgtcgttgggctgccgatggtctggcttatttaacactggatgctgaatgtaaggagaagctcattgaggataaggcttccattcacgctttaatggatttggcccgcggaggaaatcagtcctgtctctatggtgtggtcactacttttgtgaatctgtgcaatgcgtatgagaagcaggagatgttgcctgagatgatagaacttgccaagtttgctaagcaacacataccggaggagcacgagctggacgacgtagatttcatcaataagcgtattactgtgctggcaaatgagggcataacaactgctctttgtgcactggcgaaaactgaaagccacaattcacaggagctgattgccagggttttgaatgcggtttgtggactgaaagagttgcgaggaaaagtggttcaagaaggcggcgttaaggcgctgcttcgtatggcgcttgagggaactgagaaaggaaaacgccatgctacccaggcgttggctaggattggcataaccattaatccggaagtatctttcagtggccagcgatcgcttgatgtaatccgtcctttgttgaaccttttgcaacaggactgcacagcgctggagaattttgagtcgctaatggcactcaccaatctagccagcatgaacgagagcgtgcgccagaggattatcaaggagcagggggtctccaagatagagtattatctgatggaggaccatctgtacctgactcgtgcagctgcccagtgtctgtgtaatctggttatgagtgaggatgtcattaaaatgttcgagggcaataacgaccgagtgaagttcttggcgcttctctgcgaggatgaggacgaggagaccgcaacagcttgtgccggagctctggccattattacttcagtgtctgtcaagtgctgtgagaagatcttggccatcgccagctggctggacattctgcacactctgatcgccaatcccagtccggcggtccagcatcgaggcattgtgattattctaaacatgatcaatgctggagaggagatcgccaaaaagctgtttgaaacggacattatggaactgctgagcggtttggggcagctgcccgatgacacgcgtgccaaggcccgagaggtggccacccagtgcctggcggcggcggagcgttataggatcatcgagcggtccgacaacgcggaaatccccgatgtgtttgccgaaaattcgaaaatatctgagattatcgatgattaa

SEQ ID NO: 4857 - protein, 947 aa, DROSOPHILA
MTNTINSEEVSDAGSYKDKGNEAFKASRWEEAVEHYGKAIKAGSKHKELAVFYKNRAAAYLKLGKYENAVEDCTESLKAAPGDPKALFRRAQAYEALEKFEEAYKDATALFKADPGNKTVQPMLQRLHVVVEERSARNAKTSTKVKQMMDLTFDLATPIDKRRAAANNLVVLAKEQTGAELLYKDHCIAKVASLTKVEKDQDIYVNMVHLVAALCENSVERTKGVLTELGVPWFMRVLDQKHENCVSTAQFCLQTILNALSGLKNKPDSKPEKELCTRNNREIDTLLTCLVYSITDRTISGAARDGVIELITRNVHYTALEWAERLVEIRGLCRLLDVCSELEDYKYESAMDITGSSSTIASVCLARIYENMYYDEAKARFTDQIDEYIKDKLLAPDMESKVRVTVAITALLNGPLDVGNQVVAREGILQMILAMATTDDELQQRVSCECLIAASSKKDKAKALCEQGVDILKRLYHSKNDGIRVRALVGLCKLGSYGGQDAAIRPFGDGAALKLAEACRRFLIKPGKDKDIRRWAADGLAYLTLDAECKEKLIEDKASIHALMDLARGGNQSCLYGVVTTFVNLCNAYEKQEMLPEMIELAKFAKQHIPEEHELDDVDFINKRITVLANEGITTALCALAKTESHNSQELIARVLNAVCGLKELRGKVVQEGGVKALLRMALEGTEKGKRHATQALARIGITINPEVSFSGQRSLDVIRPLLNLLQQDCTALENFESLMALTNLASMNESVRQRIIKEQGVSKIEYYLMEDHLYLTRAAAQCLCNLVMSEDVIKMFEGNNDRVKFLALLCEDEDEETATACAGALAIITSVSVKCCEKILAIASWLDILHTLIANPSPAVQHRGIVIILNMINAGEEIAKKLFETDIMELLSGLGQLPDDTRAKAREVATQCLAAAERYRIIERSDNAEIPDVFAENSKISEIIDD

SEQ ID NO: 4858 - DNA, 3818 bp, DROSOPHILA
ttttctatggaaatttcccactatcttgtacgaaataatctgcaacagattggcatgttatcatcccagacgatattggtggcaagtagaagtggatgagaggtttgcgttcccataagcaaatggtgcggaaacaaatataatcgaaccactttgtatggtcagctcaatttcgccgtatcagcatggctcgggaaacgttatctgtccatcggcttgcggcctcaacggggtattagaggtgtttagaaataaaacaactataaatccacatttgacgagtcatatagatgtgcaccgaaggtggaacatacgtttatggtaactgttaattgaccgaataaactatacccgcccactttggccatcaattatgcgcatctaaattgaactttgttcttgctgccccacagttgccattgtcccgcaataaacaaataactgcgtgtataagcgaataaattattacaaaaatatggcttaaagtgaagcgtgtgacaatcaataaaacaataaatgtacattcgaacaaagtccgaaaatgattttatgttaatttatgggaatataacaaaaccaaaaaaaaaaaacatacgaaaacaaataaaaacaattttcgccactgatacgatagtttaagtacctttatacacataatctaatcatcgcattttttgccaacggtaatccattccagtcttgtgttctttcgttaattacataacaaaaaaaatgctctcttttagcacttctaaaataccgaaaacaaatcaaatctatcttatttataaggttattttacgtacatttatttacaaggtaccgtctttatctttacactcaatttatgagaaagtaatcttatctgtattcgatgacgcaaagtgtatattggcccacccgatccttccttgaatgttatgtacaaaatttgtagcttgcctgtgaaataatctaaacaaattctgaaccacgaccatcatcatcgatattttgtcaggttcaaagggcccgttccggcggaggacaaggagaaggtcgatgacctgcacaagatgaccttgaagcgcaaagcgcaactgcacgaaatcgagcaatccttgccagcgaaatccggccgctatttgcaggtgagttgccactccgaagtccatggtccgaggtccaaagtctctgatataaaagtgcgtccaggtcataaaactgagaactttgcctccaagtggaaacgggaaataagtgaggaaaaagttctttcctgtgcgacaattctcgcgtcttgttctggactatggcaggactttgggttttggtcttgttcctcgcatttcagttggactccactccaccactcgagttgaatcatcaactcaacttgactcgaagttgacccactgaaactcactggcgacctccgctctgctctccacattccattgcagataatcctgggcgatgtaaatgtctcgattctcaacagaaacgacaaagttcgctataaagatgactatgaaaagtttaaattaatactcaacgtaattggactgataatggccttcttcaatttgatattcaactacaggtgagtggcactctccggcacacccatgagttgcgcccactcacaacttatgcttcccagggccctggagctggccttcatattcctgttggtctggtactactgcaccctgaccattcgcgagtccatcctcaaggtgaacggctcgaggatcaagggctggtggcgggcgcaccacttcatctctacggtcgccgccggtgttctattggtttggccacagggcgagcactggcaaatcttccggatgcagttcatgtacttcaacgtctacattagtgagttgtgcttttcagcttggggcatactctacgcctctactgctccacgaatatttcgctaaaactctgccctttgcatgcattgtaatcgctgcatattccgcttgctcgcaattgcaggcattgtccagtatttgcagtttggctaccagaagggcctgctctatcgactgaaggcgctcggcgagcggcacaacatggacatcaccatcgagggcttccactcgtggatgtggcgcggtctgagcttcctgctgcccttcctgttcatcggctacggttaccaggcgtataacgcgtggacgctctacaagttggcctacagcccgccggatgcgccgtggcacgtgtccgtgatgtccggactgttcctgctgctcttcgtgggcaacatggccaccactttatgggtggtgcccgagaagatacgcgaacgggccaaggagcgctaccgactccagagcatgggcaagtcgatgaagctgcgcaaggagatgaaggtgagggacttcggtggcggcgactatagcatttcgtcttaagggagctctttttgttgcggaaagaatagcacattggcaaaagactgcagaaggtccaatctttgacacatatatgtgaaatgggaatatgaaatttttgtatcctaaaatggcttcgatattcgaattggatttcgctagattgattcgtgaaggtcaagtaaattgttttagctgtagcaaagcagaaaatcggcaaagtaataaaatgtattaaaatgcaaattctgcaactgcaagatgaatcttttgaagaactcccacatataactacatatgttgctcctacctaattgcagaatagcgccagtgatttggacctctcgagcggatcgaaactttcgccaacagcgaccacgaccacttccattgcgactgcgacgcaaacgcccgccgagaagaaggaaacttaaacgaatcagtgcgatgattctgattagcctggcatttcaattgaacatatatttactgtttttactacgttttttttttcctatttattaaattttcccttggttttgttcctctccccttcccagccaccaaaacgactttgaattgtgtttttttcccccatttcatacacataatgtaaaactgttgtacatttgaagcaaacactatataagcaaagaaaaaacaacaatatgtagtcacagtacacatttttttttttcgcctaattgtaagtatgaaaagtgagaagatgaaatattaaatggaattgaagtgacccgtttttgtttattttttatgtttagactaagattgaaatggaagctaaaaaagacaaataaatgagaacgaatggttaataatatgcatttcgtgttataactggaaaactgaggaagtctcgattgatatgaattatatatacagtgcagcaagttccattccaatcaaaatgttgaatttgagcggttttccctggggtgcaaatgactccaaaagtgtggcaggcggcgtggtgacaaggcttaggtaatgtcgccttgttttactggcggccattaatgcggctccccgttggccgtctccacagcatttcccggccggaaaaggggatcccctggcttttccgaatccaccaaaaacccccccccccacacaatgttcccttgccccgctcacctcacatttggtgcaacaaaggttcgcctcctgcaatgcggcaaaaagcggcgcggtttttgcagctccattttaccatcgcccgcctcgaccgcgaaaaccgcaagcccagtgtctctgtgtgagtgcgttcctacacagtgagaaaatgcgaaattgtgtctaactctgaagtgggataattccgaagtttggcgcctgtttctcccagtgcatgtgggcccgtgcagtcagttgccggttccaggatcccgggatcctggccattttgcttgtctg

SEQ ID NO: 4859 - DNA, 982 bp, DROSOPHILA
gttcaaagggcccgttccggcggaggacaaggagaaggtcgatgacctgcacaagatgaccttgaagcgcaaagcgcaactgcacgaaatcgagcaatccttgccagcgaaatccggccgctatttgcagataatcctgggcgatgtaaatgtctcgattctcaacagaaacgacaaagttcgctataaagatgactatgaaaagtttaaattaatactcaacgtaattggactgataatggccttcttcaatttgatattcaactacagggccctggagctggccttcatattcctgttggtctggtactactgcaccctgaccattcgcgagtccatcctcaaggtgaacggctcgaggatcaagggctggtggcgggcgcaccacttcatctctacggtcgccgccggtgttctattggtttggccacagggcgagcactggcaaatcttccggatgcagttcatgtacttcaacgtctacattagcattgtccagtatttgcagtttggctaccagaagggcctgctctatcgactgaaggcgctcggcgagcggcacaacatggacatcaccatcgagggcttccactcgtggatgtggcgcggtctgagcttcctgctgcccttcctgttcatcggctacggttaccaggcgtataacgcgtggacgctctacaagttggcctacagcccgccggatgcgccgtggcacgtgtccgtgatgtccggactgttcctgctgctcttcgtgggcaacatggccaccactttatgggtggtgcccgagaagatacgcgaacgggccaaggagcgctaccgactccagagcatgggcaagtcgatgaagctgcgcaaggagatgaagaatagcgccagtgatttggacctctcgagcggatcgaaactttcgccaacagcgaccacgaccacttccattgcgactgcgacgcaaacgcccgccgagaagaaggaaacttaa

SEQ ID NO: 4860 - protein, 247 aa, DROSOPHILA
MAFFNLIFNYRALELAFIFLLVWYYCTLTIRESILKVNGSRIKGWWRAHHFISTVAAGVLLVWPQGEHWQIFRMQFMYFNVYISIVQYLQFGYQKGLLYRLKALGERHNMDITIEGFHSWMWRGLSFLLPFLFIGYGYQAYNAWTLYKLAYSPPDAPWHVSVMSGLFLLLFVGNMATTLWVVPEKIRERAKERYRLQSMGKSMKLRKEMKNSASDLDLSSGSKLSPTATTTTSIATATQTPAEKKET

SEQ ID NO: 4861 - DNA, 3709 bp, DROSOPHILA
agtttttgtgggtgtcatcattctgaaattgaatcatggtttatttctttataaaatccgatttctaggcttagttacatgtatgttattgatacagaactcaaattatctgtatgcgtgtatatcatgaatgccttatacatatttatgtatgtatatttacaaaacatgccctcttcttattcgcaaatgggtctcgcatattttagctcagagataacaaatttcaaaagattttactaaaacgaagcattgcactctcacttactcactacgaaagtatacttacgtcagagtacatttccactcccgctctcacactttcaggttctccactctctcttagcgtgctcgcactcccagtctggccccccctcctcacgtgaccaatataattctgttcctttaacaatgaaattaaaacgaaatagttattatacagagaagagctagaaatcttgtttacatacctcagtcggaaagcttagagcataaagtacactttgttgaaaatatacagcagttttttaggcacattaaacagaaaatatgtgcggtcgcacgtgtttaaagttgccagagcgagtgcaactcaatgactgagcatgcggtccgaacattgcagagatctggactctcctccgtttggcggagcggcaaaaaccgtatctttgcgagagacattccgctctttctctcgcgatctaaaccgacttcccacgttccgattccgatcgtggtggtattcgttcgcggtatgggatttattttcggatcgagagtaaatattctctcgctaaagcagctataactggtttaacatgccgaaaaacacaaatcgcattaccacctaatctgagctgaaactggtttgatatgtacacatacatatatataaagctatttttgctcaaattatatctagtgcttaatttaacgtttaccacatttaagtgggaccctgttggttattccactctataaactcttttcgcatattacaattatttacacattttgggtcttgactctcaaaggcaggacacacgaacattttaattgtagattacatataaaaactaaactttatttttgtggcgtcaataagatcatagatcgaaatcctcgttctgaggcggatttaaaactgatttttcaacttcagtaagtagtccaatggcccgatagttatcatttaacatggcgtactcctgtaagaccttcacgtaggccaaggccatatttttacagtcgatggatttcagtgaattttgtaaggaagcgactactttggggtccacatcgtcttgactggtctcattttcctcctgtcattgagtcatttatcgttacgttagttctattacagtccaaggacctgtttacttacctcaactgctgccgtgtcgtgagattcaacagtctaaaaaaaaacattccaaaattaaacacatttttcaggttgaagaaacaactaacctccttgatctcatcttttaaggtcgtttccttttccaatgacccaatttcctcttcatcggtaaattcaccatgctaagaaaattaataataagtgctaatgttactgttgatctacttgtacacacccacctctatctctattttaattatagcttcttcagaatccgtacgcacgcgtacttctaattttttcgacttcgcctgcaataatagtattaatttatgttgcgacttttcaatagtgtcataccattattggcgttttgttggctttcttatttcctgccgcttttgctttttcatcatcagaccattttttacacaccttacaaagtttggatggacgattcttagtcagctttcttaggtattcacacctcttacagccacttttaattagaccgctttgttgctaggattagttttatatttactagcatttaacttatcctttatatgtttggctatactcaccaagcttacagcttccttccacttgttggtttttgcatttaacatatttctaggtttctaaaaaagcatatcgagttcagtcgaaattcgatcagaattcgatgagagttttcatgaaaacatggatggatattggaagcgcaatgaaaatatgtataagttcttttgtaacggttcttacattgatcagctttggtttctcagtaagttgctcagttttgtccatcttggcctccgtcagctggaccaggcgatcccgccacctgcggcagattctcttggtcttgcgctgttcctgcaccagtgagattgagctgcccacttggaactcgcgctgtgtgggatcggtctttgcctggattttgttcctcatctccaccatttgctctatgtattgtttgaccttgatgatttcggcatcctgcaggccaatcagaatgtccctgtacttcccaataagtcctttgaaacgtatcacttgcatggcaagcatcatggactgcgccttgtaggacgtacgcttcgagttattcttctccttctggatgacagtgcgcagctgatcgagctcgccataggtatcattaaggtagcggatggcattacgaagatttgactccgctgtggcaaaggcggtagcatccggtggacgaaatcctggcggggcaggacccagtgcaaataaccgggactgcaagttgtccgataaattggattccttttccataaatttaacaaaacttagacttccacaatatgcttttttgtagacttcagattggtattgcccatccgatgcatttagggttgcaatttcgaagttatcgataaagtttgcttcatttgatcaatattgcataatactataactttttattaactgtattacatgttttcacgatactagttaattcttttcaattatgtttgaattttctattttgtgcaaccgaaggtcttttcttgaacctttagtgtcatattggtgctgccagatttttcggtttttgtcaatttccaagacgaacttgcttacagatcggcgttgatctcggcaggattcactttgttactcttcaaaatactaataagatttcagaaatgttggtttttcttgtgaaattcctttagattgttgtaactataggttttagaaaacggtattgccacagcgcaatattttagccaatacccaagccagatttgtttagaaccagattcatttttcagtggtgttagcaagtgcatgaaccatatttaaataaagtaaattaaagtatatatattataaaatattaaaatcttaaatatagaggtataaattaggtatgtgccttatcttatctttgcttttccagtagattacgtgcttgtttataaggacactacgtttgatccacctcgaagtccttgatctgggctggatattgaatggcgtgctccacctgtattagcagtcctatggccctgaaattatcatggatcatggcgtactcctggagcgctcttaggtgtctcaatgcctcttcgtcgttgctgatggagatctcggccgcagactctgacaaatcattagtattgggttcggcggcattaaagactgtaaactgttccccatcccgctgccgatccgtttgcacttcgtagtccttctggatcttgatatcgacatcatccaatggctgctttcgtttgcgatacgtacgcatttggcggggaataactgtgctgacagtggtgcccatagacagca

SEQ ID NO: 4862 - DNA, 1299 bp, DROSOPHILA
gtggaagtctaagttttgttaaatttatggaaaaggaatccaatttatcggacaacttgcagtcccggttatttgcactgggtcctgccccgccaggatttcgtccaccggatgctaccgcctttgccacagcggagtcaaatcttcgtaatgccatccgctaccttaatgatacctatggcgagctcgatcagctgcgcactgtcatccagaaggagaagaataactcgaagcgtacgtcctacaaggcgcagtccatgatgcttgccatgcaagtgatacgtttcaaaggacttattgggaagtacagggacattctgattggcctgcaggatgccgaaatcatcaaggtcaaacaatacatagagcaaatggtggagatgaggaacaaaatccaggcaaagaccgatcccacacagcgcgagttccaagtgggcagctcaatctcactggtgcaggaacagcgcaagaccaagagaatctgccgcaggtggcgggatcgcctggtccagctgacggaggccaagatggacaaaactgagcaacttactgagaaaccaaagctgatcaataaacctagaaatatgttaaatgcaaaaaccaacaagtggaaggaagctgtaagcttgcaacaaagcggtctaattaaaagtggctgtaagaggtgtgaatacctaagaaagctgactaagaatcgtccatccaaactttgtaaggtgtgtaaaaaatggtctgatgatgaaaaagcaaaagcggcaggaaataagaaagccaacaaaacgccaataatggcgaagtcgaaaaaattagaagtacgcgtgcgtacggattctgaagaagctataattaaaatagagatagagcatggtgaatttaccgatgaagaggaaattgggtcattggaaaaggaaacgaccttaaaagatgagatcaaggagactgttgaatctcacgacacggcagcagttgaggaggaaaatgagaccagtcaagacgatgtggaccccaaagtagtcgcttccttacaaaattcactgaaatccatcgactgtaaaaatatggccttggcctacgtgaaggtcttacaggagtacgccatgttaaatgataactatcgggccattggactacttactgaagttgaaaaatcagttttaaatccgcctcagaacgaggatttcgatctatgatcttattgacgccacaaaaataaagtttagtttttatatgtaatctacaattaaaatgttcgtgtgtcctgcctttgagagtcaagacccaaaatgtgtaaataattgt

SEQ ID NO: 4863 - protein, 387 aa, DROSOPHILA
MEKESNLSDNLQSRLFALGPAPPGFRPPDATAFATAESNLRNAIRYLNDTYGELDQLRTVIQKEKNNSKRTSYKAQSMMLAMQVIRFKGLIGKYRDILIGLQDAEIIKVKQYIEQMVEMRNKIQAKTDPTQREFQVGSSISLVQEQRKTKRICRRWRDRLVQLTEAKMDKTEQLTEKPKLINKPRNMLNAKTNKWKEAVSLQQSGLIKSGCKRCEYLRKLTKNRPSKLCKVCKKWSDDEKAKAAGNKKANKTPIMAKSKKLEVRVRTDSEEAIIKIEIEHGEFTDEEEIGSLEKETTLKDEIKETVESHDTAAVEEENETSQDDVDPKVVASLQNSLKSIDCKNMALAYVKVLQEYAMLNDNYRAIGLLTEVEKSVLNPPQNEDFDL

SEQ ID NO: 4864 - DNA, 4401 bp, DROSOPHILA
tgcccacaaatgctgcaatggaaaacgggtatattagatagtcgaattggaattgggcacaggaatgcgttcgaacatttaaagatgagttaacgaagctatagatggtctgactacggatgattccgtgcctctttcggctggctggcttggtcgaactatctctgtgtatttaacactgttttgtataaactggatggccttatctctccctcttaaccttattacatttgcataccccgtaatccgtaatccgctcccagcagagccaaacaaacaccgctaactgcacctcagaatgtcaacaattgcgagaacggacatgcaaagtgcagtaaaaaaagcacactcaattttagatgctcgaagacatactagatacatacatatgtatgtatattaaatatcagtttagtagtactgcagtatctgctattttaatttaattcaaatttaagatttattttgtaagtttaagtataataaccacacttaatagcccccctttgaagcgattgagttcgcggttatactcaatcaatataagattgcagggaaatgcaattgcctgccatcccagagtgcagtacccctgccctatcagctggacgcagtatattgccattgggaatatacgagtatatggaagcattgtctccttcgcagccatatctttcatccaagcatacaaacatacatatatgtacatatatacgagggtgtgtgtcagttgagcgaaaaacacacatattctgaacggaaaccctaagatttagtctttgaatactttcagtgtcaggcagctgtttgtggtggaaaactttccattaaaaacaaggtcttgccttagctagtttttgtgccctcatgtcactcttatttacaagcaagctgttctatattttaaaactttgattttcacagtcattgcaacaacagttgttcaaaagctcgccagaaaagagaaaataaaatagtctgtagtaatgtgttttgctttgtacgcagttctgcttttactcaaaatgtatttatgtatctcaatggaatttttaattttgctagtgctagtatttagacatttatattataacagcatatagtaaaatgatgtaaaatgctaccgaacaaagtgaagcgacagatccgtaaagtgagatacatatgtaccaatatatatacataaattaatttcttagtattttatttttaacaacttctaatcaacaattggtttttataaacatatttcacatatatgtgtattcgtgctcatggatatgaatgattaatatgcatatcgtccgatttcagtgatatttccttcttaaatttacatttagaaactcttaggagttattaaaaaagtgcgttcaagaagttaagggcaaaaaatggcgttgaccgaattcaacgtcggatcccaaaatgtttgtttgatctaaaaggtacaaaaaattaacgtagagtacaatgttttttattatttagattaaagcaatgatagatatacgtagtttgtgagatatatggcaaagtattcatgaggccccatcgctttaaggaaatttcgctttagcttagttcttcttgccacccacccacgttcttaaattctaagcgcacgcttttcgtgcctcggtctcctgtcttttttgcacaagcaaactaaattttgcttcagttcaatgtaaatataaccaaatgatcggatacgcttcacagttccataaaacataatgtacaaaaaattaaacatctgttgcaccgctcacagcctactcgttgagcaggcaggtgcgaacaatggcgttgcacacggcgtagggatcacagttggagcttggccgccggtcttcgaggtatcctttgccggccgtcgcaacgccacgcggcactcgcacacttacggcccggttggccacgccccaagaaaacttatcgatgctagaagtctcaagacgtcccacgaggcgccgttcattgtctttgccttccttggggtcgtatgccttgatgtgccgctcgtggcgcttgctcagcttctcgatagcttcctcgatggccttgattccgccatcagcacgcatctcctttgtggaaaagttggtatgcgcgccggctccgttccactgaccctccatcggtttggggtcaaaggtgaccactacgccatactcctcagctatgcgctgcaaaatatatcgcgacacccataaatcgtcacatgccttaatcccggctggaccaatttggaactcccactgcgcgggcattacctcggcattggtgccggcgaagtcgatcccagcatacaggcaggccacgacgtgggcctccacaagatcgcgagcgtacacacggtcagctcccacgccgcagtagtaaggaccttgtggggctgggaaaccgttctccggccagccgaagggacgtccgtccacgtctaataaagtgtattcttgctcaatgccgaaccagggctcctgatcgctaattaggtcaatggctgcctggaacgcggcacgcttgttggacgccgtcggcttgccgtcggcgctgtaggtgtcgcacaggacaattacgtcgttctttcccggcttaaagggatcgcgatatatggcgcgtggcttgagcgtggtgtccgagttctcgccatgggcctggtaggtggaactgccgtcgtactgccaatccggcaagtcctccacggagctgggtactttgtccaaaacgcgatccttgaggcgaatgttctcgccggtaccgtcgatccataagtaagtagcctgcactcgattggccggcgtttccaggttgcggtacctctgcagaatgctcttgtctagagccgtgttgggggagttggccaagaactgggagcgggtggtattgccagtacgcagcagacgcagctgctgtgttgcgggagccaccagctccttcttcaggaagagtcctgccacgcgtagtgccatcttggttcttggattggagtcggcgagaaggacaaaaggacacggttagttatgtattgctggcgaatgtgaggacgtgcgcaggaagggcaagggctggtggcatgctggctcactctgcttttctcatgaatttttatgtaattattttccttgcacttgattttccgaggtagttaaaaaaggggtacttttccagtgaagacgcagtcttccgcacaacttaccgtgctctgctcgtttttccactttacagttatatgattggttaaacagtcgctggttggacaggtcttttggtaattttggattgcggtactttcggttttcgtttctgtttctgtcaggggctgcggagcgactgttggggacacccgaccaattcgatgtttggaagtcttgtgagcacagttagcgcgacagcattcacttttttcgttgtttcgtcgcgcgcctcgggtttttctttatctcgtttgcgacgccgacgcacagacaaaggcctcccagagagcattcaaaactggcggtatatgagcacccgctccgcagccactagccagagagacctgcaatgcgacccataatgtttatgtttcgaggctagtcgggtagccaaaagccccgttactgagcacacgctataagctcatttatgcatttcgagcacttgtagcttgcattagcgccaaatgaaaaacaaaagtttttagtaattctcatcgtagaacacctgcaccatttatgtgcatggcccactttagaacccacaaattaagttctacatttttgataaattcatttcagaaactatgataggttacgcagtatgcagatgcatttcagcagtactacttattacaacactctctcatttctcgtaatctcttcgtaaaaacctccaccattttgctctttggctgattgttttgaatacacgcctggtacaaagttcactatatacaattaaatatagcgaatgcaaggagcaccgtatcagctgtgtctattcgtgtttggcatttgataaactctgtggtggaccgcattaatagagccttaaatgaagcaataatgatttgtttataatatgtaaattcggtactaaatgttcctattcctggcttgggtctcgcatacgacgttctgaatattaaaaatatatctaactaaaactataactaaaatagcagtataagtacacagtgtagccaacttttaggctgagtatgtaaaacgttgaaatttaaatgctatgtaaattctgatctaaatatcctgtgtggaggatattcaatatttatttgttacagattatacttagtcctaggccgtcgttcatcaagccacgcatattggcccactccctcctacataatggcatgttgtcgcacaaaagccgagaccacagatatgtcttcca

SEQ ID NO: 4865 - DNA, 2174 bp, DROSOPHILA
ctgtcgcgctaactgtgctcacaagacttccaaacatcgaattggtcgggtgtccccaacagtcgctccgcagcccctgacagaaacagaaacgaaaaccgaaagtaccgcaatccaaaattaccaaaagacctgtccaaccagcgactgtttaaccaatcatataactgtaaagtggaaaaacgagcagagcacgatggcactacgcgtggcaggactcttcctgaagaaggagctggtggctcccgcaacacagcagctgcgtctgctgcgtactggcaataccacccgctcccagttcttggccaactcccccaacacggctctagacaagagcattctgcagaggtaccgcaacctggaaacgccggccaatcgagtgcaggctacttacttatggatcgacggtaccggcgagaacattcgcctcaaggatcgcgttttggacaaagtacccagctccgtggaggacttgccggattggcagtacgacggcagttccacctaccaggcccatggcgagaactcggacaccacgctcaagccacgcgccatatatcgcgatccctttaagccgggaaagaacgacgtaattgtcctgtgcgacacctacagcgccgacggcaagccgacggcgtccaacaagcgtgccgcgttccaggcagccattgacctaattagcgatcaggagccctggttcggcattgagcaagaatacactttattagacgtggacggacgtcccttcggctggccggagaacggtttcccagccccacaaggtccttactactgcggcgtgggagctgaccgtgtgtacgctcgcgatcttgtggaggcccacgtcgtggcctgcctgtatgctgggatcgacttcgccggcaccaatgccgaggtaatgcccgcgcagtgggagttccaaattggtccagccgggattaaggcatgtgacgatttatgggtgtcgcgatatattttgcagcgcatagctgaggagtatggcgtagtggtcacctttgaccccaaaccgatggagggtcagtggaacggagccggcgcgcataccaacttttccacaaaggagatgcgtgctgatggcggaatcaaggccatcgaggaagctatcgagaagctgagcaagcgccacgagcggcacatcaaggcatacgaccccaaggaaggcaaagacaatgaacggcgcctcgtgggacgtcttgagacttctagcatcgataagttttcttggggcgtggccaaccgggccgtaagtgtgcgagtgccgcgtggcgttgcgacggccggcaaaggatacctcgaagaccggcggccaagctccaactgtgatccctacgccgtgtgcaacgccattgttcgcacctgcctgctcaacgagtaggctgtgagcggtgcaacagatgtttaattttttgtacattatgttttatggaactgtgaagcgtatccgatcatttggttatatttacattgaactgaagcaaaatttagtttgcttgtgcaaaaaagacaggagaccgaggcacgaaaagcgtgcgcttagaatttaagaacgtgggtgggtggcaagaagaactaagctaaagcgaaatttccttaaagcgatggggcctcatgaatactttgccatatatctcacaaactacgtatatctatcattgctttaatctaaataataaaaaacattgtactctacgttaattttttgtaccttttagatcaaacaaacattttgggatccgacgttgaattcggtcaacgccattttttgcccttaacttcttgaacgcacttttttaataactcctaagagtttctaaatgtaaatttaagaaggaaatatcactgaaatcggacgatatgcatattaatcattcatatccatgagcacgaatacacatatatgtgaaatatgtttataaaaaccaattgttgattagaagttgttaaaaataaaatactaagaaattaatttatgtatatatattggtacatatgtatctcactttacggatctgtcgcttcactttgttcggtagcattttacatcattttactatatgctgttataatataaatgtctaaatactagcactagcaaaattaaaaattccattgagatacataaatacattttgagtaaaagcagaactgcgtac

SEQ ID NO: 4866 - protein, 399 aa, DROSOPHILA
MALRVAGLFLKKELVAPATQQLRLLRTGNTTRSQFLANSPNTALDKSILQRYRNLETPANRVQATYLWIDGTGENIRLKDRVLDKVPSSVEDLPDWQYDGSSTYQAHGENSDTTLKPRAIYRDPFKPGKNDVIVLCDTYSADGKPTASNKRAAFQAAIDLISDQEPWFGIEQEYTLLDVDGRPFGWPENGFPAPQGPYYCGVGADRVYARDLVEAHVVACLYAGIDFAGTNAEVMPAQWEFQIGPAGIKACDDLWVSRYILQRIAEEYGVVVTFDPKPMEGQWNGAGAHTNFSTKEMRADGGIKAIEEAIEKLSKRHERHIKAYDPKEGKDNERRLVGRLETSSIDKFSWGVANRAVSVRVPRGVATAGKGYLEDRRPSSNCDPYAVCNAIVRTCLLNE

SEQ ID NO: 4867 - DNA, 4284 bp, DROSOPHILA
tacttttgtgggtcttgtggggttttcaatgggtcgcaattctggcgctgcggatgctgcagcggcgaaagaatcaatggatatagatctggaactggatctggatttcgggctgcggactactcgccccccgttcgcgatatcgctatagctatagctcaccaccagcgaatggagcacatctttctatattctcgatttcgcgattcgacggaacactcacactagcagccgcacgcacacacgcaccaacacaaacgcataagacggacactacgacacactgtttaaaaaaaaatggttcgcttttgattcttattttcgtggttttacccactcattggttcttttaattggcgtgcaattgtttcagttgtagctggatcaaaacattcccgtgcggagcttttggacgacagaaattggggtttaatcacaatatatcagcacaccattattttcgggtagaaatcgtgcggtgttgaacagcgctgttgttgccatgccacttgctgcgagtgagctgcagggcctttgtagcactggcggcttgcagtgttgagcaagacgaaactacgtatcggttggatataataacgtaagcgcgggaaacagggctgcccaagaatacaaaatatttcacacattataattacaaaaaggttggccaggttgttgcttttaatcattttaatttcacaacttaattcattcgaaattatattttttcaaaataaagatttgcagtctatgcttttttccgaaaatatgcgattttgcattataataacatttaaatttcttatttaaaaggcgattggcgcaaatcattctttgtataaatataaaatatattctaaataatttggcagccctggaaaaacgttagagaacgactgctaagccgtaagttacccatcttgtagcccttgggcgccaaattcaaaatcatagcttacccttccgtgactcgtttattgtacaaacagaaacttattttagagctaagctacagcatatttattgtagtaagaaaataaggaccatgacgtttggagcctactccacccgtctgcgtaaatcaattaggcagacatttatcaatgattttgttttctccttttagtttaaatttctgttaatggtagttatcgtcgttctgcgaataggcgatgtgatttcttaggtaattacgtttagcattaattgtggcccgtttcatcaaaaacgatatattggttaaccagcttagagacgccataataatgcgtaatggttctctcctgaatgtttatcaatggggtttgtgtgtgagttagtgattgtatgaggatgttcgtttgtggatctggagtgcctagtgaatctgaatgatgcccgactccagcagtttcattatcttatcggcgatggcaggattctgcaagtgtctgaaatatagaggttgttaattaaaatatagtatacaggttgttaataatatataagaccaaagaaacgtaagtctgcttgttaacttcaaatgggctattaatttctagattttaccaatgaaacccaaaaaagcgaacgaataaagccaaacgggtacttactctttgaccgcattgggatcgctttgcatctgctcgaggatcatacgcatagccggatcctttaagatctgttgaatctccgggtcggacattgcgtttttgaggacctcctgcggattgcgctggaagttcatcgaacactgacggtagccttcaatggcctccgcgttgttggggtccagttccagggccttttggtaagcggcttgcgccttagattgttgctgcatgccctgtagaattttgcccttgcggatgtagccctttatgaacttttcgtctagcttgatgcaagtgtcgcagtccttgaggcccagatcaaaggcggccagcttggtgtagcaggcggcgcggttactatagagtttgggatcatccggattgcgcttgatggcctcggtgtagtgctttacagcggtgctgtagtcccccttcttaaagaaaaggttgccctgctccttctcttcctcggccttctccggattgatgtaggccattcgctcctcctccttgattttggcttccacctcgctcagcgaggtcttgatctcaggggtgcgatgctcggacatggccttctcatagtaaaccttcgcctgcttgtagttctctagcttacgataggtgttaccgatgcgagcaaaggacttagctatcagcttaaagtcggcgcggctttcgcgccccacctcaatgcccttctcgcactgcttgatgcactcctcgtactccttgcgctcaaagtgaacagcagctatgttgttatagaacgtgatatccgtgggatcgtgttcaatggcagcgtggtagtgttttagggccgtttcaaagtcctttttcttgtaggcggcgttgcccagttccttctccttcctcgcgaagtacttattcttctgctcctcagtcatgtcctctacccgaggttcagcgggctttgggggctcagccggtttcgccggcggtggcgatggagccctgcggctgcgtgcctgctggggatcaacgtccatgggtatatccccctgcgattgcataaagctcagagccgaggcagtagtttccatgcggccttgcaggagtatagcattcgtgggatcgtacttgagacctgcgccggtaaccgaggttagtgaggttaggtcgggtgattcatggcatataactgagctgtgtttgaacttaccctcgttgtacgcttcgaaggccttcataaagtcattcagacccgcagcggcagctcctttgcgtgagtaacccttaggccaggtgggattaagctgaatggtcttctccgcatcttctagcgcctcctggaactttccagccttggcgaatgccgccgaacggttgctgtagagcacatggttctggtcgtccagagcgatggcctctgtgtacgccgccaccgcctcgtcgaacttctcggcactgagcgcctggttacccttttccttgagttcgttcacctgcgaaaaccgcaagggtttttgattggaaatgccaacgcctttcctttgtctcgggcacttaccttgtccatttctgataagggagaggatagcgctgtcgaattacagtttttcctgtatttttgtacgactttttaataaaacacgctgcgaaatgtgccgtgccaggtgaaaatgcgaaaaatgccgacttttctagaagcaatcgatagggttgtcaatgcttctgcgactgaatttaatctttttccagactgcggtttagaacttagctcgttctcaagcggggaacaaaaccagcaagccttcttaaataattttttccattgcttatataaattaaaaaaattgttgatcaaatataaataataccttgagctttatagaatttaaatgttattttattgtattgtttatttatgtttatattatattattatttgcgtaaataattttctcaatttcttattttgaattgtaaaatttttctagtcaaatgaaaaataagtcctcaggcttttaagtgcattaatatttaaatatttgaaattaatatttaaaatgttagcatattttaaaacatttaaattaagaacagaggtatcgaaaaacgatgctgccaaaaacactaaatatcgataactaatcatcgattttatttgcaactctagattcgaggctggcaacgccgtgcaaaatacgaccagacgctgcttttttcggtttccgaaaataattgaaaattatcactaaataaacaggcggctaacataattgcagtttgaccgcgttgcagagacaagcgggtagataagttacacattttggccacagcaacaccacagtaaagccgccagcatggccgagtacttggcatccatttttggcacggaaaaggacaagtaagtcgcatggcacatttattttaacgttgccgggattaataactaaatggcgttgcatttcccagggtgaactgttcgttctacttcaagatcggcgcctgccgccacggcgaccggtgctctcgcatccacaacaaacccactttctcgcagacggtgcttctccaaaatctatacgtgaacccccaaaactccgccaaatccgcggatggctcccatctggtggccaacgtctccgacgaggagatgcaagaacactacgacaattttttcgaggacgtgttcgtagagtgcgaggacaagtacggggaaatc

SEQ ID NO: 4868 - DNA, 1979 bp, DROSOPHILA
tgacaaccctatcgattgcttctagaaaagtcggcatttttcgcattttcacctggcacggcacatttcgcagcgtgttttattaaaaagtcgtacaaaaatacaggaaaaactgtaattcgacagcgctatcctctcccttatcagaaatggacaaggtgaacgaactcaaggaaaagggtaaccaggcgctcagtgccgagaagttcgacgaggcggtggcggcgtacacagaggccatcgctctggacgaccagaaccatgtgctctacagcaaccgttcggcggcattcgccaaggctggaaagttccaggaggcgctagaagatgcggagaagaccattcagcttaatcccacctggcctaagggttactcacgcaaaggagctgccgctgcgggtctgaatgactttatgaaggccttcgaagcgtacaacgagggtctcaagtacgatcccacgaatgctatactcctgcaaggccgcatggaaactactgcctcggctctgagctttatgcaatcgcagggggatatacccatggacgttgatccccagcaggcacgcagccgcagggctccatcgccaccgccggcgaaaccggctgagcccccaaagcccgctgaacctcgggtagaggacatgactgaggagcagaagaataagtacttcgcgaggaaggagaaggaactgggcaacgccgcctacaagaaaaaggactttgaaacggccctaaaacactaccacgctgccattgaacacgatcccacggatatcacgttctataacaacatagctgctgttcactttgagcgcaaggagtacgaggagtgcatcaagcagtgcgagaagggcattgaggtggggcgcgaaagccgcgccgactttaagctgatagctaagtcctttgctcgcatcggtaacacctatcgtaagctagagaactacaagcaggcgaaggtttactatgagaaggccatgtccgagcatcgcacccctgagatcaagacctcgctgagcgaggtggaagccaaaatcaaggaggaggagcgaatggcctacatcaatccggagaaggccgaggaagagaaggagcagggcaaccttttctttaagaagggggactacagcaccgctgtaaagcactacaccgaggccatcaagcgcaatccggatgatcccaaactctatagtaaccgcgccgcctgctacaccaagctggccgcctttgatctgggcctcaaggactgcgacacttgcatcaagctagacgaaaagttcataaagggctacatccgcaagggcaaaattctacagggcatgcagcaacaatctaaggcgcaagccgcttaccaaaaggccctggaactggaccccaacaacgcggaggccattgaaggctaccgtcagtgttcgatgaacttccagcgcaatccgcaggaggtcctcaaaaacgcaatgtccgacccggagattcaacagatcttaaaggatccggctatgcgtatgatcctcgagcagatgcaaagcgatcccaatgcggtcaaagaacacttgcagaatcctgccatcgccgataagataatgaaactgctggagtcgggcatcattcagattcactaggcactccagatccacaaacgaacatcctcatacaatcactaactcacacacaaaccccattgataaacattcaggagagaaccattacgcattattatggcgtctctaagctggttaaccaatatatcgtttttgatgaaacgggccacaattaatgctaaacgtaattacctaagaaatcacatcgcctattcgcagaacgacgataactaccattaacagaaatttaaactaaaaggagaaaacaaaatcattgataaatgtctgcctaattgatttacgcagacgggtggagtaggctccaaacgtcatggtccttattttcttactacaataaatatgctgtagcttagctct

SEQ ID NO: 4869 - protein, 490 aa, DROSOPHILA
MDKVNELKEKGNQALSAEKFDEAVAAYTEAIALDDQNHVLYSNRSAAFAKAGKFQEALEDAEKTIQLNPTWPKGYSRKGAAAAGLNDFMKAFEAYNEGLKYDPTNAILLQGRMETTASALSFMQSQGDIPMDVDPQQARSRRAPSPPPAKPAEPPKPAEPRVEDMTEEQKNKYFARKEKELGNAAYKKKDFETALKHYHAAIEHDPTDITFYNNIAAVHFERKEYEECIKQCEKGIEVGRESRADFKLIAKSFARIGNTYRKLENYKQAKVYYEKAMSEHRTPEIKTSLSEVEAKIKEEERMAYINPEKAEEEKEQGNLFFKKGDYSTAVKHYTEAIKRNPDDPKLYSNRAACYTKLAAFDLGLKDCDTCIKLDEKFIKGYIRKGKILQGMQQQSKAQAAYQKALELDPNNAEAIEGYRQCSMNFQRNPQEVLKNAMSDPEIQQILKDPAMRMILEQMQSDPNAVKEHLQNPAIADKIMKLLESGIIQIH

SEQ ID NO: 4870 - DNA, 2736 bp, DROSOPHILA
tgatgatgagtctcggttgattttggacatcggctgtggttctggactctcaggtagcgttcttgaggacagcgagcacatgtggatcggcatagatatttccaagtctatgctcgatatcgccgtggaacgcgaggttgctggggatgtcattctgggagacatgggcgagggaatgccctttaagccgggcactttcgacggcgccatctcgatctctgccctccaatggctctgcaatgcggacaagtcgtatcacaatccccacaagcgcctgctgaagttctttaccaccttgttttcctgtctgacacgcaccgcgcgagctgtctttcaattttatccggagaactccgatcagatcgagatggtaacctcgcaagccatgaaggcgggattctacggaggattggttgtcgactatccaaactctgccaaggctaagaagtactacctggtgctcatgactggaggatctgctgagctgccgcaggctttgggttagttttaataataataattatagaaaactaataattactttcacatcatttttctttgcttttgtaggctcacctgaagaggaacgtcgtgtaaactatataaagaaacgtgatgcttgccgtgaggctcggggaaaagcgccaaagaaatcccgcgattggatcctagccaagaaagagcgtcgacgtcgccaggggttggaaacccgtcctgacacaaagtacactgcacgcaagcgcagcggcaaattttgaataaagttgttacatttaaaattagtgacagacctaatctctaattgcggctttgtctatatgttttagatcttgagtcagattaaggatattacaatgccgttggatgtttatatacatatgtataagtcccgctgctattcatcttaagtaaaacggacacatctttaattcacaaaattatattgtttcgaatttaattcatttaacttaagtctatgtacgctgaagactagagaattctaagattgcttcccgactagtttttgttctcgctcttcttgatcgcgtctgtatcgttccttcgctttctgcttgggagtgtcgtaggagctttcggcgaggaacatcaggtatacggccactccggcaaagataaaggccagcaggaccatgtcagtctggcctgatattctgttggtctccctttgcacttttattcgatcgtatttggcctgggcggcttgtctccggtcaaatgatttaccatagtgatttcgcgaccactcgtcgaagtcatagatgggcgtacggcccgcagaatcagatacacgcgatttctgaaatcgcgacttgtaaaacttagtctccgcatcgtcctcgactacgggttccgctacatcgtggacatcttgggcatattgggcgcctgccgtatgtacgattcccttgtcgtaaagtcgacgcagccggtaatttcccagaatctcataagcctgattgatctcccgaaatttcttggctgcgttctcacttccttggttcctgtccggatgataaagcatcgagagcttatagtaagctgccttgatctcgttctgcgtgcactgacgcctgattcccagtgcgtcgtagtggctcatctggtggcgttgactgaggtagaggccacgcagcagaagcagaggtcgccacaacattgggctgtgctggtacatcttggatgtgttctttcgcccgcttcacttgttttggtttcgttatatcacatgaaaattaaaaacaaatcgaatcagctgtttgaacttgaacttgttcaccctcgccatcgttgttatcgatagatcgatagtattctgaaccaatggtgcaggtacagcaaaaaattagctgaaagaggaaaaagagcttgtaattgattaatttataaaagatagattttgaaaatatttacagaataaatgattttcaaaaaagtttttacagatatatcagaaaaatatttgtaatccctggcttagttaaaaatttaagactttagtaaagttgaaattcgtcagctgtttgggctatgatgaaaaaagcaaaacgtaagctccacggttccagtcagctgtttggccgattcgctgcgaatggcaactgttgcaactattttggtttgagtcttctcaatttttatttatatatagaacagggcagcagccggttcaatagtctcacgcagcgtgcttgattttcccgctaaacgcctgcaactgtatctgtgtgtattcgagagcgatcgagaagtttctggtggtcgaaatttaggccagaaggcacaaaaccgaactgaatagtgagtcatccgttaacaataaaaagttgcagctacagtttttgtctttttatacagaaaattgtgtaaccatgacaaacaccatcaacagcgaggaagtgtccgacgcaggaagctacaaagataagggcaacgaggcgttcaaggcctcccgctgggaggaggcagtggagcactatggcaaagccattaaggcgggctctaagcacaaggagctggcggttttctataagaatcgtgctgccgcttatctgaagctaggaaagtatgaaaatgcggtagaggactgcactgaatctttgaaagcggctccgggggatcccaaggcactgttccgtagggctcaggcgtacgaagctctggagaagttcgaagaggcctacaaagacgcaaccgctttgtttaaagcggatcccg

SEQ ID NO: 4871 - DNA, 736 bp, DROSOPHILA
aaaccaaaacaagtgaagcgggcgaaagaacacatccaagatgtaccagcacagcccaatgttgtggcgacctctgcttctgctgcgtggcctctacctcagtcaacgccaccagatgagccactacgacgcactgggaatcaggcgtcagtgcacgcagaacgagatcaaggcagcttactataagctctcgatgctttatcatccggacaggaaccaaggaagtgagaacgcagccaagaaatttcgggagatcaatcaggcttatgagattctgggaaattaccggctgcgtcgactttacgacaagggaatcgtacatacggcaggcgcccaatatgcccaagatgtccacgatgtagcggaacccgtagtcgaggacgatgcggagactaagttttacaagtcgcgatttcagaaatcgcgtgtatctgattctgcgggccgtacgcccatctatgacttcgacgagtggtcgcgaaatcactatggtaaatcatttgaccggagacaagccgcccaggccaaatacgatcgaataaaagtgcaaagggagaccaacagaatatcaggccagactgacatggtcctgctggcctttatctttgccggagtggccgtatacctgatgttcctcgccgaaagctcctacgacactcccaagcagaaagcgaaggaacgatacagacgcgatcaagaagagcgagaacaaaaactagtcgggaagcaatcttag

SEQ ID NO: 4872 - protein, 231 aa, DROSOPHILA
MYQHSPMLWRPLLLLRGLYLSQRHQMSHYDALGIRRQCTQNEIKAAYYKLSMLYHPDRNQGSENAAKKFREINQAYEILGNYRLRRLYDKGIVHTAGAQYAQDVHDVAEPVVEDDAETKFYKSRFQKSRVSDSAGRTPIYDFDEWSRNHYGKSFDRRQAAQAKYDRIKVQRETNRISGQTDMVLLAFIFAGVAVYLMFLAESSYDTPKQKAKERYRRDQEEREQKLVGKQS

SEQ ID NO: 4873 - DNA, 3028 bp, DROSOPHILA
cacaagtcgagtgtacgaatgtacgaactttaaagtgagagagcgccaaaacaaaataaaatcaaagagcggcgcaaagaacacgggaaaaacacccgctgtggggcacgttcgagaagagtacaagtgggtggcaagtgctgccggaagagagcggcttgtgagagagcgggcgatgacgtcgcacgctagaatcgcagctgatttagcaacaatttgcagccagcactgttatagacttttgggcacattaacaccgatgtccgcacacacccgcattggcgtgaactatgtcaatgtgtcagttaagtcgtttcgctgattcggcgctcgggtgaagggaagcccaggtgcagtgtcctgcgacaattgtcccgcttgctttgtcctaagagaacacgtttggcggcacttccggccgtaaagggtctaccgaatgatttagaatcggtcccaaatccaaattcattcagaaaaaagttctatacttaatttgcttaaaagcagatactgaaaaaaggttatttaggtttttaaagaccagagaaaataatacataaggcgaataattaaccctacctcgccagttgcaagtcaaattatatttcagaccgcgactcactgatttacttatgtcctaagattaatcaaatctataagtgccaaggctgatttaacagttacataatatagtgagaagcacaaatcgcgttatagttgcttcgatttttattttattgaaaatgttagaaaccttgcacaaggccccgattaatctgcaataataaaacaacaatgcactacaaattatgtataaacaaaactttgtacactgtctaatatttctaaaaaatgtgctcaaataaatatataaactattttatcagctcttgtttcaaactgattttgggtgactattccccaaaacaaaaattcgaatttatcaaagtacacacacaattgtaaggtcagtaggtccttcgactttattgcgacttatgctaagagcttaaggtaaaaactgcatgctgggaataaaagtcaatgccttggaagtggggcttttgggattccccagatctttggcgattccctgcacgcgggccaccacgtcactgcgctggatatcgccccggtccaacatccttttaaatagagtatacaattgcctggccgccgaaacctgtgacaaggcatgcagctccaccagcagattctcggaatatccctcgtacttgctcagactcgccgccttagcatcgcgctttagcagatcgtaaaccagcaggaaatccacatagggcttagtgggaggaactctctttttgcctgcgatcgaggcggtgctccatcgatccatcgcggactcagaaccgaaagcggcccttccgtagttatcgtcgtagaggcgcaaaaagttatccagtgactccacatcgttggtaaagtcgtagcgctcgctttgaatatcacggatcaaagacaaaggcagggtatcaaagtcgctatcatctttgatttctgcaaatagatcgttgccctcaagggacttttccggcggcgcagttggtgcaaaaattgccggacggtgcggcacagtgggtggcgatgtgggtctctcggttgtggatgatctcttcggcgtttcccaccaacttggcggctgccaccagcccatgccaccagatccagacgcacctgctccaatcggtcgccttgtggtagtggttctcatcctcgtgggcaacggtgtggatgggcgcggatttgcagtggtggattccataccttcttcatccgcactgaaaggaggctccactgttgtgcttgatagtggctcgtactgcagcaggtcaatatagtatgccaaggcctgcatggaggcgggcagatagctagtcagtaggttagccggcgccactggatccactaggtgacccactagaagcaccaccagcattggacgaaccgttagcccactgcgcatttctcgcttttcttactttcttctggcgggaacggtttactctgggggaatggaggcactcaactgaagcgactcttcccagcaaccagcgagcatctgtagttggctctgcatctgtctttgtctccgtatctgtatctggttttcaaaatgggtgacagcgggttcggctttagcttatactctttcaaaaggtattttaacgcgcagaaaatataaaaaaatcttcagggtcaaacgattacaactaatctgtattgattttatattaatttgagtatcatcacaatcttttatttctattaataaatgttattaaagcaatacttctcggttttcctttttaaatcatttgccctaatggaatagcgtcaatgatttctgagcatacttatagcttcggtgttgggcttcaacttttcacatgcgattttttgggggttttagcaaactcgttgagtggagaggccagcgaccgcgatcgccgcttgttgcgtaaattttgtaaccaccgacttttggcggagaatgttgttcttggaaagagtgaaagatgttccgttgccaaaagaacaaccagtttggtcataaatatgcaaagtgtgcacaaacacaggcagaaagcaggcgaaccgcacataaacctgattttgggtgctttattcatttgcaaggagtacaaaagctcttacattaaattaaatgcatctttggtgcagtttaagaatcacttgcaagtgcgacactttgagagccattgatgaccgctgtcgatcaaaaaaggagagcaagggagcccggcaaacagctgtttgagaagcattaacctgttgttgttgctcttgtgttgccgtctagatgagttttcgcttttttcgaggaaattggagcacggtaaacgacttagcataacgggtttcctaagcaagccgtgccgctgcttttttagcacagacataacggcctcacactcgcacacctaaactttttgcacttccgcctggccaattagcacttaatagtgtcatgtgtattttttga

SEQ ID NO: 4874 - DNA, 1028 bp, DROSOPHILA
agtaaaccgttcccgccagaagaaagtaagaaaagcgagaaatgcgcagtgggctaacggttcgtccaatgctggtggtgcttctagtgggtcacctagtggatccagtggcgccggctaacctactgactagctatctgcccgcctccatgcaggccttggcatactatattgacctgctgcagtacgagccactatcaagcacaacagtggagcctcctttcagtgcggatgaagaaggtatggaatccaccactgcaaatccgcgcccatccacaccgttgcccacgaggatgagaaccactaccacaaggcgaccgattggagcaggtgcgtctggatctggtggcatgggctggtggcagccgccaagttggtgggaaacgccgaagagatcatccacaaccgagagacccacatcgccacccactgtgccgcaccgtccggcaatttttgcaccaactgcgccgccggaaaagtcccttgagggcaacgatctatttgcagaaatcaaagatgatagcgactttgataccctgcctttgtctttgatccgtgatattcaaagcgagcgctacgactttaccaacgatgtggagtcactggataactttttgcgcctctacgacgataactacggaagggccgctttcggttctgagtccgcgatggatcgatggagcaccgcctcgatcgcaggcaaaaagagagttcctcccactaagccctatgtggatttcctgctggtttacgatctgctaaagcgcgatgctaaggcggcgagtctgagcaagtacgagggatattccgagaatctgctggtggagctgcatgccttgtcacaggtttcggcggccaggcaattgtatactctatttaaaaggatgttggaccggggcgatatccagcgcagtgacgtggtggcccgcgtgcagggaatcgccaaagatctggggaatcccaaaagccccacttccaaggcattgacttttattcccagcatgcagtttttaccttaagctcttagc

SEQ ID NO: 4875 - protein, 325 aa, DROSOPHILA
MRSGLTVRPMLVVLLVGHLVDPVAPANLLTSYLPASMQALAYYIDLLQYEPLSSTTVEPPFSADEEGMESTTANPRPSTPLPTRMRTTTTRRPIGAGASGSGGMGWWQPPSWWETPKRSSTTERPTSPPTVPHRPAIFAPTAPPEKSLEGNDLFAEIKDDSDFDTLPLSLIRDIQSERYDFTNDVESLDNFLRLYDDNYGRAAFGSESAMDRWSTASIAGKKRVPPTKPYVDFLLVYDLLKRDAKAASLSKYEGYSENLLVELHALSQVSAARQLYTLFKRMLDRGDIQRSDVVARVQGIAKDLGNPKSPTSKALTFIPSMQFLP

SEQ ID NO: 4876 - DNA, 3131 bp, DROSOPHILA
agccctcgcgaatgaactcctgtgtggttttgggaggcagcttgatgcgaggcaccagctccctggccacctggggccgcatcccggccagctcaccaaataatgccgagtggagcaggtggacgcacagcgtcttgtagcacagtagctgggcggccatcatacggttctcctcgtaggtcttgaagtcggagcaaccctcgcactgggtgcagctgggaaacagatgcttcttaccgcgcagacacagccggcacacgttgtgctggcaccgcttgcccttgggcgagtagggatccaccagcagctggcagcagaccacgcaagacagcagctgccgtagctcgccgagcccggagttcagctcctccacccgccgtttggaaagattcgaagcggagcgcatcgcgatgcgtgtcaccttcaagtatgccgtctgggccatgatggctatatttttatgcccgggactgtacgcacgccgctgtttgtttacgtttttcagcccaaaagtgagactccgctggccaagtaagtgccttgtcggtccgacccacgccacctgctccgctacctggtgcctcctgggctagttacctgcaattcctcgcccgtaggagctcagttacacatgcttagaccgcgttaatcctcgatttcattatctaatggtaactttactggaacgctttttgttggtttcacttttgtggcttcgttatcactatgtttcacgtgcaaaaaaaaaaaaaaaattggtttacgtttgagaggtctcaagtcattgttaatggttatgctgcacactgtgcaacagcgttgaaaacaataaattagcaactaaaaaaaaaaattacccaagcaatattttgctgagcgaagccagtgtgaccgcagtgtgccagtgcgaacatgctagctgcagtgcggcataggtgtgaccactacctcgaacagctgatttcagtgctctgaggaattttcgcagttacgaactgcggtcctacaacaaattttaacacttagtttttcaagtaaatatggttttttaagtattttccgtcaaaggaaagcggaaaaccttggaaattatttactaacagctcttccgcttacgccaggtggtaggagagccagaaaatgccggaaccgcgcagtccgatggccagttttgccgagtcggtgctgaatgtcatcgatggacccataacttggttccgtggtatgtagtccacagggattcccaatggccatggtcatgggagtctccagatgctgcaagtttgcgtttcctttggccaacgatcggaaaaaccggacaaattccagacaattacataatgacataacctcaactcgcagtccatttgtttttgtttacactgtattgctgaaatgctaaaatgtttataatcaaccgttttaagtaatttctagctagcgcaaactaaatctcttagaatactagtcggcagcccttaaatgccgtccgttactatatagttcatctagtcaaagcgggatcatgtttttcaacagaaatgcattacagctagtatattttattaatgcgccttgtgttaatcccacagagagcattgtggagccgaaccagcagaagcagaattggtaccaccagcgcttccgccgcgttccgacgatcgaccagtgctacacggacgatgccgtctgccgtttcgaggccgatcagcagttccgccgggatcgcatggtcgacaacgagattgtcaacattctgcgccagcgcttcgaggactgcaccctctacgaggcacccgatcacatggtcaagtgcaggccgctgatggatcagtacgagaaggccaccgagaactggttcatcaagtgtgagtggaatcccttacccatcttctttaaagttgtatgtgatatataacgagatataacccattatagatggcgacttgggaggctacgccaatgccaagaccgcgtacatgaagcagaagcatcgtctgatctgggagcgtcgtcatggaccagtgggcagtggcatgaaggaggaggccgcccattaaactccgcttttatgatgatgttttctagtttcattatccgttaaaacaaaatatacacgccgtaaaacgatattcccaaggattgagctttctttcaattgtttcagtgtaaattataaggtaagagctactaggaattatttattactacagcagtttcaattcatttgtctattagttgcatttattcttagtcatgtttttcttaaaataaatattaatattggcgtttgatatagaattttggctatagactagcttaaaactaatagttctcaagattaagagccttggttaagttgttccagtgagtaaaataaagtttttgcctgcgtactgcaataagtttacagaatatagtgataaatcataaaactcacactgtaattcttcagactttttcgaaaatttagacaatttcaaaaagagttccataatttctcattttttaaaaaaaggaatgcacagtccataaatcatttgcttttcttaaaaaaagaaaaaattacacttttagaaatagataccaatagataggcaatagtgaaatttgttcaagctttctagaattacgctatcttagattactttcgagctcagctaatcgagaccagcggcttgttgatgagactctttttgagcttagccagagcgctatttgcggccttgtctcctggcttcttgtccttgtttttgggacccaatggtatcatggttgtgtccattagcttgcgtctgaatcccttgtagaactgcagcacgtgtggattggcccacacttgcttggcgtcaaagtccaggatgcgaatggactgcagggatttcgcacgggataaggccacataggcctgtccagcctcaaatactttggaaagggacatctccacgcagtcgagggttagtccctgactcttgtgtatggaaaatgcccaggctaacttcagtggcacttggcgtcgtgttatatggtttcctgaggcggtctttattatccacctttcgtgcttgcaaacgtattcctggttgtttttgaaccttaccactggcagatccttctccattcttacaacg

SEQ ID NO: 4877 - DNA, 604 bp, DROSOPHILA
gtcctacaacaaattttaacacttagtttttcaagtggtaggagagccagaaaatgccggaaccgcgcagtccgatggccagttttgccgagtcggtgctgaatgtcatcgatggacccataacttggttccgtgagagcattgtggagccgaaccagcagaagcagaattggtaccaccagcgcttccgccgcgttccgacgatcgaccagtgctacacggacgatgccgtctgccgtttcgaggccgatcagcagttccgccgggatcgcatggtcgacaacgagattgtcaacattctgcgccagcgcttcgaggactgcaccctctacgaggcacccgatcacatggtcaagtgcaggccgctgatggatcagtacgagaaggccaccgagaactggttcatcaagtatggcgacttgggaggctacgccaatgccaagaccgcgtacatgaagcagaagcatcgtctgatctgggagcgtcgtcatggaccagtgggcagtggcatgaaggaggaggccgcccattaaactccgcttttatgatgatgttttctagtttcattatccgttaaaacaaaatatacacgccgtaaaacgat

SEQ ID NO: 4878 - protein, 159 aa, DROSOPHILA
MPEPRSPMASFAESVLNVIDGPITWFRESIVEPNQQKQNWYHQRFRRVPTIDQCYTDDAVCRFEADQQFRRDRMVDNEIVNILRQRFEDCTLYEAPDHMVKCRPLMDQYEKATENWFIKYGDLGGYANAKTAYMKQKHRLIWERRHGPVGSGMKEEAAH

SEQ ID NO: 4879 - DNA, 6717 bp, DROSOPHILA
tgaaccggtgaagaatacgctcttgcccgaggtgcacgcccgcaggacttccatttgctcctcactgagtctcagcgactcgtcggtagtcgacgcatatagtttcttggccgcgggcatggtgccccgttccttctcctccttgagctcctcgaagcgacgctttttggcgccctggggcgacggcgtggtcactgaccccttggacaacaaacccgcctttttgcgcgccaaaatcatctcggccgtggtgactggagaaacgtcgttaaagctgcttggcttgcctgacatcaggtgctcgcggagtttcttctgcaaggtcgcatcgtccggctgggatcctccctcgtttccgttcattttaacgaagatcgtccgcaggaagaacatcaaagtccccggcggtgcattcgatagatagagggtgcacttctccgccttgaagttgaaggtggccttgccctcggacatgaacttcttgtgcaccatcagatccttcagcttgaacttcaggggctttagtttctccggcgtcacctcaacaaacaattcacgcaaatcgttccgcaccaggcgcaatgtggcagtcttgtaggccagtttgcgacccgtgatgcccaccgcattggtccactccatgttcaccgcacaggtgagcactgcgtcattgagatccatggcgaaattaacttcacttcagtcagtttccgattaaattaaattaaatacaaaagccaaatcttttccatgcgcttggtcgccgatcggcttatcgatatcagcgtaaaattatcgatatcacatcggatggcgtgaacgcatcatgatcgtgcacaagtatgttataaagtagcaaagttccactccaggatcagctgtgttacaattccgttacaatttaaattgctacatttaaggattacaaaacaagtaggccaggaaaagtaatttgctatgcctataactttcaattgcacactaattaagaaatatcaccatgaatgtggatctgagattgattgtgcgcctgttgctggccattctattgacttccttggtaactaccattttaatgggcaagcagatacacagaagactcgtgaagtccatggtcaaaacaaccggcgaaaaggatagtttgccagcaaggcagctcccaaaaagggagatcagcccgaaggtcgcagatttcccaccaccactaacactgaaccaaactgaactggacatcttaaagatccagcgaaacaatagtttccgcctgccccagcaagaagctattaaggagtggcaggatgcgattttctttaaagaggatagtaaccgcaggggattgggtgagcagggaagagcagttcagttaccaaacgctaaattaaaccccgatgatttccaagacttctatgccgaactctccgatcgcattcccctgaacagatccttgccggataccagacctataaggttagttcctatgaagtttaaaatactatacaatttaaagactaagaacttagttgccggaaacggaagtatctggagaacctacccaatgtgacagtgataatagcctttcacgatgaacacctaagcgttttgctaagatctataacgagcattataaatcgatctcctgttgagttactcaagcagattgtgctcgtggatgacgatagtaatttgccggaattgggacaacaactggaagagattgtggctcaaaactttccgaaaattattcacatactaagacttccagaacgacgtggttccatcaaagcgagaatggaggcaatcagggtgtccagctgtcaagttttggtctttctagactcccacatcgaagtcaacaccaattgggtaatatttaaaaaggaatcaattaatgtggataaatctagataatttcctactttatagttgcctcccttgctggaacctatagttattaacccacatatagtcacccgtcccattttggatgccatctcacgcaagacatttgcctatgccaaacaaaatacgatgactcgctccggtttcaattggtggcttgagtctgagagcttaccaatttttcctgaggataaaagtcctgattccacaccctaccgtacaccggttttatcaggagctatggcgattgacaggaactatttcttgaatctggggggatttgatgagcagctggacacctgggaagccgagaagttcgagataagttttaaggtctggatgtgtggtggaatgatgctgtatgtaccttgcgcccgggtgggtcacataggtaaaagacccatgaaatcgattagtagtccaggataccacaattttctggccagggtaagtggaaaaacaactcaaaacatggggggtggcgtatacgtaatatattgtttaacctattaagaatattacaacataatttaataagaggatctctccctagaactacaagcgagtagctgaagtttggatggataattacaaaaagtatgtgtacgacaagaatccgaagctctataagatggccaatgctggtctgcttttccaaaggaaaaccaagagaaatgctctggagtgcaagaccttcgattggtacatgaccaaggtggctccggattttcttaaaaggtacctagcattggattcgcctttggttttctccggggtcattgaaagtgtggcatttcctggattctgtgtggactccctgaattgtagacacactaagcccgtggttttagcccggtgcactgggcataattcaatgcccggcgagcatcagaactggtccttaacgcaggatcatgagattcaactgacgaacagcaaagatgattgcttggaagcgcagggcctacgctcaaagtcggtgtggctctttcgttgtcacaaaaatggtgggaatcagtactggtactacaatcaccgtcatcggtggatccaacagggccaaatatgggtgtggtgcctggaagcccaattggctagtggtcataaggttggcaaggttctggccaataaaatctgcgataaaaaccaactggaacagcagtggaaagttgggcgaaatgcgccatatgatccacaaagggagcctcattaatatgtatagcacagcaattattaaaataaatatttaaatacaattttagatacgaattttgccttatatgaaagtatgccttcagatacagatggcgctcacgccaatccccagcccagttcaaagagtgcctgtgcagatggcgccaccatgacgcgcgctccgctaatttgaattcgcatgcagagatatttcgtatattattgttcttttcgcccgactttttctcaggtgagtgtgggatctgggcctgaccttacacgtcaccgggcagccgactcgtctgccactgattgatagtggagaagcgtgttttttgtggccaactgaaaatgtgaaaacttcttcgccgccttatcactgagtcgcggtttcccaattacactaatggctgtgctttttgccaggtggctgctcctctgctgcatcggcatgccagcagtcagtattttggacttccgccgccaagacgtccacatggccataaaaaagagatatgtaaagcgcctgttgcgcaaggtggtcctcctcttggtggtcatcgtcactgtgtccttggtcaccactttggtggtcgaacggcgaatgaaaaatgcggcggagctgacggaacaactcgatccgaatggagatcccataacgcccgtttttagggctgccaatatacatccaactcggaaagcgccacgaccaccatttcaggatcgcaactccgtggtagatattccgagaagtgacaaactccagggattccgactaccggaaccgaagggagagcgcaaggattggcacgactatgcggccatggaggcggatagaaagcgatccggtttcggtgagcacggagtagccgtaaagatcgaaaatcccgatgagaagcagttggaaaaggagcactacgagatgaacggctttaatggcctcatatcggatagaatctccgtcaatcgatctgtgccagacctcagactcgaggcgtaagtacattccccatagcgtgttatcaatagttaaaacacttatcttatctttacagttgcaagacccggaagtatctggccaagttgcccaatatcagcgtgattttcatcttcttcaacgagcactttaacaccctgttgagatcgatatacagtgtgataaatcgcactccaccggaattacttaagcaaattgtgctcgtggacgatggcagcgagtgggatgttctgaagcagcctttggacgactacgtccagcagcactttccacatctggtgactatagtgcgcaatccggagagacaaggtctaattggagccagaatagctggagccaaggtggcagtgggacaagtgatggtgttctttgattctcacatagaagtcaactacaattgggtaggattttctagtaagcaatatgtttggatacagaagaatactctatgttgctatatttacagctgcctcccctgatcgaacccattgccattaatcccaagatctccacctgccccatggtggatactatttcgcatgaagatttctcttactttagcggaaataaggacggagcacgaggtggattcgattggaagatgctgtacaaacagcttccggttctgcccgaagatgcgctggacaagtccatgccgtaccggagtcccgtgatgatgggcggtctatttgccatcaacacggacttcttttgggatctgggcggatacgacgaccagttggacatctggggcggtgagcagtacgagctgagtttcaagatctggatgtgtggcggtatgctgctggatgttccctgctcgagggtggcacacatattccggggacccatgaagccaaggggcaatccaaggggacacaactttgtggccaaggtgggtgctactctctaaccagttctacttttttaattctaattatatttggttttaaatctcatttagaaccacaagcgcgtggcagaggtttggatggatgagtataagcaatatgtgtacaaacgcgatccgaagacctatgacaacctggatgccggagatctgacccgccagcgtggagttcgagagcgactcaagtgcaagagtttccactggttcatgacggaggtggcgcctgatttcctcgtcaaattcccgcccgtggaaccacctagctacgccgccggcatcattcagaacgtggccaacccggtctattgcctggacaacatgggcaagtccaccgaggaggcggtgggtatgttcagctgtgcggacaataggacccatccgcaaccgaatcagttttgggagctctccatattccgagacctccggatgaagggcttcgattcagtgtgcctggatgtgcacgagggaccgccgaatgccaccgtttggatgtggagctgccacagtcagggtggcaatcagttctggtactatgacaggcaaacccaaaggttggttcacggagagaacaacaagcgctgcctggagggatttgtggagaacggcatagccaaggtggtggccaattcctgcgagaatggcaacgatcgccagcgctgggagttcggattcgtgaaccacactatgctggacaccttctacgatggattaaagtagactttcatccacgagccactaacaattcgagtaaccacaggccagatgtcgatcggttcaggtcggggaccgcgatcgtcacgggtttagttcattgttcgttgtgaaggtttctgaaaaaaaaagttcgctaagtaaattccatttttccattaattcttgccccatgcattattgatatatggcagcggaaagtgaaagatctggacaggcagatcgcaatcggagcgaggattctgtccgatcgcgagccacaaactctgatctttatttgctgtacgtacactatatttaggtattaatgtttcgaagagatcctcgactacttgtaaagttaagagatcgtaactatgtgaaattaaacaataataaaagttacaagtgtattgtagaatcaataaataccttaaacattttctttttatataatatagatgtaatcgatgtagtgagagcatctgtagtacttcttcacttccgatttgaattttcgactgtcgcaaaaccttatcagcagggctgttgacctttctacaaaaggagaaagaggagtcggtaagaggtagcagacaccagatagactagagaagttcccacccctccgaggtctgaagtccgagatcaccaaaaaaaaaaaaaaaaccagacatattgttaagctgatgtaatttaagacgcagttgcgcgattgtcccaggagaggacgaagatcgaagatccctggatgaatgtggatggatggcagcaggcaatgacttagcgtcaagctgtctcgatcttgggctggctttatccttatctatgcagttcattatctaccaaacgaaagcacatgctaatttatagacaacgtgatgttgttttgctcatttcctccgcattttttttctcgtcgcttttcatattttgtgcataaacaaagtcaagtgatttgattttttggccaacgcgacggcgacgccgcttctcaatcggattcaccgaatgtgggtcatcgacg

SEQ ID NO: 4880 - DNA, 3759 bp, DROSOPHILA
atgaatgtggatctgagattgattgtgcgcctgttgctggccattctattgacttccttggtaactaccattttaatgggcaagcagatacacagaagactcgtgaagtccatggtcaaaacaaccggcgaaaaggatagtttgccagcaaggcagctcccaaaaagggagatcagcccgaaggtcgcagatttcccaccaccactaacactgaaccaaactgaactggacatcttaaagatccagcgaaacaatagtttccgcctgccccagcaagaagctattaaggagtggcaggatgcgattttctttaaagaggatagtaaccgcaggggattgggtgagcagggaagagcagttcagttaccaaacgctaaattaaaccccgatgatttccaagacttctatgccgaactctccgatcgcattcccctgaacagatccttgccggataccagacctataagatctataacgagcattataaatcgatctcctgttgagttactcaagcagattgtgctcgtggatgacgatagtaatttgccggaattgggacaacaactggaagagattgtggctcaaaactttccgaaaattattcacatactaagacttccagaacgacgtggttccatcaaagcgagaatggaggcaatcagggtgtccagctgtcaagttttggtctttctagactcccacatcgaagtcaacaccaattggttgcctcccttgctggaacctatagttattaacccacatatagtcacccgtcccattttggatgccatctcacgcaagacatttgcctatgccaaacaaaatacgatgactcgctccggtttcaattggtggcttgagtctgagagcttaccaatttttcctgaggataaaagtcctgattccacaccctaccgtacaccggttttatcaggagctatggcgattgacaggaactatttcttgaatctggggggatttgatgagcagctggacacctgggaagccgagaagttcgagataagttttaaggtctggatgtgtggtggaatgatgctgtatgtaccttgcgcccgggtgggtcacataggtaaaagacccatgaaatcgattagtagtccaggataccacaattttctggccaggaactacaagcgagtagctgaagtttggatggataattacaaaaagtatgtgtacgacaagaatccgaagctctataagatggccaatgctggtctgcttttccaaaggaaaaccaagagaaatgctctggagtgcaagaccttcgattggtacatgaccaaggtggctccggattttcttaaaaggtacctagcattggattcgcctttggttttctccggggtcattgaaagtgtggcatttcctggattctgtgtggactccctgaattgtagacacactaagcccgtggttttagcccggtgcactgggcataattcaatgcccggcgagcatcagaactggtccttaacgcaggatcatgagattcaactgacgaacagcaaagatgattgcttggaagcgcagggcctacgctcaaagtcggtgtggctctttcgttgtcacaaaaatggtgggaatcagtactggtactacaatcaccgtcatcggtggatccaacagggccaaatatgggtgtggtgcctggaagcccaattggctagtggtcataaggttggcaaggttctggccaataaaatctgcgataaaaaccaactggaacagcagtggctgctcctctgctgcatcggcatgccagcagtcagtattttggacttccgccgccaagacgtccacatggccataaaaaagagatatgtaaagcgcctgttgcgcaaggtggtcctcctcttggtggtcatcgtcactgtgtccttggtcaccactttggtggtcgaacggcgaatgaaaaatgcggcggagctgacggaacaactcgatccgaatggagatcccataacgcccgtttttagggctgccaatatacatccaactcggaaagcgccacgaccaccatttcaggatcgcaactccgtggtagatattccgagaagtgacaaactccagggattccgactaccggaaccgaagggagagcgcaaggattggcacgactatgcggccatggaggcggatagaaagcgatccggtttcggtgagcacggagtagccgtaaagatcgaaaatcccgatgagaagcagttggaaaaggagcactacgagatgaacggctttaatggcctcatatcggatagaatctccgtcaatcgatctgtgccagacctcagactcgaggcttgcaagacccggaagtatctggccaagttgcccaatatcagcgtgattttcatcttcttcaacgagcactttaacaccctgttgagatcgatatacagtgtgataaatcgcactccaccggaattacttaagcaaattgtgctcgtggacgatggcagcgagtgggatgttctgaagcagcctttggacgactacgtccagcagcactttccacatctggtgactatagtgcgcaatccggagagacaaggtctaattggagccagaatagctggagccaaggtggcagtgggacaagtgatggtgttctttgattctcacatagaagtcaactacaattggctgcctcccctgatcgaacccattgccattaatcccaagatctccacctgccccatggtggatactatttcgcatgaagatttctcttactttagcggaaataaggacggagcacgaggtggattcgattggaagatgctgtacaaacagcttccggttctgcccgaagatgcgctggacaagtccatgccgtaccggagtcccgtgatgatgggcggtctatttgccatcaacacggacttcttttgggatctgggcggatacgacgaccagttggacatctggggcggtgagcagtacgagctgagtttcaagatctggatgtgtggcggtatgctgctggatgttccctgctcgagggtggcacacatattccggggacccatgaagccaaggggcaatccaaggggacacaactttgtggccaagaaccacaagcgcgtggcagaggtttggatggatgagtataagcaatatgtgtacaaacgcgatccgaagacctatgacaacctggatgccggagatctgacccgccagcgtggagttcgagagcgactcaagtgcaagagtttccactggttcatgacggaggtggcgcctgatttcctcgtcaaattcccgcccgtggaaccacctagctacgccgccggcatcattcagaacgtggccaacccggtctattgcctggacaacatgggcaagtccaccgaggaggcggtgggtatgttcagctgtgcggacaataggacccatccgcaaccgaatcagttttgggagctctccatattccgagacctccggatgaagggcttcgattcagtgtgcctggatgtgcacgagggaccgccgaatgccaccgtttggatgtggagctgccacagtcagggtggcaatcagttctggtactatgacaggcaaacccaaaggttggttcacggagagaacaacaagcgctgcctggagggatttgtggagaacggcatagccaaggtggtggccaattcctgcgagaatggcaacgatcgccagcgctgggagttcggattcgtgaaccacactatgctggacaccttctacgatggattaaagtag

SEQ ID NO: 4881 - protein, 1252 aa, DROSOPHILA
MNVDLRLIVRLLLAILLTSLVTTILMGKQIHRRLVKSMVKTTGEKDSLPARQLPKREISPKVADFPPPLTLNQTELDILKIQRNNSFRLPQQEAIKEWQDAIFFKEDSNRRGLGEQGRAVQLPNAKLNPDDFQDFYAELSDRIPLNRSLPDTRPIRSITSIINRSPVELLKQIVLVDDDSNLPELGQQLEEIVAQNFPKIIHILRLPERRGSIKARMEAIRVSSCQVLVFLDSHIEVNTNWLPPLLEPIVINPHIVTRPILDAISRKTFAYAKQNTMTRSGFNWWLESESLPIFPEDKSPDSTPYRTPVLSGAMAIDRNYFLNLGGFDEQLDTWEAEKFEISFKVWMCGGMMLYVPCARVGHIGKRPMKSISSPGYHNFLARNYKRVAEVWMDNYKKYVYDKNPKLYKMANAGLLFQRKTKRNALECKTFDWYMTKVAPDFLKRYLALDSPLVFSGVIESVAFPGFCVDSLNCRHTKPVVLARCTGHNSMPGEHQNWSLTQDHEIQLTNSKDDCLEAQGLRSKSVWLFRCHKNGGNQYWYYNHRHRWIQQGQIWVWCLEAQLASGHKVGKVLANKICDKNQLEQQWLLLCCIGMPAVSILDFRRQDVHMAIKKRYVKRLLRKVVLLLVVIVTVSLVTTLVVERRMKNAAELTEQLDPNGDPITPVFRAANIHPTRKAPRPPFQDRNSVVDIPRSDKLQGFRLPEPKGERKDWHDYAAMEADRKRSGFGEHGVAVKIENPDEKQLEKEHYEMNGFNGLISDRISVNRSVPDLRLEACKTRKYLAKLPNISVIFIFFNEHFNTLLRSIYSVINRTPPELLKQIVLVDDGSEWDVLKQPLDDYVQQHFPHLVTIVRNPERQGLIGARIAGAKVAVGQVMVFFDSHIEVNYNWLPPLIEPIAINPKISTCPMVDTISHEDFSYFSGNKDGARGGFDWKMLYKQLPVLPEDALDKSMPYRSPVMMGGLFAINTDFFWDLGGYDDQLDIWGGEQYELSFKIWMCGGMLLDVPCSRVAHIFRGPMKPRGNPRGHNFVAKNHKRVAEVWMDEYKQYVYKRDPKTYDNLDAGDLTRQRGVRERLKCKSFHWFMTEVAPDFLVKFPPVEPPSYAAGIIQNVANPVYCLDNMGKSTEEAVGMFSCADNRTHPQPNQFWELSIFRDLRMKGFDSVCLDVHEGPPNATVWMWSCHSQGGNQFWYYDRQTQRLVHGENNKRCLEGFVENGIAKVVANSCENGNDRQRWEFGFVNHTMLDTFYDGLK

SEQ ID NO: 4882 - DNA, 4669 bp, DROSOPHILA
acagcatttgagaagatgagtcggcaagaaataagagcttatcagaacaaaactatgtgctaccacggcagccacctatatacctaatttttaaaatctgtttagcattgctctctcggcttctcttatgtacagcaattgacatatacatattcgatgatatagacaatcgctacacgaagcgcaattcgaagcgaatttttaaacgaatgtctgtatctgttgaaaccctagcttttccctaacatggagtgactgcccttttggagatggatcgttcgacactatcttgtcaaggaaagtcgtcaattagggttctcatactattcgaacaatttgtgcttttgaaaaagtgcttacgtcatgccacagccaagaagacaaacaaggtctgccaagatcaaggagcctggtaatcagtttttgcatgtacattttttaaaattctaatacccactgaatataaccgaaaacaacaagccccattatctttcaaataaggtgtgaccccacggggcctaagaagatcgcgtgtgcctgaacgaacagatgcgcagggcacattattcttgagcacaaatggtgggtgcttgcgaactgtagattgtggcaatgcatttattttactgatttatcgtcagttattgtaatagccttaactaaacaatttatcactttgccaataacaaggttttttattatttcacttttctaatacatatataattttctttttgccgtaagaaacgttctcaatacgtagacaaaaatatttaaacttaaaatgctcaattttcaagacacttcacaagagctatcagctacaatgactgggcaaaagccaattatttaaataaattcattatatggtaaaatatactgcacgcaattaagtgcacaattttcttttgaatatatgaaaggcacgcgccaataagccaaaatgatacggcaactctccccgatatacgtcagatagggcgataaacagatgtttgtgaaaaaacaaattgaacaaatagtgaaaagttaaatgcgagcgttaatagcgaccacgtcacgttttgtcggcaaaaatgagggtttgggtagcttatagtgcagctgcactcttactgttggtgcacgcgggtccggaaagcatcagtggacaggaggtgccccaaagcaaaacatcaagcaacaccaccactacagataatagtagctctatccacaccgtttcggatgtcttcgtcaacagtccgcttggaaatgtcacgccctcgatttctgcatctggtaatgcaagcaccacgaaaaggggaaacgcatccacattggtcacagatccgcctctaatcgattcccatgctgtcgagcaggagcacaactcctcactctcactgtttttcgtcatctgcgttatcatgttgggcatcctgcttatccactctatgctccagaccgggttccagtacctgccagaaagcattgtggtagtctttctgggcgcctttattggcctttcgctgaacgttatgtctgggcagaatggcagttggaaacgtgaagaggtcttctcgcccatgggcttctttctggtgctcctgccgcccattatattcgagtccggttacaatctgcacaagggaaacttctttcagaacatcggatccatactggtctttgccatattcggtacaacaatttctgcactagtcatcggggcggggatttacctgctgggcctgggggaggtggcatttcggcaagtttaaaataaattgtcaatttcattcaataatttatcctaaattttagcctaagcttttcggaatcctttgccttcggttctctcatctctgctgttgatcctgtggcaacagtggcaattttccatgctcttgacgtagaccccatactcaacatgttggtattcggcgaaagcatcctcaacgacgccatatctattgtgctgactgcatccataacccaatccgctaacgtcaatgctgaggccagcactggagaagccatgttcagcgcgttgaagaccttttgcgcgatgttctttgcttcggcgggcattggagtcatatttgcactaatttcggctcttcttctgaagcacatcgatttacgaaagcatccatccctcgagttcgcgatgatgctaatgtttacttacgcaccttacgtcttggcagagggaatacacttaagcggtatatcaatgttgttgactatgactctaaaagctaaacatttttttcaactataggtattatggctatactattttgcggaatcgtcatgtcccactacacgcatttcaacctatccactgtaagtcatatgatatccctattttatatattattaaaacttttttaatcgtaggttacccaaattaccatgcagcagacgatgaggacactagctttcattgctgagacctgcgtgtttgcttatctgggattagcaatcttttcttttaaacaccaagttgaactatcttttgttatatgggccattgtgctttgcttaattggccgcgcctgcaatatttttccgctcgcgttcttggtcaacaaatttcgcgagcataagatcaataacaagatgcagttcattatgtggttttctggcctacgcggagcgatttcctacgcgctatctttgcacttgaatcttgacagccaggagaaacgacacgtcatcataacaacaacgtaagcatattccggattgtaaaataatgctcagtcattgaagaattaaaatttcagattaatcattgtgctatttaccacgctagtgctggggggctccacaatgcctctgctaaagtaccttaagccaggaaaaaaacggcgggcacgcggctctggaaggaatgccgctgaggagggaggtcgacgcaacggcagcggtaggaagcgttcaaaatctatttccctatcgaaaactcgcgaatggggccaggcaatcgactctgaacacttgtctgaactcaccgaggaagaggacgtcacctttactcaagcgcgcgatcgttttgggcgcatggatcgcaagtactttattccgttttttacacgtcggttcaatagtcaggaattgcacgagtgcaagtcacagatggccgacctgactaacaagtggtaccaagccattcgagtgagtccattggattcagatgaatcggacgaagagataggactagcggccagcacaagtcaaattcatttgacacggtcgtagggattaaatggctgttgtggggggagctctgtatccgtttcggactgtgttggataactttagaagccaaagggaacgatcgtatgtaatgcttaagttcctctagttaatatttttagagtttttatttatatagcgcggtgatggttgttatcttgtgtatattttttgtttacaaattttcattttgtaagatccaaatgcaatgattcattcgtatcactgtagctcctttattaatccgcttaaagcagtattacattgcacacgacagatggtcttcaaaatgaaaatttggacgtcacaaaagcacactacgtcagtaattttagttaaaaatatttattcatacgaatatatgctgtatttgtgattttatacatttttgaaaccaaataaatatctaagtgtggtacgtgtaaaaaaatatggtcatgccctgctttttgaaattctaatttataattacatatcaattgataatattacctattaaagtaaaattggctacaaaaggtgtgcgtttttggttacttttacaattcttcgtgcgtggactcttcaccgagcaccgtggagtttgaatcactgcggactgcaaacgaagtacaaaaatcgttagatgtcttgggggaatgttaaaagattatgcttttcaaaacgctcgtgtatatcataaaaggaaagcaatgttgacatgtcttttgacttataaagacttcattattagttcctccaactgttttgtatctatttcgggttggtggccgcctcctgcctccgagttgatccagtactcggaaacagcaatgtaccctgccactgccgccccaacaatgcaaccccaggcaatatgagtagagctctggaagatgacacaggtggccacgcacattccgaagtaggtgagcattcgcgtaaagcttacgtagttgctgcgttgctccgcagaaatatcttaaatgatcggaggcgcaatacatacagtggacaatgcgttgcttaaaagcaaatttattaaatttctgtcttacttaccatgacactttccttccttcaactcatagccatccgcacacttcctgcacatgtcagggccatcaccatcgcatccatcgcaagatcgatcacactccaggcaactaaaggagccctcattgttcacgcagaactgctgtggtcggcaagggtttggacgctgttgctccaagcactcattaatgtcgacacatcctgcctccgagtccatgctccagcccttcttacacttgcggcagctcttgggaccacctcccgtgcagcctccttccccacaggccgcatggcactgtgtacacagcaatttcttttcgtcacggaatgattcgtagtgctccggtccacattcgttgcagtttggacccgcatagccgggatcacattt

SEQ ID NO: 4883 - DNA, 2449 bp, DROSOPHILA
aaaaaacaaattgaacaaatagtgaaaagttaaatgcgagcgttaatagcgaccacgtcacgttttgtcggcaaaaatgagggtttgggtagcttatagtgcagctgcactcttactgttggtgcacgcgggtccggaaagcatcagtggacaggaggtgccccaaagcaaaacatcaagcaacaccaccactacagataatagtagctctatccacaccgtttcggatgtcttcgtcaacagtccgcttggaaatgtcacgccctcgatttctgcatctggtaatgcaagcaccacgaaaaggggaaacgcatccacattggtcacagatccgcctctaatcgattcccatgctgtcgagcaggagcacaactcctcactctcactgtttttcgtcatctgcgttatcatgttgggcatcctgcttatccactctatgctccagaccgggttccagtacctgccagaaagcattgtggtagtctttctgggcgcctttattggcctttcgctgaacgttatgtctgggcagaatggcagttggaaacgtgaagaggtcttctcgcccatgggcttctttctggtgctcctgccgcccattatattcgagtccggttacaatctgcacaagggaaacttctttcagaacatcggatccatactggtctttgccatattcggtacaacaatttctgcactagtcatcggggcggggatttacctgctgggcctgggggaggtggcatttcgcctaagcttttcggaatcctttgccttcggttctctcatctctgctgttgatcctgtggcaacagtggcaattttccatgctcttgacgtagaccccatactcaacatgttggtattcggcgaaagcatcctcaacgacgccatatctattgtgctgactgcatccataacccaatccgctaacgtcaatgctgaggccagcactggagaagccatgttcagcgcgttgaagaccttttgcgcgatgttctttgcttcggcgggcattggagtcatatttgcactaatttcggctcttcttctgaagcacatcgatttacgaaagcatccatccctcgagttcgcgatgatgctaatgtttacttacgcaccttacgtcttggcagagggaatacacttaagcggtattatggctatactattttgcggaatcgtcatgtcccactacacgcatttcaacctatccactgttacccaaattaccatgcagcagacgatgaggacactagctttcattgctgagacctgcgtgtttgcttatctgggattagcaatcttttcttttaaacaccaagttgaactatcttttgttatatgggccattgtgctttgcttaattggccgcgcctgcaatatttttccgctcgcgttcttggtcaacaaatttcgcgagcataagatcaataacaagatgcagttcattatgtggttttctggcctacgcggagcgatttcctacgcgctatctttgcacttgaatcttgacagccaggagaaacgacacgtcatcataacaacaacattaatcattgtgctatttaccacgctagtgctggggggctccacaatgcctctgctaaagtaccttaagccaggaaaaaaacggcgggcacgcggctctggaaggaatgccgctgaggagggaggtcgacgcaacggcagcggtaggaagcgttcaaaatctatttccctatcgaaaactcgcgaatggggccaggcaatcgactctgaacacttgtctgaactcaccgaggaagaggacgtcacctttactcaagcgcgcgatcgttttgggcgcatggatcgcaagtactttattccgttttttacacgtcggttcaatagtcaggaattgcacgagtgcaagtcacagatggccgacctgactaacaagtggtaccaagccattcgagtgagtccattggattcagatgaatcggacgaagagataggactagcggccagcacaagtcaaattcatttgacacggtcgtagggattaaatggctgttgtggggggagctctgtatccgtttcggactgtgttggataactttagaagccaaagggaacgatcgtatgtaatgcttaagttcctctagttaatatttttagagtttttatttatatagcgcggtgatggttgttatcttgtgtatattttttgtttacaaattttcattttgtaagatccaaatgcaatgattcattcgtatcactgtagctcctttattaatccgcttaaagcagtattacattgcacacgacagatggtcttcaaaatgaaaatttggacgtcacaaaagcacactacgtcagtaattttagttaaaaatatttattcatacgaatatatgctgtatttgtgattttatacatttttgaaaccaaataaatatctaagtgtggtacgtgtaaa

SEQ ID NO: 4884 - protein, 649 aa, DROSOPHILA
MRVWVAYSAAALLLLVHAGPESISGQEVPQSKTSSNTTTTDNSSSIHTVSDVFVNSPLGNVTPSISASGNASTTKRGNASTLVTDPPLIDSHAVEQEHNSSLSLFFVICVIMLGILLIHSMLQTGFQYLPESIVVVFLGAFIGLSLNVMSGQNGSWKREEVFSPMGFFLVLLPPIIFESGYNLHKGNFFQNIGSILVFAIFGTTISALVIGAGIYLLGLGEVAFRLSFSESFAFGSLISAVDPVATVAIFHALDVDPILNMLVFGESILNDAISIVLTASITQSANVNAEASTGEAMFSALKTFCAMFFASAGIGVIFALISALLLKHIDLRKHPSLEFAMMLMFTYAPYVLAEGIHLSGIMAILFCGIVMSHYTHFNLSTVTQITMQQTMRTLAFIAETCVFAYLGLAIFSFKHQVELSFVIWAIVLCLIGRACNIFPLAFLVNKFREHKINNKMQFIMWFSGLRGAISYALSLHLNLDSQEKRHVIITTTLIIVLFTTLVLGGSTMPLLKYLKPGKKRRARGSGRNAAEEGGRRNGSGRKRSKSISLSKTREWGQAIDSEHLSELTEEEDVTFTQARDRFGRMDRKYFIPFFTRRFNSQELHECKSQMADLTNKWYQAIRVSPLDSDESDEEIGLAASTSQIHLTRS

SEQ ID NO: 4885 - DNA, 3143 bp, DROSOPHILA
tttagatatgtgcgctaatattaaacggctaagaagtcaatgtgccaaagaaaagatattaaatatgtatgtttcatatcagtcaagttaaattttgatatgagctaagcgtacttttggattgtgcactcctaaatatagaaatcacgctaaaattgcatatctaagtaaataaagcaagtaagttatgtaagacgtgtatcttttcgtgataattatttcaaaacggctcgtgccagataataatgaacactttccgcctgaaaaaaagtgaaatgctgggtatcttttagcccataaaaacctgcaatatcgttgctcaaattgctatgctccgcgagttcgcacatgcatagaaggcactcatagcctacgtcacgattgccggcgacgtgtctttatgctaattaatggtatttcgcgaaaacgagtgcaaaataatggccccatggagagagcggcagtacttcacgaaattctgcggaacacctcttgactcccagacagccatagataagatcccaattgcacctgagtcatcatcatttccctagcaagatcgacaatagacttggtttttagaaaagaatgcgattggcgtttagtgctgttggctaacttgtttaccaataatattgccgtgcattaaacaataacaaatgaccaaagataaacaagagctcaaggcgagaagcccctcaagacagccccccaccatcgctacaccccttatcatctagaacctccgaggtgtgcaggctgcaacaaaaataagaacaataggggaatatattagaatacggcaataacaacaagaaccagccggtttgtcataaactacgcagaaaatacaccagataaaaacaaaaaacatcagccgaccaagcagaataatcaggcgagagagcaggcgaaagagcgagaagagagcgagagagagtaagaatgggggggtataaatagagccacacttcgtaataccgccagcaatcgcctagcgaacagccaacggtgaacacatagcagccacacaagctctatagctgatacaagcaacgaaatacaaacaacgcagtttgtgtaaacaatcaaattgtcgcagccatatcgagtgtgcttacacgtccagcggaaagttttcgaaaccaatccaatcaatcagctaagatgtccgcttcacccaccgcccgtcaagccatcacccaggccctgcccatgatcaccaggaaggttgtcatctcggatccgatccagatgcccgaggtgtactcctcgacgcccggcggaaccctctactccaccactcctggaggtaagtttcgaaaattggaagctgagactacatcgagtattattaagttccttccggaaagtggagtgattttcttatcattagatatgatatcaagatgaaattaatcaacatatttcgaaaacataaacaagtataccgtttctttcctttgctcaaacaacaaacaagcttttgtttgagttgtgatacattatttttgtaaaactcactcaccattttttggctgatgaaactgggccatctcgccgagtcagtcagttggaagataatcccgagcacatgttccacagttcgtgactcagagtagcgcggcaaagaagcgtttactcagctggcttatcagtggggaactttgaatacctttctgatgcaacgcagaccaccttgactaataaaaatttccgctttcctataattccaggcaccaaacttatctacgagcgggctttcatgaagaatctccgtggctccccattgagccaaactccgccgtccaacgtgcccagttgcttgctgaggggaactccgcgtactcccttccgcaagtgcgtgcccgtccccacggaactgatcaagcagaccaagtcgctgaagattgaggaccaggaacagttccaactggatctgtagggggtgtggcgtgtacaccgccatgcagcaactgccaaatccaactagttcttagatgcacccactaaaaccgatcttataagcttagtgtacccattaactagatgctaagttcttagttcttccaccttgtttgttctctcggtcatattgaccccgttaccttgtaaaatcgtagatcttaagtaaaatgcaataaaaaaaaggcacacattatttaaaagagaaccacaccttccattgggattcagtagctgccaatttacaattataaattttaatttatgtttgagaaattcagtgccaaattactttctttatcggcaattcaaccttggcaggccacgcgttatgtgatagaacactttccacttcaccttgagtcagtttcggtttagtagtattttcggcagtttgttgaactgtttgaactgtttacgaagaaatttagcgaaagggggctttttggggggcggtacacatgttagacagctggaaataccggccggctttttagttagccagtcagtcagtggccccagcagcgcgtgtcccacttattgcaaagatatgcatacatatttataatgtatccaaaaaccggcaaacaaacgccacaaaaaaatagatctttaagaaactgcgcagttgggaaacgacctcgcctttggcccccgccccgccctttaccatttttcttatatatacaaaagtagtgtgctgagcacatgttcgttcagatagaccgatcccttgtggtccaacaactacatccgactacactcgactaatcccggcacgttccagacccatttgaatattgcgcatgaataattacctaatcgcaaaaagtgtttgctcgacaaagatttagcatcgcagtgcaaaaattcgaccgcacgagatagtgcaaatagtggatcccagatgcttacagagttataaatataaggcaaaccaatttaattcaatctgtaaacaaagccagacagtcaaaacaaattgtacaaactaattagctttaagtttgagttgaaaaaacaatggctttggctattaaaacctcaatgaatatcaaacatagccataagttggtagttgcgctaataatatataattatgaagataagaatagttaagaataattaaatattaggaggggtttaaaacttcgcgctacagttcttagtattattta

SEQ ID NO: 4886 - DNA, 719 bp, DROSOPHILA
aacagccaacggtgaacacatagcagccacacaagctctatagctgatacaagcaacgaaatacaaacaacgcagtttgtgtaaacaatcaaattgtcgcagccatatcgagtgtgcttacacgtccagcggaaagttttcgaaaccaatccaatcaatcagctaagatgtccgcttcacccaccgcccgtcaagccatcacccaggccctgcccatgatcaccaggaaggttgtcatctcggatccgatccagatgcccgaggtgtactcctcgacgcccggcggaaccctctactccaccactcctggaggcaccaaacttatctacgagcgggctttcatgaagaatctccgtggctccccattgagccaaactccgccgtccaacgtgcccagttgcttgctgaggggaactccgcgtactcccttccgcaagtgcgtgcccgtccccacggaactgatcaagcagaccaagtcgctgaagattgaggaccaggaacagttccaactggatctgtagggggtgtggcgtgtacaccgccatgcagcaactgccaaatccaactagttcttagatgcacccactaaaaccgatcttataagcttagtgtacccattaactagatgctaagttcttagttcttccaccttgtttgttctctcggtcatattgaccccgttaccttgtaaaatcgtagatcttaagtaaaatgcaata

SEQ ID NO: 4887 - protein, 117 aa, DROSOPHILA
MSASPTARQAITQALPMITRKVVISDPIQMPEVYSSTPGGTLYSTTPGGTKLIYERAFMKNLRGSPLSQTPPSNVPSCLLRGTPRTPFRKCVPVPTELIKQTKSLKIEDQEQFQLDL

SEQ ID NO: 4888 - DNA, 8709 bp, DROSOPHILA
tctaacccgagcatagaaaatggccataacgcagattgccctccagggaggaggcactactgcacagactccagagatgcccgtcttcccggatggacctcaccgggatagcatcgaccttgatcgggagcaggtgttaatgaccaaccattgaacaggcgactctgccctggggttttggcaaattcgagcttatcaggcacagacagatcactctgctcttatcggtcccgcgggcagcgaaacgtgcaacgaaacaaatgactcgccattaacgtctgtctgatcctccctgagctcggaatctcgtatttatagctaatattgccattactatgcttcagaatccggtctggtccatctacgaagtgcgatgtgaaaattgaaagtgaaagtactataaatttaatataaaggttaatgggtgccctaattttaggtcgtaaaaattaatcttttaatgtgacatgttataaactatcgaaatgatgtagcagccaatccattcatgaccatttatttaagaaagggacttacaggagatctcatactagcattttaatggtgttgatttggttatatatatatataaatatatatatatatatatgttttgcagtttaaatgttgcagtacacgtttgaaacaactttatattattaacttccctggtttgaaatttcttggtattgcatacttttgggattgtgcacgaaattcataatttaggccacctaaaattgtagttttaaactatattataattcaatgaggtgaattataatataacttagttatataccattctgataaccatttataatacgtagtaacgtgctttttatgaatgtatccccgacaaccatacagaattatttttccgtgcaattggaaattaagtttgtcattcatcattctggataggaacgaattgtaaaaggcacatcaatcatatatatgtacacatgtatatggattcgagaagattacggccaatctctaattataatatcgtgatttattgtacacattaatgaatataaattgtacattagatcgataaagttatgtatttatagaatataaatttcatatgcggaacatgcccagcatttggtcttataaagcacatttgtattcgaggacggaattttgttttatttgagaaacgtttcgagttttgtgacttgattgtacatacaatttcatttcaagagggtttaagaaagcaagaacaggatcgattgctgttttggtataacaaatattgtctaagtcgaagctttgagcctttaagcgatcacgactgtttcgttagactacacttcaaaatttttataacgcttacttacacagataacctacatacaatacaatagatacagatacacatacaaatacatacaagtcttcccagctccatttcttttaaactacatagaagcacattcctccgcggggaatgggattaacatagggaggtcggattgggtatcgttatagggattgggggtggaagtggaagtgggcaggtcccagttactagctacggcttatactattacgaagtcacccgaagacactcgtactgcgaccagacaccgactagagcgcctagtatctggcgggttggttatccttgttctgcttcttgttcatgtccacctgggcggtggccagatagttggacccctccaagtgcagggtgctttgccggtgcgagttgcggatcaggcagaaggtcgaaagcagtagtaggatcacaccaagcgcgcatagaccgacgattagcgccacgcggatcttaggtggcacttgctccgcaaagcgcatcaggtcggtgacctcgtcgggaaggttgtcgatgccctcctcgaaccaaaggatgggaaagatgatgtccgggaagttggctacctgcttgatgtcaaacacttggctaacggccaaattgatctggatacgggcgcgtactctcaaggtagttcccattttctgcgaaaaaatgttgtaagtatacgtctgggagatagatctttttattgggtcttacaggctgaacgtcgaagaaaaactgatgcttctctttcataggtggcgaaataccttctacttgcgtcctcaggctttcatcggccaggtagaaatgagggaagcttagcatgatgggagagtctgcagagagcgttacttttgaatttgatcggtaatggtatcccgcattcattcttaccgtattgacacaacgacacgttgaaaagtccgttgggggagcatgacggcttgcccgcgggacagaagcacatgttgtccgggtggctgtccacatcggcgaaaacccactctggtggggtgaaccggtatccaggcacctcgtttgaagtcattacttctttctcaaacaccaagggcaggagccggcaaagatctttgtcgtaaacatgcaggatgcgatcgtggtcaatgtgtggggggaagatggagccatcggttccggccaaagtattgcatgcgtcggtggtccaatggggtaaatgggtgcgaccgttgaagttgtcaatgatgccgtatctcctaatgtcatcgacacctgtgttcacagttactcggtcggaggaggtgccgttcttgccatacagcaggccaaactcctcgtagggcagcttttgctccttgggaacgacatccttcgctagcttgagcagaggatcctcgtagccccaaagcaactgacccacggacacctgaacgaatggcttgatcttcagtatgtccatgatactggccatggctagacgcaagaatctgaaccaagaaattcagggttaataatggggacacacttttgagcgtagcagtacttaccgggccgcgtgcttactctgcgaggtggcgctcaacatgggaatgttgggtacaataaccacgtcgtcttcgggccccaccgacagatcttcgcggaacgagtagatcttgcgaagattgtagctcagcgtgccattgtcattctctacgatgttcaccttctcccaggtctcgctgcagatgaggtaatggattgagccagattgctttcatgctacaaattatgatcttttacctgtaaacgtagggtcccacctcatcgacaatggccttggagccgttgctgaggaagtcgtccgcattggttacgttgtagatgtacagactaattctgggctccactgggggcttggcccaccatccgaaggtcttggcgccgggacgcagggccaccattcggtccacgaccgcatcaatcagcacggtaaattcacaggccaccacaatgccgccaattatcagcgccgctgcgacgacaatcgtaatccctggaaaaccaatgcgaattgtttagcaattgttcaccgattgcataaattaccggataagtggattgagtcatttgatattaggtggggaaacgtaaactgcgtattgcctttaatcagaactcatatttgagttggcattcgaccgaaaacgctcgattgcaatgtttgggatgggaaatcaatatttatagatcgccgatcgagctttaggaatgattcactgaccctttgacctttaaatcccagttctacaatatcccattatctataaatacggccaattagtattgatggaataactatacaccagaactggaaagtctagagaacttcggaaataagaaaattgcggaaaagggaatgctcggtgaaattgaaagtcatcttatacctatgtatgttctctgtaataaataatatcatttttgctcagataccagtccaaccagtcgagtaaacaggaactataatttcggtttaaaacaagaacgtggcacgtggatttatgacacctatgcgatagctaaataaatcgccagctttgagtacctgtgaatccaatcgcaatgcgttgtggataagttgtttgattggtttattacgataccaatctggaaatttatatggtaatttcttgcatgggaatgctgccagcaatggtgtgggtgatttggaattaacctccaggtcttatctaaatggaatacttacaccattttcgcagataggtgctggagagttttgtgcaaaacttgtgtttcggcccgttcatgttgaccaagtcggttttggggttgggtgtggtggagagtgaggagcaatccgccttgcagttgttaactaaaatgcaaaataaaattatacataaggcatatcgcgttgttttacagagacctagagatacacggacacactagccgtaataccggttaaattgtagtctcagctcgttaatctataattgccagtggcagccagacaaacaggaattcaatacagcatcttgataactgcgttctgaatgacattgggcctaggcggccatcgcttcgcgatcatgactctcagattgcgatcaatcttttcgttttgcccagtctttccatatgcaactgccgtattttaacgagaatccgaggcccaaagacccaagacacgttttggggcgtgttagccttgtgctgttttgacatcgctttgtcaatatgcgggcttttggccgaaatcgtattaacagcagcacaaaagccaacaaaaccaatccggcagtccaacccaacggcgctctgactccagaaccttcgagtcagcgaactttgttccagcagtcgagtgcgcccttcctgacagagtcggaccttgcgccattaagcgatttttaatgggccaacaggctcggtctgcgctgaggtcaacctgtgagctaccttgaccgaggccagggctgcgcaagcgcaaaacacatgagatacttgtatttttcgttcgtaaaccgagacatttttattattgacaattccagccacagcgctgttcgccattattcatatttataagcgaagccgaaaaaaccatgcaaatgaagcgacatgatgccaaatggatttcggctaatagtcggcaggccatttgcaggcgttgcacggccgtagacaatagaaacactttaattgcattctgatcgagtggtcccttgacgttcgattcagttcccccaaagtgcatacaaacggccgtttatcggtgctatatgggtttcacgaagtccagatggagttatgtggctcgtatgctccacgagtccaccccgtcgtaatagagggtatgattcttggatgctctcgaaaatcgctagtgattttacgatttctccactgttttagctataagcgctaaactttgcactttgagttcgctctagcctatcaacgcacacagccacgaagttttattatttgccgagtttactgcgctttccgagcaccacaaggtcgcacttctccgcttctggctctgccctcgcccaccgaactcgagctgggcttaaatatttgcgctgttgtattcagatggctattggatccaccattgttggcatcgccgctaacgttgccgatgccgataccgatgcccattgaatactaattaaccataatataataataataattatttcacctcaaatgaattttcggcgacactggtcggtcaggccattaatcagtgatttccaatttggatttggctacccatgccttcagttgtttggctctttgcctgctaattgggctctgcgttcacgccccactgggctgctttgttccgaataacgactgcaaccgtgcagcctgctcactgctcggaatcagtacccgtcgggcccaaatgtttacacagaccgtatgactcagcgttgccaagtgtttacccagaacttgagcgactcttatcagcgtcgagctcgccgcgaagtatgcaaatctgtgaaacgggaaaccctagacccagcaacacctttccataacaatagcgcttctcggcattccatccaactgcgatttctgatgtaatggcttgttttatttttgatttcacttgctgtggctgttcaattagcagctgctggcttcctaacgcaaatcgcctggccagaatccaacttcaatagaaacttactttctaaacacacgtttggtatgagctgagccgaaagcggtattgcggcgaagccatccgctcctcggctttgatcagcttggtggcgcagagatcgagctgaatcgtctcataatttaaacgcagtgaaaaagtgttgcacaaataaatacaagcggtagtagctgtttagtggaggcaattaccctgacccaaattgtgagacgctacccttgcggagggtattacattcagagttgcactcctacaagtcactgtcaaccaagatgtctgcactatttcttgcctctatcggggctttgtagggaaaaagattttccacgggttttcaatcaaagctccagaaaattcccaaacacagctttaaagagtatttgaaacttcggaccgacccctctttatatgatcccgctgattatggacaatgtgacactgaccgtccaaaaaagtatgccagcggatgacaattcacttgccgttttgtcgtgccgtgctgcatttgataatacgcaacgaaatgggttttacatctaggacttaaaccatgttggtgtcgtcgtcaatggcgtgacagacatgtgcggactgaagtggttcatcttggactttcagtgggtcagttccgccgtgggagagacaggggacttcggagtgcgaagcgtgcgatggctttctcagtgaaatgtgtcaacagttggctaagacaaagccacccaattgtcacctcaattagatgatcaactgggcacagcggtagggcaaaccgacctgatgacggagatggcccaaagctctttgctgctgcaaccttcacataatcgtcttcgttatgtggtcaaaagctggctggcccctgttcatttatttataagtatttatcttaggttttcttgcctgcgcatgcttaatttcggatctcgcgtctcgtaaatgtgtgtttggctttgctttttatttgatttcgctgtgagtcgctgcttcgtggcagcccgagtgaagtgcagagcgaaatttcactttttccacacaagtaatcataaaactatgcacgtacatcaaatgcgcttttggcagggccgcagacagcgtttagacgcggaggcagcacagaaaccgaagcagaaataaaaacacaaacactgaaaaatcatagcccccaagcataattcaatgattttccgcttttgtagcgctgctaagcgaactcgctgtcgaagtggtttcattttggctgactgggcaaggtcttgcttaaccagcgctctgattggagtcgaagttggtgactgggatgcggattcgtactcggaccgtggaacggggaccaagggtctgctaccgatcggggcagaaacaataattgaactcagctgtagtcaggcaaatcctaggaatgcggctcgcactgctgccccaacactctcttactgccactggtgcctcgtatctggtgcggcaggtttgattcgggctggacgggctggaaaccacaggcatttccaaatagccatgccaactcactcactcacactgtttttgacggtaacacggacttgcggcggtccgatgtacaagccaagattcttgggcccgggctataacgaggaaggtaatcgttgatcggtgagcagggaacgttaagcaacaaccgccggtaaaaatcgttaacgactcgaacgctcgcagtgccgtcaagtaactgaagtcgccgtcttcaagtggccccccaacgtaagatcgtaagatgttcaggcggcgaaagctcggcttcgcgttgcgacaaagcacaactggaaaacctgataaacaggtaggcgaaacccccagcccggcaggtgggtagcaatgcaaaagcgagagtgagcaagcgggagcttttgggttttgctagtgcaacgcatgcgatcaaagcacgagcggatcggcatcgggcgaggcggtccatgtggttgccaatgtttggaccaggctgataaaacgagtttgttgccttgccttgcattgaagtctttcgttttgttgcgttgcgcgtttcgttttatgctactaactccaaaaatatcactgattgccacaccaacacactcgtccactcgcgggattatgatatctgtcgttagtgctctcgcggttgtggttgttgtggcaggtgactcacgggttggttgccaaactcagcacaataaccacatccacgatcgacgacaggttgcagtatgcagaatgtatgcaaatttgacagctccgtcgatctcaaattattgttattgtcgatggagctttttgtctgcattgcgaagcgtttctttgctgcctgcccagaatcaaaatctcgccaaagcgaagtctaggatatgcgcgattcagctgtggaaaaaactggcgtcagaaacttgctgtatttacataatcaatcaacaaggggaaatcaataaagctaatgcgattcaatgaattgcccacgttttcttttcatgcacggacttcttggtaaacagctggagaaattccggctggtgaatcgcttcttctgcataaactgggacttgctaaataaacaagtaagctgttttcccagacaaattataaaatctaatattataagaacggaaaatacaacgggcacatagaaaaatctaaagtccaccctgaaaatatagtggactttcagttgcat

SEQ ID NO: 4889 - DNA, 2393 bp, DROSOPHILA
ttcgagtcgttaacgatttttaccggcggttgttgcttaacgttccctgctcaccgatcaacgattaccttcctcgttatagcccgggcccaagaatcttggcttgtacatcggaccgccgcaagtccgtgttaccgtcaaaaacagtttaacaactgcaaggcggattgctcctcactctccaccacacccaaccccaaaaccgacttggtcaacatgaacgggccgaaacacaagttttgcacaaaactctccagcacctatctgcgaaaatggtggattacgattgtcgtcgcagcggcgctgataattggcggcattgtggtggcctgtgaatttaccgtgctgattgatgcggtcgtggaccgaatggtggccctgcgtcccggcgccaagaccttcggatggtgggccaagcccccagtggagcccagaattagtctgtacatctacaacgtaaccaatgcggacgacttcctcagcaacggctccaaggccattgtcgatgaggtgggaccctacgtttacagcgagacctgggagaaggtgaacatcgtagagaatgacaatggcacgctgagctacaatcttcgcaagatctactcgttccgcgaagatctgtcggtggggcccgaagacgacgtggttattgtacccaacattcccatgttgagcgccacctcgcagagtaagcacgcggcccgattcttgcgtctagccatggccagtatcatggacatactgaagatcaagccattcgttcaggtgtccgtgggtcagttgctttggggctacgaggatcctctgctcaagctagcgaaggatgtcgttcccaaggagcaaaagctgccctacgaggagtttggcctgctgtatggcaagaacggcacctcctccgaccgagtaactgtgaacacaggtgtcgatgacattaggagatacggcatcattgacaacttcaacggtcgcacccatttaccccattggaccaccgacgcatgcaatactttggccggaaccgatggctccatcttccccccacacattgaccacgatcgcatcctgcatgtttacgacaaagatctttgccggctcctgcccttggtgtttgagaaagaagtaatgacttcaaacgaggtgcctggataccggttcaccccaccagagtgggttttcgccgatgtggacagccacccggacaacatgtgcttctgtcccgcgggcaagccgtcatgctcccccaacggacttttcaacgtgtcgttgtgtcaatacgactctcccatcatgctaagcttccctcatttctacctggccgatgaaagcctgaggacgcaagtagaaggtatttcgccacctatgaaagagaagcatcagtttttcttcgacgttcagcctaaaatgggaactaccttgagagtacgcgcccgtatccagatcaatttggccgttagccaagtgtttgacatcaagcaggtagccaacttcccggacatcatctttcccatcctttggttcgaggagggcatcgacaaccttcccgacgaggtcaccgacctgatgcgctttgcggagcaagtgccacctaagatccgcgtggcgctaatcgtcggtctatgcgcgcttggtgtgatcctactactgctttcgaccttctgcctgatccgcaactcgcaccggcaaagcaccctgcacttggaggggtccaactatctggccaccgcccaggtggacatgaacaagaagcagaacaaggataaccaacccgccagatactaggcgctctagtcggtgtctggtcgcagtacgagtgtcttcgggtgacttcgtaatagtataagccgtagctagtaactgggacctgcccacttccacttccacccccaatccctataacgatacccaatccgacctccctatgttaatcccattccccgcggaggaatgtgcttctatgtagtttaaaagaaatggagctgggaagacttgtatgtatttgtatgtgtatctgtatctattgtattgtatgtaggttatctgtgtaagtaagcgttataaaaattttgaagtgtagtctaacgaaacagtcgtgatcgcttaaaggctcaaagcttcgacttagacaatatttgttataccaaaacagcaatcgatcctgttcttgctttcttaaaccctcttgaaatgaaattgtatgtacaatcaagtcacaaaactcgaaacgtttctcaaataaaacaaaattccgtcctcgaatacaaatgtgctttataagaccaaatgctgggcatgttccgcatatgaaatttatattctataaatacataactttatcgatctaatgtacaatttatattcattaatgtgtacaataaatcacgatattataatta

SEQ ID NO: 4890 - protein, 520 aa, DROSOPHILA
MNGPKHKFCTKLSSTYLRKWWITIVVAAALIIGGIVVACEFTVLIDAVVDRMVALRPGAKTFGWWAKPPVEPRISLYIYNVTNADDFLSNGSKAIVDEVGPYVYSETWEKVNIVENDNGTLSYNLRKIYSFREDLSVGPEDDVVIVPNIPMLSATSQSKHAARFLRLAMASIMDILKIKPFVQVSVGQLLWGYEDPLLKLAKDVVPKEQKLPYEEFGLLYGKNGTSSDRVTVNTGVDDIRRYGIIDNFNGRTHLPHWTTDACNTLAGTDGSIFPPHIDHDRILHVYDKDLCRLLPLVFEKEVMTSNEVPGYRFTPPEWVFADVDSHPDNMCFCPAGKPSCSPNGLFNVSLCQYDSPIMLSFPHFYLADESLRTQVEGISPPMKEKHQFFFDVQPKMGTTLRVRARIQINLAVSQVFDIKQVANFPDIIFPILWFEEGIDNLPDEVTDLMRFAEQVPPKIRVALIVGLCALGVILLLLSTFCLIRNSHRQSTLHLEGSNYLATAQVDMNKKQNKDNQPARY

SEQ ID NO: 4891 - DNA, 3898 bp, DROSOPHILA
ttcacttatcgatgcggccaaaaattgtatggttaaaatttttttttttttttttttatatttggctagatttactaacgattttaaggtacgtatattctgcgaaaattttaacacatactctgaaaaaatttcgaaacaagttttgggaagaataagttgttttcttcgtgatcgaataaaatgaactgaaaaatccacggacattcgccctgggcagttggcaacagatttggaatggcctgcttcgacttgggagaatcgaacgaaagatcccggagaactggattgggatcgaggacttgctttgtcgaggtggattaccggagtcctccctcccaggatggtcaggaatgtgtccttcgggaggagtgtgtatcgaggcatctattcggcgaaacaaacaactatatttactactgccgctacttgaattggttcaaaatcaaaacacagtgcgacttgaaggaaatggtatatcttaataaataattttaaatctattcgaaaatatgttatgagaatctacctgtatcctttactaacataaaagtatgaaaatgttttacggtgaaatgggaaatttaaagggcaatcagtaggaatatacatatataaattatcactctactgggagatgtggtttattatctaaaactattatataaaccttaaggatataatcaatcctcgaacagcgatattttccagaaggcaaatgccattcgagtaggcgtaacgcccaattttctatcaaataattttcgtcacgtcctacgtaaaattaatatttttgggaattgaatgtgtcacataaggtttttaaaaaaattctctgttcgccaaaaacagtgcaaaaaattacacaagtgcaacattaaccaaataggctaaattttcgtagatgttaaagccatccaggcgaccattagccaacagacaacgatcacttcgattccgtccacagaatcgcaaaggaacatcatctagtaacacctcaatgggactggacttcgagctggatgagaagaacgaagatcaggcagatgaaaatgaaaagagtagctatgtcagcctctccaggccgagctccaaagtactagatacgagaagtgccagtagcttggacttcggggaccactgtagtcccagtataacaaaattacccaagaacagcagggaaggtaaggaggtcagcctaatcatgagtgatgaagagccggaagattacagaaagggtttgggctcgaagaggaggttgccagactcggaagcccttggcagcaagctaaaggaggaactctgcaagtacaagcaggagctcaaggactacaacgaaagcaccaaggatctggaggagaagtacatgaaaattaactacgagctgtgcgaaatgcagcagaagcacgatcagttcgtgtccagcaggaagcaggcccagcaaatggatctgggaagtgagcccgatccggatggattttatagctctgccagcagtgtcacctcgcagacgaccatcagacgaaagagcccccaaatcctgcgcagcaataccagtttcatgaccgttctatcgggccagagttcctgcgacgaaatcgatagaaagaaatacgcgtccgaaaggagtactcatcagcagaatcaccatcggcacaaggacgatctgccatcacaggtgaacagcgtttttgacagccgtattgtggaaacactggcgaaccgtcacgtgaagcgcaggaagagatccttggagcaggacgatcgggaaagggagccagcatccttcaaggatgtgtacaatgtgctgaaggatgtgatcaacacctcacaggtatgaattagctgttagctaaatggaatataaaaacttaaaccttcttccttaatcaggatcagaagtacaagcatgaacgggatcgaggtagggacagagacagggacagggactctggagatataagccagctccttaccaccattaagggactgaagagcgagcaggtccagtttcgaactctcattcggcagcagcaggagagaatatcggactaccacacgcggtgtgtgaaagcccaggacatcatgagcacccagaagcaggagatcgagaagctgcacgtgaataacaagcagttggagtcgagcatctaccatgacatagacagtctgcgatccaagatagacaacaaactgaaaagtgtctcccatttgccgaagatgatgcgagacgagcactccaagtacgagacggtaatgcgggaaaattgtctgctggcggataaacttcatgccctccaacaggaagccatgcagctgaaggtcaaaatagatgaactgggccgccgaaagttggtcaccatcaaccggctgaaggccgccgaaagggatctgaagatctttaagaactacaactcggccttgaagacggagaagcggaaactgacccaggagctgtccaccatgaaggatcagctggagcagctccaggcgagcagcaaaaggcaactttcccgccatcgcgagcagagcgaaaagcagcgcagggatctgcagaagaagatctacgacctcgaactgaagctgagtaggagccaaaactcgacgtccagtttgatccaggaacgggatagtctgatagctgagctccagacgcaactccacaccctggtccacaacttcgaggtctcgcagaaacacataagggttctccggcggcacatctactccatgacgaatcagggtggcacgggcatcgttggcagtgggtcggctggcattgcccacttgacatcaggtggttcccatcgacccagtctgatcaggatcaatcagctgccccagggaaccagcaacggtcgatttgcagccccccgaactctgaaggcgacgatctaaacggggatctggactggactgcctagacctaggcactagattgggctcatcagctgtccaggcaacttgaaggtactgctcccagcacttggactatgccatcaagttgcctggacattatcagcccttattaagccaccaattatttcactctaatgattatgtaaactcatttttaaaagtacttttaatgattcggttaaatgtattgggataggaacttatttaggtacgacagtcacattactatcaccgctccaaagattccaaagcctccagaatttgagttcattatacggagctatgaccagatctttatggcactccttgacataatttaggcaacaattgccgttcaccagacatgattcttggcatcgacacccttcattgatgtaccttccccgaacaaagtcctgaccacaacgaccagagcagtcggtcatttggtagcccagtgaatccgtgatatccgattcttctattggtttttttggttcctcgatgaaggtagacctcctggcacattccttagctgccatcagcttcacgtcgtcgatggcaatatctccgtattgggacctcgcatccgtggcggtaaagatcacttggaagtcctcatccatcttattgatatcgatcgtgtgctccagccacctggcaccttgtgatccagtcatcacgaattggtcgaacttgtagggactaaaaaatcatattgctgtataaggcaaacttaattctagataagataattagtaagcaactcactggtttgttttaaatatgtctcctatagtcaccgaaacgggttttatggacaccagcaggctacccactccgctgccgaacatgaagtagtgaaactggaagcaggcgccactcaaactgagctccttgggatacagtggcgataggaagtggtaggttccaaaagcatcgctttccgtctccatgcgcacgtagtgtccgatggattggttttggaacgtgtgatctt

SEQ ID NO: 4892 - DNA, 1839 bp, DROSOPHILA
atgggactggacttcgagctggatgagaagaacgaagatcaggcagatgaaaatgaaaagagtagctatgtcagcctctccaggccgagctccaaagtactagatacgagaagtgccagtagcttggacttcggggaccactgtagtcccagtataacaaaattacccaagaacagcagggaaggtaaggaggtcagcctaatcatgagtgatgaagagccggaagattacagaaagggtttgggctcgaagaggaggttgccagactcggaagcccttggcagcaagctaaaggaggaactctgcaagtacaagcaggagctcaaggactacaacgaaagcaccaaggatctggaggagaagtacatgaaaattaactacgagctgtgcgaaatgcagcagaagcacgatcagttcgtgtccagcaggaagcaggcccagcaaatggatctgggaagtgagcccgatccggatggattttatagctctgccagcagtgtcacctcgcagacgaccatcagacgaaagagcccccaaatcctgcgcagcaataccagtttcatgaccgttctatcgggccagagttcctgcgacgaaatcgatagaaagaaatacgcgtccgaaaggagtactcatcagcagaatcaccatcggcacaaggacgatctgccatcacaggtgaacagcgtttttgacagccgtattgtggaaacactggcgaaccgtcacgtgaagcgcaggaagagatccttggagcaggacgatcgggaaagggagccagcatccttcaaggatgtgtacaatgtgctgaaggatgtgatcaacacctcacaggatcagaagtacaagcatgaacgggatcgaggtagggacagagacagggacagggactctggagatataagccagctccttaccaccattaagggactgaagagcgagcaggtccagtttcgaactctcattcggcagcagcaggagagaatatcggactaccacacgcggtgtgtgaaagcccaggacatcatgagcacccagaagcaggagatcgagaagctgcacgtgaataacaagcagttggagtcgagcatctaccatgacatagacagtctgcgatccaagatagacaacaaactgaaaagtgtctcccatttgccgaagatgatgcgagacgagcactccaagtacgagacggtaatgcgggaaaattgtctgctggcggataaacttcatgccctccaacaggaagccatgcagctgaaggtcaaaatagatgaactgggccgccgaaagttggtcaccatcaaccggctgaaggccgccgaaagggatctgaagatctttaagaactacaactcggccttgaagacggagaagcggaaactgacccaggagctgtccaccatgaaggatcagctggagcagctccaggcgagcagcaaaaggcaactttcccgccatcgcgagcagagcgaaaagcagcgcagggatctgcagaagaagatctacgacctcgaactgaagctgagtaggagccaaaactcgacgtccagtttgatccaggaacgggatagtctgatagctgagctccagacgcaactccacaccctggtccacaacttcgaggtctcgcagaaacacataagggttctccggcggcacatctactccatgacgaatcagggtggcacgggcatcgttggcagtgggtcggctggcattgcccacttgacatcaggtggttcccatcgacccagtctgatcaggatcaatcagctgccccagggaaccagcaacggtcgatttgcagccccccgaactctgaaggcgacgatctaa

SEQ ID NO: 4893 - protein, 612 aa, DROSOPHILA
MGLDFELDEKNEDQADENEKSSYVSLSRPSSKVLDTRSASSLDFGDHCSPSITKLPKNSREGKEVSLIMSDEEPEDYRKGLGSKRRLPDSEALGSKLKEELCKYKQELKDYNESTKDLEEKYMKINYELCEMQQKHDQFVSSRKQAQQMDLGSEPDPDGFYSSASSVTSQTTIRRKSPQILRSNTSFMTVLSGQSSCDEIDRKKYASERSTHQQNHHRHKDDLPSQVNSVFDSRIVETLANRHVKRRKRSLEQDDREREPASFKDVYNVLKDVINTSQDQKYKHERDRGRDRDRDRDSGDISQLLTTIKGLKSEQVQFRTLIRQQQERISDYHTRCVKAQDIMSTQKQEIEKLHVNNKQLESSIYHDIDSLRSKIDNKLKSVSHLPKMMRDEHSKYETVMRENCLLADKLHALQQEAMQLKVKIDELGRRKLVTINRLKAAERDLKIFKNYNSALKTEKRKLTQELSTMKDQLEQLQASSKRQLSRHREQSEKQRRDLQKKIYDLELKLSRSQNSTSSLIQERDSLIAELQTQLHTLVHNFEVSQKHIRVLRRHIYSMTNQGGTGIVGSGSAGIAHLTSGGSHRPSLIRINQLPQGTSNGRFAAPRTLKATI

SEQ ID NO: 4894 - DNA, 3992 bp, DROSOPHILA
gttctaactattgaaatctatatgctttgcgagtttggacgaatatggaaggttctgttctaagcggactgatttttaatggctatggtgctttaatagtaatgtttgcatcgttggtgactttttctcttattttctactaaatacatttgtggccaatttggaattttgtgatctcattccaagccaaaataagcagccaacaatggccaattaaaatatcaatgtaaacaatgcggttcttggaaactcacttgcctatgatttttccatcgatcgtttgctgtatataaggatgaatatgtaaacatttgcctcacccactttggagtgtgattctgtgcgaaaagtgtttgaaatcgggtgttttttttttttttttggggcgactgtggaattaaggggggcgggaaattggggctgatgacagctgaaaaaaatagagaaagaaagaaatgtgcactgcgcagagaataggaagcattcttctgcggagaaacagagaacagtctaaatataaacaaagatactctcagaaataatttttaatattaaaacaacttgaattgcgcaggtccagttggcgcacaaatagtacctccaataggatttttaataaattattcaaatatatacactgatatatttttactatatctatctctgaaatctaagtgcattcaaaatacttaatgatgcacatgagtttcatctcgtttcatcttttgatatgattttcctaacctatcaagctcagccaaaagctagaagaacgcagcatacctctccagttgggagcagagggtagcaaatggtcggtgatggccagcggggagcatcatattgaaatgaagccaaaggtgtttcggcttttccgtatgaattttccaatgtgagggtcgctcggcgatttgtactagcctcagtttgattttcgcacacgaggtggtcggacacggatgagcttgatagtttagcggtctctcggtgacacgcttcgatgggcagctcgcatttttcggtggcgatgacgcagtgcgtcttcctcgttgtcgtatcgcagattttgtcacacgtgcgggcagctggcgatgcgatgtcttccgccaacgaatcaatatcgttgccaccggcttgcgtcattcgggcaacgctctataagacatcttcgtcggaaaggagtcaaaacgattttgggctgcctctggcaatagattgcagtgagaacagtagcatggggatgaattacttcgatttgggcgcccaaagagtggccggaaagaggcacgtttcgctggatggctttcagacaccacccttgggaatctcgagctatggcttggagtacctggacaattgtgtggatctggaaagtgtcgagatccaacgttttgtgggcgatgccaccctgaaactgagctgtggaggagctctgatccccaacctgaccgcagtatctttcagatacaacgagctgggtacattgagtggagaaactatccaggacttgccacatcttaaaatactacacttgcaacagaactcactgaggtacctagaatactttaaggagcattctgacttggaagaacttctgatacaggacgaacgggatttggtcttgaggtttaatgaaatcctaaatcagctgccagagctgagaaggcttagtttgcgaaatgtagaaaagattgaggaccaattccttagaatcttaccagaaaacttaacggatctgataatcgagaatacgcccattcaaccaggagttttgtacttgaccgaaggcgtagcgaaactggttaacgtaaccatcacaaattgccagctgaagggatttgcattgcaacctgcacacaatttggatattatgtatctaaacctaagtggcaatgccatatcttcgttgaacataagttttgaaagtggaccaagcaccctactgaccttggatttgagccgaaatagattggagcacttgaatttcacctggttctatagaaccaccagtcttcgtagtcttcacctgcaggaaaaccacttccattcattgtccctcttccaattgggctttatttcctcagcgagcattcaccacattgacctgagatccaatgaattgatgagcttccgggatacagaaaatgctgatctaccgtcctggaacccacagcttcgaatttccatcgatgacaatccttggagctgccagtggatgctgaatttctcgcacatgcaacctcaactctttagactattccagtactccaagtatatatcccacatcaatataaatggcctgagttgcacaccgcaagagccgccctcggaagaaccgcccaaggtgcgaagaatcatgcacgtgaggatcaatgggacagactcttcgattcccgtgccacatccacatggaaatgtttccagtttcactgtcctttacggcaaccccgtagaactgcaccgaagtcagcgatctttagccttgataatcgtgtttatgttgcccctgggcatcgcattcctcttcctgttgctatatctatacctccattgcgagcggctcttccacttgtcctattacgcctcgggattgccctgttttggtggcgaaaaatcatccagtgggccgaggtttgtggatcatgtggacatagtgcgctatcccattgctaatggcggttccagttgcccagtggatgtggaaaccgaattgccagatggatacgagactcctgtaagtggaggtacctcgatttgcaattgcactggtcacagagaatccacctgctcgaggacccatcatgtcacctacgagtccttaccagctgagctgccctatcaactgtacgcagagatcaaggagcaggcggatgagaatggggatgcggatgaggtgctggccgtgactaccggccctacggctcccatctacgatcatctgtcgtttgtggaggagatgccaaaactggatgaactgagagatatatcctaggtagaatccatctttgatatacttaattccttaataatttctaggctttgtaaatttcagttgtctttgaatacgtaaatagagaacacgaatctggatggattattcttttacagtttaaggtcgcacaacagcaaaggtactgctggttacacctagggtagtttaagtaagctcaactgtattaataaagagttgatttgtttttattgctaagtttttttttagttcgtagtgtatttgtaaagaataaagtctctgcaccctgatttgctgtgccctgcgttgttattatttgttaagtttttataagtctaaattcgatttaaaatttccattggaattcatgcaatcatttcataattggtttacgagagctcacaacaatacgccgtatgatgtttggcttcttaattgtgggttttacgtcctggttgtcttcactttcctttggcttgtcattttccttggtggtttccccatttggacatctctcaagcggactcaaattgtgaacaatgggatcgttcgcgctaaacttcacagccttttgcgaatcttcggcgaagacttgccgttttttgctgaggatagagcggatattttcgttggtcgagtctttgatgacgggaatcctcacaggagttcctttgcgctgcggtttttgtggcgttggactgtccagaatttccacactcaatgtcccatcttgcttgatgggagattccttggccgcctcatcgctgctgtcttcagtttccgtttccagctttatgagcttcacaggagttcctttgcgctgcggtttagcaggcgttactgtaccaggcagtcttgctcccagcagttcttcgttggacttcacctttatccctcccagtcgctgcttaactggggtacccttcatcaaaggtttggctggggtttccacggaatttagacccgtttcttcgttttcatcttcttgtatattcatttgaggtgttactccatcgttttt

SEQ ID NO: 4895 - DNA, 1992 bp, DROSOPHILA
atgggcagctcgcatttttcggtggcgatgacgcagtgcgtcttcctcgttgtcgtatcgcagattttgtcacacgtgcgggcagctggcgatgcgatgtcttccgccaacgaatcaatatcgttgccaccggcttgcgtcattcgggcaacgctctataagacatcttcgtcggaaaggagtcaaaacgattttgggctgcctctggcaatagattgcagtgagaacagtagcatggggatgaattacttcgatttgggcgcccaaagagtggccggaaagaggcacgtttcgctggatggctttcagacaccacccttgggaatctcgagctatggcttggagtacctggacaattgtgtggatctggaaagtgtcgagatccaacgttttgtgggcgatgccaccctgaaactgagctgtggaggagctctgatccccaacctgaccgcagtatctttcagatacaacgagctgggtacattgagtggagaaactatccaggacttgccacatcttaaaatactacacttgcaacagaactcactgaggtacctagaatactttaaggagcattctgacttggaagaacttctgatacaggacgaacgggatttggtcttgaggtttaatgaaatcctaaatcagctgccagagctgagaaggcttagtttgcgaaatgtagaaaagattgaggaccaattccttagaatcttaccagaaaacttaacggatctgataatcgagaatacgcccattcaaccaggagttttgtacttgaccgaaggcgtagcgaaactggttaacgtaaccatcacaaattgccagctgaagggatttgcattgcaacctgcacacaatttggatattatgtatctaaacctaagtggcaatgccatatcttcgttgaacataagttttgaaagtggaccaagcaccctactgaccttggatttgagccgaaatagattggagcacttgaatttcacctggttctatagaaccaccagtcttcgtagtcttcacctgcaggaaaaccacttccattcattgtccctcttccaattgggctttatttcctcagcgagcattcaccacattgacctgagatccaatgaattgatgagcttccgggatacagaaaatgctgatctaccgtcctggaacccacagcttcgaatttccatcgatgacaatccttggagctgccagtggatgctgaatttctcgcacatgcaacctcaactctttagactattccagtactccaagtatatatcccacatcaatataaatggcctgagttgcacaccgcaagagccgccctcggaagaaccgcccaaggtgcgaagaatcatgcacgtgaggatcaatgggacagactcttcgattcccgtgccacatccacatggaaatgtttccagtttcactgtcctttacggcaaccccgtagaactgcaccgaagtcagcgatctttagccttgataatcgtgtttatgttgcccctgggcatcgcattcctcttcctgttgctatatctatacctccattgcgagcggctcttccacttgtcctattacgcctcgggattgccctgttttggtggcgaaaaatcatccagtgggccgaggtttgtggatcatgtggacatagtgcgctatcccattgctaatggcggttccagttgcccagtggatgtggaaaccgaattgccagatggatacgagactcctgtaagtggaggtacctcgatttgcaattgcactggtcacagagaatccacctgctcgaggacccatcatgtcacctacgagtccttaccagctgagctgccctatcaactgtacgcagagatcaaggagcaggcggatgagaatggggatgcggatgaggtgctggccgtgactaccggccctacggctcccatctacgatcatctgtcgtttgtggaggagatgccaaaactggatgaactgagagatatatcctag

SEQ ID NO: 4896 - protein, 663 aa, DROSOPHILA
MGSSHFSVAMTQCVFLVVVSQILSHVRAAGDAMSSANESISLPPACVIRATLYKTSSSERSQNDFGLPLAIDCSENSSMGMNYFDLGAQRVAGKRHVSLDGFQTPPLGISSYGLEYLDNCVDLESVEIQRFVGDATLKLSCGGALIPNLTAVSFRYNELGTLSGETIQDLPHLKILHLQQNSLRYLEYFKEHSDLEELLIQDERDLVLRFNEILNQLPELRRLSLRNVEKIEDQFLRILPENLTDLIIENTPIQPGVLYLTEGVAKLVNVTITNCQLKGFALQPAHNLDIMYLNLSGNAISSLNISFESGPSTLLTLDLSRNRLEHLNFTWFYRTTSLRSLHLQENHFHSLSLFQLGFISSASIHHIDLRSNELMSFRDTENADLPSWNPQLRISIDDNPWSCQWMLNFSHMQPQLFRLFQYSKYISHININGLSCTPQEPPSEEPPKVRRIMHVRINGTDSSIPVPHPHGNVSSFTVLYGNPVELHRSQRSLALIIVFMLPLGIAFLFLLLYLYLHCERLFHLSYYASGLPCFGGEKSSSGPRFVDHVDIVRYPIANGGSSCPVDVETELPDGYETPVSGGTSICNCTGHRESTCSRTHHVTYESLPAELPYQLYAEIKEQADENGDADEVLAVTTGPTAPIYDHLSFVEEMPKLDELRDIS

SEQ ID NO: 4897 - DNA, 3822 bp, DROSOPHILA
cagcttgctgggggttttaaggcgaccaccattggcggtcgtccgcacttggaactgatctcgctaatggagcgcggtgcagcccgaaattactagtatggtggggcaaacaataattggccataaagccaaaatacacttcataccctcgtataattatgagcattttacgactctgacgcaggcgattctactgattggctggctcggtggatcagctccgctccgtctcgtcttcgaggtcaataaatcaccagcgctgactcttcacctgtgacataactctcgtgccaattaaacaaacaacttttagcttgtccgcggtgattaacatttaaattggggcatccttagccccgagcgctgggggttcgtattgatttatgtaaatcgcgagagtccgatcggaaaggaaaaaaactcccggacgctatgcgcggcggagggcttaacgggtccaacaggtcccaagttgccgaggggccaagggtatcttaccttgaagtcggacagggcatcagcactgaaaccagggaagatcatgcgacatgtgcaaaagttcaggttcaggaaggagaaggagaagtaagtaaggcaaacaaaagtaaacaaaccacaaaatccacaacggcggctcagaggctgaagaaatactaacaataaaaagtaaatgcacagattgtataaaacgcaaaataaatcttcagtacgtgcccaagttttcagtgtcacgccgcacggcataagaggcggggcgaatcaaacagagccgcgacctcaaattgcctggttggcgacgaaggcggaggcggcagaggagcgcttggacctggccgtctgactggctgacagataaggtgaaatgaggcacattcaattttccactaaatcgtatattgcgtaacggcggactactgatagttcatcagtagcgacacctctaccctaaatctaaatcttgcatacatatatacacgggtccagtccagaaagtaaatcactatttgactgccacgtcgggggaagcactagtggcctggaacttggtctctagagcggtgaccgtgcccaaatcgccacataacttccggaagaggaccacatagccgaggtcgccgcaggccactcgaattgcctttaggacactccacaaggccaggaccagaaaaagaaccatgcaatacggctgtatgtgttggacaatgttgacgttgatccacataagggaggtcacgaaaccgggcagctgtcccatttcctgagtgggactagagagtaatcatatgcactcctattgcagcgggaaagtacttacgaactcataccaaaaactgggaatcatcatgttgctaaaccggcttaggcgtgagctaaacctcctgagatccggaataggaatgttggactggaagcggtatttctccgtaaccggaataccagtgaccggctccagcaaaatgtatggctcgtgatcctcggcgttgggtgtgtatccttcgtagtgctggctccagttgtagctgcttccgtaaaagtgtggcatcgaaaacgcagagggggcgtcatcttgggggtaagaatgtgttcgatttaccttaggaaacctgtcgttttagggacgtagagccgtacttatcacacactgggatacgtcaaacattccgtcgggtagcttgacaccgtagcttgtgtccaggcagccgggaggcttttgatgtgactgaagcagagtgtagcggaaggtatcaaggccgttgtaacgctcctgacgctggtaggtcagcggaaggacccggcaggactcgatagccactatgctcagcggcgtatccggctggacaaagggaggaaagagagagttgtccagcgctccggaaacgttaaaggggcaagagttggagtcgtactgacgggtgtgcggaagttgttcccggatgatcacctcgccgttaagcgtctcgatgcggaaaaagttttcaatgccgcgcttagggccgatgttgactgtgtaaacctcttccttctctttgagagcctgcggaaaaaatcttagcggggaaccaacaaggaagtcttcaggatagtcaaggggcttacgttgtagagaacagcgacgttgggtcttatgttcgagatcctggagagcgtttgcagcaggggacgggtgaactcccacaggaagtagtatacgctgtctgtaacaaatatatcctccatcatgagcgctgcatcaaaaccgaaggctgcaagtggcgccgtatgcttgactttcgtcgctgcgcccaggataacgttgtttgtggaggtaatggtccagttaaggacgtcgggtgctacgctttcctccgggaggaattccactacgcggtatctgtgcttgcgatacctaacgttggtctcgttgcgatctaagatgtcgttgaaccccacgattctgtacacaatggggccgatctcctttaccttaagtctgctatcacgaccgctgcgaaactcctcggcgttggtcacgttgaacacatagtttttcagcttcccgaatggcgagtttatccaactgtccatggtgggcatctcctggcggaagcgtatatgctccctagctaccaagatgcgatagtccactccccaagacaccacgaagaggaatacattgacgcacgcaaggatcaggcaaagcaatattttcacccactgaaccgacttcattttttactaagggcggctttgacggaaaccagagacgggagtaaatcgcgtccgatcgagggaaaacacgcgatccgtttgagttaaattctaagcgctttcggcaatggccgtgcaatcacttatcatcgaatagcagaaaggttatcaccaaagcagcggtgcttactctgccaacactggaaataacggtgataacggcggacctctaacccgagcatagaaaatggccataacgcagattgccctccagggaggaggcactactgcacagactccagagatgcccgtcttcccggatggacctcaccgggatagcatcgaccttgatcgggagcaggtgttaatgaccaaccattgaacaggcgactctgccctggggttttggcaaattcgagcttatcaggcacagacagatcactctgctcttatcggtcccgcgggcagcgaaacgtgcaacgaaacaaatgactcgccattaacgtctgtctgatcctccctgagctcggaatctcgtatttatagctaatattgccattactatgcttcagaatccggtctggtccatctacgaagtgcgatgtgaaaattgaaagtgaaagtactataaatttaatataaaggttaatgggtgccctaattttaggtcgtaaaaattaatcttttaatgtgacatgttataaactatcgaaatgatgtagcagccaatccattcatgaccatttatttaagaaagggacttacaggagatctcatactagcattttaatggtgttgatttggttatatatatatataaatatatatatatatatatgttttgcagtttaaatgttgcagtacacgtttgaaacaactttatattattaacttccctggtttgaaatttcttggtattgcatacttttgggattgtgcacgaaattcataatttaggccacctaaaattgtagttttaaactatattataattcaatgaggtgaattataatataacttagttatataccattctgataaccatttataatacgtagtaacgtgctttttatgaatgtatccccgacaaccatacagaattatttttccgtgcaattggaaattaagtttgtc

SEQ ID NO: 4898 - DNA, 1637 bp, DROSOPHILA
cggccattgccgaaagcgcttagaatttaactcaaacggatcgcgtgttttccctcgatcggacgcgatttactcccgtctctggtttccgtcaaagccgcccttagtaaaaaatgaagtcggttcagtgggtgaaaatattgctttgcctgatccttgcgtgcgtcaatgtattcctcttcgtggtgtcttggggagtggactatcgcatcttggtagctagggagcatatacgcttccgccaggagatgcccaccatggacagttggataaactcgccattcgggaagctgaaaaactatgtgttcaacgtgaccaacgccgaggagtttcgcagcggtcgtgatagcagacttaaggtaaaggagatcggccccattgtgtacagaatcgtggggttcaacgacatcttagatcgcaacgagaccaacgttaggtatcgcaagcacagataccgcgtagtggaattcctcccggaggaaagcgtagcacccgacgtccttaactggaccattacctccacaaacaacgttatcctgggcgcagcgacgaaagtcaagcatacggcgccacttgcagccttcggttttgatgcagcgctcatgatggaggatatatttgttacagacagcgtatactacttcctgtgggagttcacccgtcccctgctgcaaacgctctccaggatctcgaacataagacccaacgtcgctgttctctacaacgctctcaaagagaaggaagaggtttacacagtcaacatcggccctaagcgcggcattgaaaactttttccgcatcgagacgcttaacggcgaggtgatcatccgggaacaacttccgcacacccgtcagtacgactccaactcttgcccctttaacgtttccggagcgctggacaactctctctttcctccctttgtccagccggatacgccgctgagcatagtggctatcgagtcctgccgggtccttccgctgacctaccagcgtcaggagcgttacaacggccttgataccttccgctacactctgcttcagtcacatcaaaagcctcccggctgcctggacacaagctacggtgtcaagctacccgacggaatgtttgacgtatcccagtgtgtgataaatgacgccccctctgcgttttcgatgccacacttttacggaagcagctacaactggagccagcactacgaaggatacacacccaacgccgaggatcacgagccatacattttgctggagccggtcactggtattccggttacggagaaataccgcttccagtccaacattcctattccggatctcaggaggtttagctcacgcctaagccggtttagcaacatgatgattcccagtttttggtatgagttcgaaatgggacagctgcccggtttcgtgacctcccttatgtggatcaacgtcaacattgtccaacacatacagccgtattgcatggttctttttctggtcctggccttgtggagtgtcctaaaggcaattcgagtggcctgcggcgacctcggctatgtggtcctcttccggaagttatgtggcgatttgggcacggtcaccgctctagagaccaagttccaggccactagtgcttcccccgacgtggcagtcaaatag

SEQ ID NO: 4899 - protein, 507 aa, DROSOPHILA
MKSVQWVKILLCLILACVNVFLFVVSWGVDYRILVAREHIRFRQEMPTMDSWINSPFGKLKNYVFNVTNAEEFRSGRDSRLKVKEIGPIVYRIVGFNDILDRNETNVRYRKHRYRVVEFLPEESVAPDVLNWTITSTNNVILGAATKVKHTAPLAAFGFDAALMMEDIFVTDSVYYFLWEFTRPLLQTLSRISNIRPNVAVLYNALKEKEEVYTVNIGPKRGIENFFRIETLNGEVIIREQLPHTRQYDSNSCPFNVSGALDNSLFPPFVQPDTPLSIVAIESCRVLPLTYQRQERYNGLDTFRYTLLQSHQKPPGCLDTSYGVKLPDGMFDVSQCVINDAPSAFSMPHFYGSSYNWSQHYEGYTPNAEDHEPYILLEPVTGIPVTEKYRFQSNIPIPDLRRFSSRLSRFSNMMIPSFWYEFEMGQLPGFVTSLMWINVNIVQHIQPYCMVLFLVLALWSVLKAIRVACGDLGYVVLFRKLCGDLGTVTALETKFQATSASPDVAVK

SEQ ID NO: 4900 - DNA, 3021 bp, DROSOPHILA
ctatatcacggacgagttttttcttctgtccctggctgaggctgcgagattttaccaaagaacacagcaaatcgattcctagatccaattcccctcccggtctactaccggatccaacgtctaatgaggtggttgatgtggaggctgtaacgccggtggagggatttactacagggttctcgggcttctggttctccttgttcacatgccgcctattgctccgaattttctcgaactgagccgccgtgtactgtcgctcttgctcgcgctccttttcgcgctttttagcttttctttggcccttcgagagttgctggattccttgctgttccctttccagttgatgatccttttcatggcgctgttcagctttcctttggtctctcatgagtggctgaatttcttgctgctcccttcccgaatgatgattcttgtcctttagttctcttccctttggttccccttgttgcatatcattttggtgctgctctttttccagttgcttctttggctcaacctccatctcttgttgtctcctttgattgtgtttgagcacctcgacttcctgcgccatatgcatgtgataatcaaagctactggccgacaaactgccgtacaccgagttggtttgtgattcccgccttgaactggaacgcgagctctccacccttgagctgacttctgatcccaatctggagctatttggcgagttgagcctggagtcgtctcttctgtaactgctcagcgattccctccgcgagctactcaccgatggcctgcgagaacttatctgtggatcttgtactcgcgaactaatccttaaatcgtctttcttacgcctgtcaattgattcttcttcttccattatggagtcaatttcggtatcatttctattgtaactgcattgggtaccttctgttgtaaaatttccacgaatatcttttgcttcagaactgccttgggttgactccttttgcgagctgctgcgacagtccgtctgacaagagctaacttcggaatcctgtctcctggatttacgttggcacttctttctaggatctcctttattggagctcaatgaactttccattccagagtttagagacttcgtgcgttcgctgcgattgacaaacgtgctgcaagccagtggcggcgttggcttatccaacattggtgacggttcctcggccaaaaggggctgcactccatccaaattcgcctcgggtcgctgctgtgttggctgacgccagctgcaatcctccaaaacggatcgctccagcgtgctgatgttactcatggacattgccctcttgcagtagcccacatcggcagaaggatcccactccaggcgtttgtgtgacttaaggacagactctggtgtctgcgtttttttgttttgcatctggggcgacttggtaggtgtgcgtatgtcctccgcggattgggacatggtttgggtgactgctacggaacgaaaactggggctactggccaatacaataggaattatagtgtattcattcggtttcgtcttagttacttccgatttcggtgatgtgaactgactgattttgtgcttactgggtggtggtgaaactgacagttcccggagctgttcctttgcttccccccgttcgtcaggtgaacgatgatcgctgctcttcgtgcgacgcctgtggcctgattctggtcgcgattcatgttccatggaggcacatcctggcggcgggactgatcccagggcacaactgtgggtgctgccactggctccactgcttgccgtcgacgaaagggccatgaatcgatctaattcccggtccgtggccattgcgctgatatattccctagctagtggaggaacgcgggatgattccgccaatttgttatggcgagaaccggacatcatcacctttccgactgctcctctcttcgctctcatggtcgaaaaagtttattccccttcaatatgtcagttcgccacatggaagcagcgttagaaactagtttgatgtgacgctaaaatcattcgaaaacaaattgagccacctgatatcgaaagttatcgcctatcggtggcgatagttggttagatgcctttgttatcgatatcgattattttggttaaaattacattacattacattttcctaaagtacatactgaaatgttaaaatcaatgaaaaaagcatatataatatatatactattatgtacataattcaaataaagcatttggttagttgatacaagtgaataagtaaaaaattttattaacagcaatgtaatatgggattaacagggcctattgagaaccggttcggacgcagtgttggctaacgatgcaaccggttccggttgtctgtggattttcaaaatggcatttggtgtcgtactgcgttgtttataattgctcctcgctgctctagaaaaacaatttgaatctgattaaagaaacttaagatatacacatcgacttgtgatcgactgaataatgctggagacgaagagcatagctgcattggctttcacggagacgccgcgcaaacgcaaaagggagacgctctataaaaatgctgccccgcccccgaatccgcagcaacaacccccagaaaaggacgcacaggatgcagctgtcgcgtcgacagaatcctgcttcaccaacgccgccttcagttccacgcccaagaagctaatggtggctcgtcgtcgtttggccaaggagaatagccaacccaatccgtttcccggcttggaggtcaagtccatagctgatctggcccagaagcagcagcaccagcagcatcatcagcagcagcaacaacaacaacaaaagctacccacgaatccttttgaggtcctgcgccagccgcccaagaagaagaagcgcgagcatgcctgcttcgagaatcctggcctgaatttggagctgcccgagaagcagttcaatccatatgaggtgagttcactagtctaatcgtacatggatgtactttttgtcgcagttaagttacagtagaaatc

SEQ ID NO: 4901 - DNA, 1168 bp, DROSOPHILA
tttagcgtcacatcaaactagtttctaacgctgcttccatgtggcgaactgacatattgaaggggaataaactttttcgaccatgagagcgaagagaggagcagtcggaaaggtgatgatgtccggttctcgccataacaaattggcggaatcatcccgcgttcctccactagctagggaatatatcagcgcaatggccacggaccgggaattagatcgattcatggccctttcgtcgacggcaagcagtggagccagtggcagcacccacagttgtgccctgggatcagtcccgccgccaggatgtgcctccatggaacatgaatcgcgaccagaatcaggccacaggcgtcgcacgaagagcagcgatcatcgttcacctgacgaacggggggaagcaaaggaacagctccgggaactgtcagtttcaccaccacccagtaagcacaaaatcagtcagttcacatcaccgaaatcggaagtaactaagacgaaaccgaatgaatacactataattcctattgtattggccagtagccccagttttcgttccgtagcagtcacccaaaccatgtcccaatccgcggaggacatacgcacacctaccaagtcgccccagatgcaaaacaaaaaaacgcagacaccagagtctgtccttaagtcacacaaacgcctggaaaagaagtgccaacgtaaatccaggagacaggattccgaagttagctcttgtcagacggaaatcatcattcgggaagggagcagcaagaaattcagccactcatgagagaccaaaggaaagctgaacagcgccatgaaaaggatcatcaactggaaagggaacagcaaggaatccagcaactctcgaagggccaaagaaaagctaaaaagcgcgaaaaggagcgcgagcaagagcgacagtacacggcggctcagttcgagaaaattcggagcaataggcggcatgtgaacaaggagaaccagaagcccgagaaccctgtagtaaatccctccaccggcgttacagcctccacatcaaccacctcattagacgttggatccggtagtagaccgggaggggaattggatctaggaatcgatttgctgtgttctttggtaaaatctcgcagcctcagccagggacagaagaaaaaactcgtccgtgatatag

SEQ ID NO: 4902 - protein, 222 aa, DROSOPHILA
MMSGSRHNKLAESSRVPPLAREYISAMATDRELDRFMALSSTASSGASGSTHSCALGSVPPPGCASMEHESRPESGHRRRTKSSDHRSPDERGEAKEQLRELSVSPPPSKHKISQFTSPKSEVTKTKPNEYTIIPIVLASSPSFRSVAVTQTMSQSAEDIRTPTKSPQMQNKKTQTPESVLKSHKRLEKKCQRKSRRQDSEVSSCQTEIIIREGSSKKFSHS

SEQ ID NO: 4903 - DNA, 17902 bp, DROSOPHILA
tatcgttttattttatcttttcttatttcgcctaaaagaaacactccttagctctatttattgcgaattgatgcatatttattatatttttacagtgtttatttgcagtgcgtttctgttgcgcgttagttaatcgtttagcgctttacttaacttattacatacatcattatatgtataaatatcatttttacattgtataattgttaaaatttggctttagtctgagcattatttttacagtataaccctttaggttttagatcgattgatttaaaaatcgtgcaaactaaatagtgctaccggtttgtagtcataagtattctagatgtgtgaaatattcggtgatgcaattattcctaagcaatttgatcattaattgatatattctggatgtgctggcgttgttcgtcctggctttgtgaatacttaattaatttaaatgcatatttggtcaatctcaagaggcgatttcgatttcgcccgcattcactaattggcaaattgttagtgagtgctcgaatgattcctccgtttaaatgttaactaggctgcttttgggcaataaaagtataaaatatgtacaactttctcttcagctcgtgggctataactaaatctaccgactactaaatttacagatccacaaaacgtttcggatatacacagattcacgtatgttaaaaattcatttatcaaaaggcgcttgtaaaacgtgtaagcaaataatagtataaggacatcgttagggacataacaaagggagcaaggctgcccgagttatagctctttggatgagggctcaggtcagcccaaaactaaaataatatcaaaaacaatagaaggaaacaaaatatacacaaacgtttacaaaagttcgttatatggctaaactatcagtccattgtgttcgagttcaaatcattattgagtgttgggatgtggatgtctccatgtacgactgctcctagcacagctctcggttgcagcgggtcaatcatcagaggatgtccggcgtgtgattctcgtcgtgcgtgtgctgcagcagaccctttcgctcgtccggagccgtgctgtgtgttatttcagtgctcactggctccggaatggcatccgcgtacatggattcgtacaccggattcgcaaagttaccctgtaaaataaactgcagttagttgtggtcaataggcatatgtaggcctatatgtagaatattaactctttgaattgttaatgtcaaaatgattagagctacatatttacagaaatggtgaaaatatgtactcaccttgtcatcttcactggcgaatgttggcgcctcatctgcatccccgcgatacatggcattggtgagcataatctccacgttgtccgtcaatcgagcatgggagaatggctgggctatgcgatgtttcctgcgtaaaaagcatggattagataagttaaataaagtcgtattaaaaaacactcacttaaggaagtaaactgcaccagcgaacaaggcaaaaacgagaaggatcaccgccaggaccaaaaccacgacagagaacacgccgcccgattccgtgggctcctgttcttcctttagggcatcggcactgtccgacagacacggcaccaccctgttgttctcacacaaacactcgttaatggagctgcccggacggcagacgttgcactctcctccgacgcagtgaggcggcatctcacaggcattgccctgccactctccaatgcaactgcaatgtggcaatctatactcgtccaggtgacagacgccaccattcgcacaataccgggcgcagggattgtcatccgtaacgggcaaggtgcataaatctccattccactggtccgtgcaattgcagagtgctacgcccttgataatgtgacaggttcccgcattctggcatatcattaacgtgcagggatccctggtcggtaccttggtgttgtcacaaaagtgcggtgggctggaggttttgcatagatccgattcgcaactctcgccgatgtaacgcggcggacaagtgcaacttaatcgaccacctctctccgagcaagttcctccgttgcggcagaagtcgcggcatgaattggactcacaatgctcaccgaagtagccactggggcacttgcattgccgttgaccctttgtgctgatcacacaggatccgccattcttgcaaaaatcggcgcactcgtcgatctcgcatcgcttgccggtgaagccatccggacactcgcattgtggggtgcccgttagcgtttccctgcaaataccgccattttcacaggttagattcctacagtgctcgcattgctcgccagtaaacattttgggacagctacacttcatgccttccgtttcggagatcaggcaagatcctccattgtggcagcgactctggcaagcaggcatagaggtctcgcaacgtgcccccgaccatcctgctgtacaggtgcattttaagggtggcggttcctgagatcctggcaacgcgggcgcaacagagcacactccgtagttctgacagtagccggagcaccgatagtgctcacaaagctcgccctcaaactgcggctggcagatgcacttgggcacgtgatccacgatcttgcaagtacccaggttacactgcagaggacaatagtcgggtatatccgcgtgcgccttgcaaaccccatcatcggtcatcacatagccttcggcgcacttgcaactgtacccaacggaagactccgaggagagaatgcagagggcgcgagatgacttgcacggatccttggcgcaaggattacttactagaaataaagacatttgcattatataagagagaacattaagtttcagcttaaagagaccacttactattcctattctgcttcattggatgaagaatgccaatgtcagacgagcgatagcccttcagcaagtacgtgccgttgtcgttaccaaacttgttcatcttaatgatactctgatcgtagagcttgatatacagatagtcctcgaagacgtcgatcttctggggtttctctcgatttccaaaacgcctcaccacgttgcgatccttaccattgagacggcacgtttcgatcgttccctttcgatagtcagcccagtacaaacggcctgtcgggtagtccattgacaaactaattggccagcccacgtcacgctccaccaaactctttttgttgctgccgtccagagaggccaccagaataccattctccaaggtggaccagatcataatgcgtgattccggctccaggacaatatccgtaggattcatgcccgtcgacacgagagagatgtactttttaccctcaatatcggtggccagaatttgattatgcctcgaatcaatgatgtacacacgctgagatatccagtccacggccaacgatttagggtcatccaactcgggaatctaagaggcaatattaatagactccaacggttattttatgtacaaaatgagtataagcggtatatactcacattaaatgcagtaagctccttgagatcacggcgcacccttactcccgtaccctcaacatgcggtgtggcgatcttcatggtgtgaaccttgccgtggtgcgagtcaatccagaagagcagcgtatccttgggcctaatcagtatgtcgaaaacgtctatcttgaggctatccgtctggaagaaaccaactacggtggtaccctcctgcttggcagggagaataaaccggaactcctgctccgaggccagcaagaggatctgatccggtccggatgctaggcaagttgcattcttctccggccccttgtgatagccatctgcgcacttacaattgtagtggcctgccttcttctcaatgcaaatttgggaacagcttccgaaaccgcaaactggcggctggcagttcatctcatcggatccgtcgacgcagttgtactgtccatcgcagcggaaggccttcgagatacaatcgtcgttttcgcattggaattgatcgtgtcggcacttgggcagcgccgcacacacagcatcagattcatcctcgttctccccacaatcattgatgccgtcacagagcgccgagttgcggacacacagttggttgcggcacttaaaggcgtttgcatggcaatgggttttggcacaggtctccaagctctcgtcactgccgtccaagcagtcatcccatccatcgcacttccagcgggacatgatgcacttgccgtttccgcagctaaagtgatccgaatggcaagtacagttcacctcgtcagacccatcagggcagtcatcatcaccatcgcatttgtattgcctgcaaaaaggaacttttaattaagaacatacattccaggaaagaagtcctaaacacttacttgttgatgcacgtgttaaaggcggcgcacttgaactgattctccttgcaggtgatattgcaattgatctcgtcgctgttgtcgtcgcagtggatctctccatcgcagcgatagttgtgcttgatgcacttgcccgttccgcagcggaactcgctctccgaacagttgcgcatctggcagtttagctcgtcacttccatcaccgcaatcgttctcgtagtcgcagcgccaacggccgggaatgcacttggaattgttgcacttaaagtaggttggatcacaggtggcctttgagctaaagcagctggctggctcgtcctcgccattggggcaatcgtggtcatcgtcacagcgccaagccagtggaatacaccgacccgaatcgcatctaaaaaagaaaacgcactcgttacttgatgaaatttctttacgccaattactataggtacaaagaaatccgtttcaaagcatactcactggaaatcattgggcccgcaagagacattatcacagttagcctcgtcggacttgtccggacaatcgatgtccccatcgcacacccacacaaagggcatgcagcggttgttgccgcattggaactgatccttcttgcagacgagcggcgtgcacgcggattcgtcttctccgcccggacagtccttaacaccatcgcatcgctttacattgtccacgcagaacgcactcgaattagccgttgctccgcacttcatgtggttgtcgaaacaggtgaacttgtcgcaattaagttcatcagaaccgtcgccacactggttgatgccatcacaaaggttcgatgggtgggtgcactttttgttggcacactggtattgtcctggctcacagtgaaagggcggacaggtctctggctcatcgctgccatcgccacaatcgtcctgtgtatcacagcgccagtaaaagggaatgcacttgtaagtgttaacgcactcgaaatgcgctgccgtacaattggcccgacaagtccgaccatcgtccgccaagataaagtttgtgggacacatgcacttgtagtacggttcctccggcgacagaacgcacagagtggaacagttggcagccaggcacggattcccgctcatcggctgctgctgtcggtagggatgaaagacacgtaggtccatcggtcgatggattgtcgtaatcaacgtggtgcagttttgtccattgaatatactgcagtactcaatggacttggtctcccaatcagaccagtagatgtgaccctcccacacggcaatggcaaatatgtggtgcagattcaacaggggattaatgctccttgccagtagcaatcgcgtatgatttccatccaaatcactcaccgatatcgtatcttccctggcatcaccccaaaacaactgttgcgtctcaaagctaatggtcaaggcgtttggccaacccaaaccgtcgcgaataatcatctttggattggagccatccatgccagccttgccaatgtgcggactgtccccccaatctgaccagaagatgtgttgctgatatgggtgcagggcaatgccacgcggctcccgtaaatactcgttgattaggactttccggtactttccatccagctgggacacttctatagtgtccaatcccttatcgcaccagtacaaatttttggccacccagtccacggctaggccatccgggttctttagcatagcttgatgcaatgtctgcgttttgttttccttgggacagtatcgtttgatggtgcccacggtgctggtgacatcagaccagtacaggcactggctatcccagtcgtagtccagggccactgcattggaaagctcgttgatcaaaatactgccattgccagtcatgtcaacctgacgaatgtagtaacggttggaaaagatcagctccatggatacgttgctggtggccttgcaagtgtggtggtcaaccaatgcataaccctttgcgcacaggcacttgtatgatccgtaagtatttatacaggtctgggagcacggctgctgctcatcacactcatcgatgtccgtgcagaggtgcggactcttgggaagaaccttgtaacccggtcgacaatggcattggtaaccgaccaccttgtcctcgcattcgtgctcgcagatatctggaatcagacactcattcacattgcacagctcttcgtccgagaagtcagcgcaatcgttccttcgatcacacaacaaatcagcatggatgcatgctccatttttgcagcggaagtcatcggtgccattgcatccacgggtgtgcgcacatagactgctcgtctcgtcggatccatcgccgcaatccggtttgccatcgcacgtctggttcttgaaaatgcagaggccatcctgacactggtgcatcagcgaaccgccaggacaggagtgcggctgaaaggctggcacacagccttcatactcatcgtcacctccggggcaatcctcatctccatcgcatacgtaatgagagtcgatacagaggcctgtcgattaaaagttgatcttaatcttaatactacgtaatattacgaaataaatagaactgctaacttaccactggtgcaaaggtgggcaggtggcgggcagtccggaatgtgagcgacacccccgcattggggtccttcgtcttcactgccctcgtccccaaggccactgggacaatccttttctccgtcgcacacccacttttggggaatgcagcgaccggagctcttgcactggaacaagtgcggtctgcaaggacgattcgggcactgtggaccctcatccgagccatcctcgcagtcactcttcccgtcacattgccaactggctggaatgcacgttttatcgcaggcgaactgattgtgcctgcactcggtgcggcaattaatctcatcacttccatctggacagtccttttcaccatcgcagtgccaggagccggcaatgcagttcccgctagcgcagcggaactgtccgggatcgcagcttaaactggtgtggttggcgcagtccaactcatccgtgccatctggacagtctggatcgccgtcgcagcgccatctgggcatgatgcatatagtgctgtttccgcagtgcacaaacgtcatatcgttcttctcgcagggaatgggagcacacatcttttcgtcgctgaagtcacgacaatccttcaagctgtcgcagaggaacttgcgaggaatgcactctccgcttccgcagcggaacatatccggcatttcctaaaaaacgaagtttcaaatatttacatatcacatttatatgggaattgccgtagtcaacaagcaattaataactaatagattcattatttaacttgtacgataaccataaattttcggagtaaacgtgataatatgaaaatccacttttgtagattgacattcattttctcaattcattgcatccgaaaatccacgtttctagattgacattcattttctcaattcattgcatctagatccttaaaattaaacatttttttatatgcatctacttaccttggtgttgttattggacggatgcatatcaatatcttctgactggcacttgcagagcaagggggtctcatcactaccatcgccgcactgctgctccccgtcgcacttgtgctccttcggaatgcaccgatggttttggcacatgaagtgcgtctcaggacattggcggaagatgcagtagctgcggaactcgtccgatccatccgcacagtgggtcacattatcgcaggtaagctccaagggaatgcattcgccagaatggcaattgtactgcgataagccacagctcgtgtttacgggagcaatgcaacgacgaccatcgggtgccagtactccctgagtgcaatggcaggtggcttggccgctcttgttcaggatacacacgtcctcgcactgcccattgaggatcttgcactggttcgcatcgcagttgatgctagtgttctgcactgccacaattcccattggacgggtcacgtgctctcgcaggaagagaacatccgtgccggtgtacttgtttgctcgaaccacagcatgaagtacccagtccgtccagaagagaagatctccatacacagccattgcaaaggcgtgcttgggcgtggagtgggccaacaccacgcgattgctgccatcatagttcgtcctttcaattttgtccagccgggcgtccgcccagtatagcttctgctgctccaggtccaaagtcagcgcatttggcattttaatatcggtctttatgatcacctctgttccgtatcctgttaggtatgatcgttgaatgcaaggcgacccctcgttccagttggtccagtatatcatgcccagacagggctccaccgcaatgccacgcggtttgtcatcctcccgaagactaagcactttcttcacatgaacttggttctgatcagcgtgctcagagagatggcgcagttcaacgcttcggatagtcgcattattattcgaggtccagaaaagctgctcgttgacaatgtcgtaggccaagccttccactcgttgttgctgctccaagaggacgcggtggccggtgccattaaagtgtacctggttaatggtgctgagctggacatccgaatagtacaccagctgttcctcgtagttataggtaatagcaattacgtttctcattaagctggtattggaaatcatttgaacaggccagttcttatcagcatggtcggtcatgtggatgctttcaatgttgcttcgatagctaaacagcaggaagttttcgtacggctcacagctgtagccatctgaagccagacggctatgggcacaggcgcagacggcactggttccgttaaacaggcagagctgctcacaggctccgttgctgtgggcgcagggattgcttccccgctgaaggtgcttggagtatatcttcagatccctaatggcatcctgctctgtctggagaaccacttttgactgactgagattagccagaggagccacccggataattccctcgttgtatttgttttctgcccaatataaatagtcgcccatcttggccagagccactggattgttcaggctttcgtttagcaattgctctcgaaggtttccatcgtagtccactttcattagggcatccggatatcgctcacaccaatacacctttgtagcttctatgtcaaggaccagactcccaaccgcccaattggctcgggtttgattaactaaaacaaagggctgacttccatccaagccgacacgacctatgtgttgttgggttacatagaatagcaggccttgcagaggatccactgccagagcagtaggtttctccaaatttgagactaccacatatcgatgactgccatccaaacgagcgacctcaatgatatttcgctttgtgtcgctccagtagatgtttccagccacccagtcaatggcaatgccacccagccagtcctgctgcttgtatcccaccaggttgagagcttctaaaatagtttccctttgggttccatcgcgtttcacgcgggagatgctacccagttcgttgtcaccccagtacaatgtatctgtattggccaggtaatcgatgaagcttgccgagcttacgcgggaaatgggtaccaaagcctgaaagattgattttgtcagattgtgttttccaaagattaaaccattatgttaccggggaaggcgtgtcaaactgttccgatgggtcgatcatttccacgccctgcaacacatcgatggagtagaaaataaattcggcccgcggaacacaaccggttggattgttcggctctacatcgtagccgagcgcacagcggcagacgtgatctatggaagaagtggccaagcaaagctgctggcagccaccgcgataagcccactcggcacaggtgtttgagccggtctgggcgtccgcataaaacatcttcatgctttgaatgctctctataaaagaatgtaagcatgaataaagaacaacaatataagttttggattcgcttactcgtattgactctgagataggacatgttggagcaggcttccttctcgcattgcatgatcacactctgaatattctccggaaaatagagcgttccattgtagacagtcagggaactgatcgatgtgataggactggcaaccagtaccttacgcgtctcgtttcttggaatgtcgtaataggcaatacccgaattgtcgtatgcgtagtacaaccgctgagaatcgaagtccattgtcaaactttgaagattgttctcatgctgatagatcaacgaacgacttgagccatctaaattagactgctccaactgggacatacttccatcggacgcagagtgtatccaatacattttgccactgcagaaataaaaagacggggtcaggattgtcactgtttgtagactgaagagaagaggacttacttggcaggatccaggacaatgctgtccaccatattaagatcctcgtgaataatagacgcaaattcgcccttgaggttacttgccagaatattgcactttatctgaccagaggaaaagtacatgttccgggcaatccagtcaactgcaaagccatagggtttctcaatgttggtgttaattatgggctctataaggccatttgagatgccggcgcttgagatctcattctgctggatatccgaccagaaaatgcgactttcatctactagaaaatcaatgcgctgtggggcgaccaactttaaatatcgaaaattaatacatattctcaaaagtgtacatttaagtgctatatttacccttggagactgacgaatagtcggtatggtgtggtgattgggctgatgcaagtcaataccgcgaatctcgtccaccatgacaaacagaagaacctgctcattgggaacacaattacgttcattggctggatctagacgcattacatggggacattcgcacttaaaggtaccccttccactcaataggcaaagatgggaacatcctccgttgttctcgccacagggattccgatcccagggctgtcgactggagtgcaatacctgaatgccaaagggctgggactgggtgcgctgcagcacctgtacatcgcttccattccacttgttggcgcgtataaccgatgtggttcgccaatccgtccagtagacgtagttttcgaacacagatatggcgaatggatgggagagtatttctttgttgcgcagtactacatgatgctcggacccgtcatacatggtactactaatcgagtccgacttggcatccacccaatacactcttttttgggtgtaatccagagtcaagccattgggccatcctgcacttaactgccaactggtggagatcatgcgtcttccatcgcccgacatgctggcccgctcaattctgggcgagttatcatcccaatctgtccaaaagagaagaccctcccttggatccaaggctatggctcgcgggctctccatgtttccagcgatcagcgttcgtcggaagcttccgttcagttttgccacctcgatttggtccagatttgagtctatccagtaaaggtttttccccacccagtcaacggccaatccctcggtagtggaaagtccagagtgaataacggcttccacatttcgcaaactctcgcccaccagatgacccctgtaaatcttgtcgtctatcacatccgtccagtatatctcaacgttggactcgttattgtacaaaaaatcgagagcgataatattcctcagagaactgtaaaagttccccacgtttaaggtctttaggttgatgcctttaatgtcctgcctgttggtgaagataacgtaaggctcatccggagcggtgcttttgcatgtgaaccgatcgaagcccaagtcgaatccatccaagcaacggcagtcataacccttaccgctactttcgcacacctgtgaacacgtatcccagtgatcgcaggcgtgctgcatgctgcagcgctttccgtttggctgcaggtatagatggtctggacaggagcagatatatccctccggagtgttatggcaacgatgagagcactcgtgcccgcgatcgcacagcttatccgcgcacaaaaagccctcgtccgtggtatcctcacaatcgttctttccatcacaaagctgatccactgttacacactgcttggagaagccacacagccgatctgggtgctcgcaaatcaccgtctcgttcatatcaaatctagtggtattgatatgcgtgcagttaaactcatccgtcttgtcgaaacagtgcgaaatgccgtcgcagcgcaaaaagtccggaatgcactcgaacggaaacatgcaagcgaactcgagaggagcacactcgcccagctccttccactcagtcaccgggtggttatcactcttggtctgattgcagttagcctcatcactaaagtccaagcagtcgtggatcccatcgcacatgtgcatctcgccatagcacccaatgggccggcaatacttctcgccgtgttcgcactcctgctcacattccatttcatcggcattgtttctagataacggaaacaaaatatttattttttaataaacgtctaaagataaggccagaatgaacctacccacagttatcaatgccgtcgcagacatcggcaaactggcgacaccgcccgttgttacagtcgaattccggacatttgctggcaaagatcgtttccgacgtctcatcggaatcatcatccggaccgcaatcgaccactccgtcattgacccaagttagttgaatgcagcgcccactcttgtggcaagtgaactcgttgctattgcaggtgttctggtggcagttggcctgatccgttccgtccgagcagtagggaatggtgctgcacagcagcgatcgctgatagcagcgaccattgcaaacaaagttatgggttttatcacaagtattgacattgcaaggtcccttcggatcagagctttcgtcaatgccatcttcgcagtcctcgaagccgtcgcacatgtccttggtgtcgaggcattgtcgcgtgctgcggcacatgtaaccagaagtgcaattaggacgaatcggagacggagctagttgggggatgcagtggcttccggtgccgttaagtgtgaagccatcgggacagcggcatatagcacctttcggtgtgttcaagcacatgcccggacactttgattgcgcacaagcacttggagtttggggcagtggttgtgaagctatatcgaaaatccgcagatcagcagctcttccagttctttgcaagtgcactgttgagctaaatgtgctcgatagattggcctgatgcgcatggaagcgcagaatagtggagttcttgttgtccgcccaatatatcagtccattgttctgcactattgagtacggatgaaactggtccgacttgaatagcacctccctaccggtgccatccagcctcatgagctcaatggtgctcagtcggatatcgcaccagtaaagctcctttgtgcgtcgatccacgtccagactgcgtggccattgcatgggcatagagctggtgcccttggccagcaactccttgtgcgtgccatccatccaggagctgtagatgccggcctcgcaggattgcgactcccattgcgaccagtagagcagtccggtcgtgggatcaagttccaacgaccttgaaaataatattcgaattagataacattgattattatcggtgtctttaaacttacatggcatcacagtcagtgttgaatgtcagcactttgctcaaatttctcagtggagcgacctgcatttttttgtggctggtccagtacaggtgatcgttgatccaatcgaaggccacggcgtgcaccctcttaagaccttgggccagcagtcgagagacactaccattaagcgattggcttcgtatgctgcacgagggttcaccatttccgaagggactcgcacccgaatcagctaccacatagaaaaccgccttgcctcgaacatttacatcaatggccaatgttttggatacattgtataccggcaccattacatccggttgctcgccgatctgctccagctgctgaacttgctcggtgtccagcggtatgccactgatcctagccaaatgtttgtcgctgtacacaagaaacttgtcaagggcggagagaaggcaagtcgtctgattgtgcaatttataaccggcggtgcacatgcatttggcgctggcgaatcccttcgtccattgcggcacacagatctggttgcaaccggcattgttatctcggcacggatgagccacctcgggctgcttttggcggtggaaaattcttaaattggctccacggctcacattcgattggaggatgtgggttttgagcgagaatttgtccagggcaacgatggccgtatccatccaggctgctaaataaattgaattctcaaaaacctccacggcatgaatggttttcagtggcactggggactataaaattagatacaaaagtaatcagaaccagctctaacattctaatcgattaccaaacaaagatttttgatgctgaatatttaacacttgccaacatactatattaattaatgaggtcagttattatggaaaaaacattaacatgtgcaaatattcgcatcacaatactcacatctagtggccttttgagggtccaacggttccgaccctcgtagtccacacggttgacctcatccttgtagatgtcaatccagtacaccaactcgtttgccaagtccaaagtgacgctgctcgggtgataaacctggtcggtgaccaaaacagttcgattgctgccgtcgagcagcgaacgggacaaactgggtgtccaatccgtgtaaaacataaagcccttggtggggtccagatccagagatgacagcgggtccacctgctgcaatatcacccggcagtaagtcatcgcatttgtgcacagatagaccaggccgtcgtcctcgctgactaaataccaattacccgacagccagtccagccgaagctcagtgaaaactgcaaggggaaaaaagatccaaaaatattatcaacaccgagataattagctatcctaaaaggatatcaattaatatttacttatgatgataataaatgctttaatattgttggaaaaaacaatatataacacgtagtttagataggaagcttaagttaagcgaatgcaactgggcaatgaattctacttttgaaccggaataccctctgcaaagaaaccacatcggggtcaagataaacggtcactcacattgctgcggcgagacgaacgaggagaagggcagtgtccagttaacccgggcgtcatcgacgcgctggcaccgcatttgcagttcgggccaactgaagagcagggagcagagggtgcgattccgatgccacacctcgaaggcgtgcacgaagcgaaggggttgcgagagcagcagttcttcctcacttccgacgccatccttgtccgtgactttatcattatcctttgcccctgggggaccgatgacttcggttccattcgttccaacactctgtacgccgtcccgcgaaagaaaaatcagcgtggtcggctccgttggtggcactataaattgagagggattagccggatgtgtatctgctctggcgtgtttttctgtgaaccctaccattgatggcccggcagcgatttcccttggtcttcgcatagccggagacacaggagcactcgtaggagccgggcgtattgcggcacacctggtcacaggtgcccggttcggagcactcgtcgtagtccacgcagcgggtggagttcgacgactctggcacctgatccttggggcagtagcagcgtgccccctgcggcgtcagtttgcagttgaagctgcagttcagtgctgcacaagcagcgttctgtttatctattcagaagtggatattatcgttatgagattatttgaaagggtttttttttttcaagaaacaaaatggtgtgtaccgaataagaatagaataaaacaatttgattaaggtagttacgactttgtaatcaagcagtataactaaatatcaaaccattttggttgcttttagtttaggaacagcatgttgtacgacgattgtgttggctatggcagcccaattagccgaatcgatcggctgcacttaccacattgcagctcatcgttatcacagtcccaacggccgtcgcagaagcgggacaactccaggcagtcgccgttgcggcactggccctcgaaggcgcggcacttgggcgtatcgccattcggacctggtcgggaggcaaatgaggcggtggtcagtgggtggcatggtggcatggtggcatggtggcgtggccaggcccgcggcttacttacagttcagttcgtcggatatgtcgcccttgccgcagtcgaactccccgtcgcagagccaattgttcgggatgcagtggcggctcaccccgcatcgaaactggccctcgttgcacttgggcgctccggctggaaaacggatgagaaccaagctgagtacactcctcacgtacaataacaataagcgaaatgatgatttatggcggggtttgttagtggtcttggggctggttgctcgttggtccgcttttcggccaacaaaaagttgcttctgctgttgttcgtacaaatcgctgaattatttcgcgagatatcgtaaataacacgcaaacaagggcagtcgtggccaacttttggcagatataaaactttgtactcccgctttaagtggaaaaccctagaaataactatataatcctggcacttataattggaaagggttgggccagcggatagtgtcatcaatgtggttatggggtttaagatgtacatagcttatattccgatgaaatcggaatagtattagaccacgtgcaactcaaacggggtaaacggagatgttgtctcccaataaccatcagttaacacacctagttgtgaaaacaaaatgggaacacatacactttaatggaaagcaaattagtttggcgaccatctggtggctttctgaaatggaaaatacccctagtgtccccttgttccctcttgctccttgttcctttcatggtcattacccaattagctcggcttttattaaagcgaatgagtttcattctcattttagggggtgacaatggccaacccccgaaagaccacgaaaaaataactgtgacaaatacgactcgctaaatggcacgttaatttttcaagttgacttcgtcgcatccagttagttgaactccccgtggcacttgaaaatgtttaacaattgcccggcaacataatttttgaccattttcgagggcccggcttgattaaataagtgccgggctccggcttgcgctactcacgccctccaatttcgtgcgatggtcagcatcccacggctctgactccacgactcccttgacaaaatttctggtcccggtttcgtttgcgcccgcttactccttgct

SEQ ID NO: 4904 - DNA, 13923 bp, DROSOPHILA
tgcaacgagggccagtttcgatgcggggtgagccgccactgcatcccgaacaattggctctgcgacggggagttcgactgcggcaagggcgacatatccgacgaactgaactgtaagatgccaccatgccacccactgaccaccgcctcatttgcctcccgaccaggtccgaatggcgatacgcccaagtgccgcgccttcgagggccagtgccgcaacggcgactgcctggagttgtcccgcttctgcgacggccgttgggactgtgataacgatgagctgcaatgtgataaacagaacgctgcttgtgcagcactgaactgcagcttcaactgcaaactgacgccgcagggggcacgctgctactgccccaaggatcaggtgccagagtcgtcgaactccacccgctgcgtggactacgacgagtgctccgaaccgggcacctgtgaccaggtgtgccgcaatacgcccggctcctacgagtgctcctgtgtctccggctatgcgaagaccaagggaaatcgctgccgggccatcaatgtgccaccaacggagccgaccacgctgatttttctttcgcgggacggcgtacagagtgttggaacgaatggaaccgaagtcatcggtcccccaggggcaaaggataatgataaagtcacggacaaggatggcgtcggaagtgaggaagaactgctgctctcgcaaccccttcgcttcgtgcacgccttcgaggtgtggcatcggaatcgcaccctctgctccctgctcttcagttggcccgaactgcaaatgcggtgccagcgcgtcgatgacgcccgggttaactggacactgcccttctcctcgttcgtctcgccgcagcaatttttcactgagcttcggctggactggctgtcgggtaattggtatttagtcagcgaggacgacggcctggtctatctgtgcacaaatgcgatgacttactgccgggtgatattgcagcaggtggacccgctgtcatctctggatctggaccccaccaagggctttatgttttacacggattggacacccagtttgtcccgttcgctgctcgacggcagcaatcgaactgttttggtcaccgaccaggtttatcacccgagcagcgtcactttggacttggcaaacgagttggtgtactggattgacatctacaaggatgaggtcaaccgtgtggactacgagggtcggaaccgttggaccctcaaaaggccactagattccccagtgccactgaaaaccattcatgccgtggaggtttttgagaattcaatttatttagcagcctggatggatacggccatcgttgccctggacaaattctcgctcaaaacccacatcctccaatcgaatgtgagccgtggagccaatttaagaattttccaccgccaaaagcagcccgaggtggctcatccgtgccgagataacaatgccggttgcaaccagatctgtgtgccgcaatggacgaagggattcgccagcgccaaatgcatgtgcaccgccggttataaattgcacaatcagacgacttgccttctctccgcccttgacaagtttcttgtgtacagcgacaaacatttggctaggatcagtggcataccgctggacaccgagcaagttcagcagctggagcagatcggcgagcaaccggatgtaatggtgccggtatacaatgtatccaaaacattggccattgatgtaaatgttcgaggcaaggcggttttctatgtggtagctgattcgggtgcgagtcccttcggaaatggtgaaccctcgtgcagcatacgaagccaatcgcttaatggtagtgtctctcgactgctggcccaaggtcttaagagggtgcacgccgtggccttcgattggatcaacgatcacctgtactggaccagccacaaaaaaatgcaggtcgctccactgagaaatttgagcaaagtgctgacattcaacactgactgtgatgccatgtcgttggaacttgatcccacgaccggactgctctactggtcgcaatgggagtcgcaatcctgcgaggccggcatctacagctcctggatggatggcacgcacaaggagttgctggccaagggcaccagctctatgcccatgcaatggccacgcagtctggacgtggatcgacgcacaaaggagctttactggtgcgatatccgactgagcaccattgagctcatgaggctggatggcaccggtagggaggtgctattcaagtcggaccagtttcatccgtactcaatagtgcagaacaatggactgatatattgggcggacaacaagaactccactattctgcgcttccatgcgcatcaggccaatctatcgagcacatttagctcaacagtgcacttgcaaagaactggaagagctgctgatctgcggattttcgatatagcttcacaaccactgccccaaactccaagtgcttgtgcgcaatcaaagtgtccgggcatgtgcttgaacacaccgaaaggtgctatatgccgctgtcccgatggcttcacacttaacggcaccggaagccactgcatcccccaactagctccgtctccgattcgtcctaattgcacttctggttacatgtgccgcagcacgcgacaatgcctcgacaccaaggacatgtgcgacggcttcgaggactgcgaagatggcattgacgaaagctctgatccgaagggaccttgcaatgtcaatacttgtgataaaacccataactttgtttgcaatggtcgctgctatcagcgatcgctgctgtgcagcaccattccctactgctcggacggaacggatcaggccaactgccaccagaacacctgcaatagcaacgagttcacttgccacaagagtgggcgctgcattcaactaacttgggtcaatgacggagtggtcgattgcggtccggatgatgattccgatgagacgtcggaaacgatctttgccagcaaatgtccggaattcgactgtaacaacgggcggtgtcgccagtttgccgatgtctgcgacggcattgataactgtggaaacaatgccgatgaaatggaatgtgagcaggagtgcgaacacggcgagaagtattgccggcccattgggtgctatggcgagatgcacatgtgcgatgggatccacgactgcttggactttagtgatgaggctaactgcaatcagaccaagagtgataaccacccggtgactgagtggaaggagctgggcgagtgtgctcctctcgagttcgcttgcatgtttccgttcgagtgcattccggactttttgcgctgcgacggcatttcgcactgtttcgacaagacggatgagtttaactgcacgcatatcaataccactagatttgatatgaacgagacggtgatttgcgagcacccagatcggctgtgtggcttctccaagcagtgtgtaacagtggatcagctttgtgatggaaagaacgattgtgaggataccacggacgagggctttttgtgcgcggataagctgtgcgatcgcgggcacgagtgctctcatcgttgccataacactccggagggatatatctgctcctgtccagaccatctatacctgcagccaaacggaaagcgctgcagcatgcagcacgcctgcgatcactgggatacgtgttcacaggtgtgcgaaagtagcggtaagggttatgactgccgttgcttggatggattcgacttgggcttcgatcggttcacatgcaaaagcaccgctccggatgagccttacgttatcttcaccaacaggcaggacattaaaggcatcaacctaaagaccttaaacgtggggaacttttacagttctctgaggaatattatcgctctcgattttttgtacaataacgagtccaacgttgagatatactggacggatgtgatagacgacaagatttacaggggtcatctggtgggcgagagtttgcgaaatgtggaagccgttattcactctggactttccactaccgagggattggccgttgactgggtggggaaaaacctttactggatagactcaaatctggaccaaatcgaggtggcaaaactgaacggaagcttccgacgaacgctgatcgctggaaacatggagagcccgcgagccatagccttggatccaagggagggtcttctcttttggacagattgggatgataactcgcccagaattgagcgggccagcatgtcgggcgatggaagacgcatgatctccaccagttggcagttaagtgcaggatggcccaatggcttgactctggattacacccaaaaaagagtgtattgggtggatgccaagtcggactcgattagtagtaccatgtatgacgggtccgagcatcatgtagtactgcgcaacaaagaaatactctcccatccattcgccatatctgtgttcgaaaactacgtctactggacggattggcgaaccacatcggttatacgcgccaacaagtggaatggaagcgatgtacaggtgctgcagcgcacccagtcccagccctttggcattcaggtattgcactccagtcgacagccctgggatcggaatccctgtggcgagaacaacggaggatgttcccatctttgcctattgagtggaaggggtacctttaagtgcgaatgtccccatgtaatgcgtctagatccagccaatgaacgtaattgtgttcccaatgagcaggttcttctgtttgtcatggtggacgagattcgcggtattgacttgcatcagcccaatcaccacaccataccgactattcgtcagtctccaaggcgcattgattttctagtagatgaaagtcgcattttctggtcggatatccagcagaatgagatctcaagcgccggcatctcaaatggccttatagagcccataattaacaccaacattgagaaaccctatggctttgcagttgactggattgcccggaacatgtacttttcctctggtcagataaagtgcaatattctggcaagtaacctcaagggcgaatttgcgtctattattcacgaggatcttaatatggtggacagcattgtcctggatcctgccaatggcaaaatgtattggatacactctgcgtccgatggaagtatgtcccagttggagcagtctaatttagatggctcaagtcgttcgttgatctatcagcatgagaacaatcttcaaagtttgacaatggacttcgattctcagcggttgtactacgcatacgacaattcgggtattgcctattacgacattccaagaaacgagacgcgtaaggtactggttgccagtcctatcacatcgatcagttccctgactgtctacaatggaacgctctattttccggagaatattcagagtgtgatcatgcaatgcgagaaggaagcctgctccaacatgtcctatctcagagtcaatacgaagagcattcaaagcatgaagatgttttatgcggacgcccagaccggctcaaacacctgtgccgagtgggcttatcgcggtggctgccagcagctttgcttggccacttcttccatagatcacgtctgccgctgtgcgctcggctacgatgtagagccgaacaatccaaccggttgtgttccgcgggccgaatttattttctactccatcgatgtgttgcagggcgtggaaatgatcgacccatcggaacagtttgacacgccttccccggctttggtacccatttcccgcgtaagctcggcaagcttcatcgattacctggccaatacagatacattgtactggggtgacaacgaactgggtagcatctcccgcgtgaaacgcgatggaacccaaagggaaactattttagaagctctcaacctggtgggatacaagcagcaggactggctgggtggcattgccattgactgggtggctggaaacatctactggagcgacacaaagcgaaatatcattgaggtcgctcgtttggatggcagtcatcgatatgtggtagtctcaaatttggagaaacctactgctctggcagtggatcctctgcaaggcctgctattctatgtaacccaacaacacataggtcgtgtcggcttggatggaagtcagccctttgttttagttaatcaaacccgagccaattgggcggttgggagtctggtccttgacatagaagctacaaaggtgtattggtgtgagcgatatccggatgccctaatgaaagtggactacgatggaaaccttcgagagcaattgctaaacgaaagcctgaacaatccagtggctctggccaagatgggcgactatttatattgggcagaaaacaaatacaacgagggaattatccgggtggctcctctggctaatctcagtcagtcaaaagtggttctccagacagagcaggatgccattagggatctgaagatatactccaagcaccttcagcggggaagcaatccctgcgcccacagcaacggagcctgtgagcagctctgcctgtttaacggaaccagtgccgtctgcgcctgtgcccatagccgtctggcttcagatggctacagctgtgagccgtacgaaaacttcctgctgtttagctatcgaagcaacattgaaagcatccacatgaccgaccatgctgataagaactggcctgttcaaatgatttccaataccagcttaatgagaaacgtaattgctattacctataactacgaggaacagctggtgtactattcggatgtccagctcagcaccattaaccaggtacactttaatggcaccggccaccgcgtcctcttggagcagcaacaacgagtggaaggcttggcctacgacattgtcaacgagcagcttttctggacctcgaataataatgcgactatccgaagcgttgaactgcgccatctctctgagcacgctgatcagaaccaagttcatgtgaagaaagtgcttagtcttcgggaggatgacaaaccgcgtggcattgcggtggagccctgtctgggcatgatatactggaccaactggaacgaggggtcgccttgcattcaacgatcatacctaacaggatacggaacagaggtgatcataaagaccgatattaaaatgccaaatgcgctgactttggacctggagcagcagaagctatactgggcggacgcccggctggacaaaattgaaaggacgaactatgatggcagcaatcgcgtggtgttggcccactccacgcccaagcacgcctttgcaatggctgtgtatggagatcttctcttctggacggactgggtacttcatgctgtggttcgagcaaacaagtacaccggcacggatgttctcttcctgcgagagcacgtgacccgtccaatgggaattgtggcagtgcagaacactagcatcaactgcgatgcgaaccagtgcaagatcctcaatgggcagtgcgaggacgtgtgtatcctgaacaagagcggccaagccacctgccattgcactcagggagtactggcacccgatggtcgtcgttgcattgctcccgtaaacacgagctgtggcttatcgcagtacaattgccattctggcgaatgcattcccttggagcttacctgcgataatgtgacccactgtgcggatggatcggacgagttccgcagctactgcatcttccgccaatgtcctgagacgcacttcatgtgccaaaaccatcggtgcattccgaaggagcacaagtgcgacggggagcagcagtgcggcgatggtagtgatgagacccccttgctctgcaagtgccagtcagaagatattgatatgcatccgtccaataacaacaccaaggaaatgccggatatgttccgctgcggaagcggagagtgcattcctcgcaagttcctctgcgacagcttgaaggattgtcgtgacttcagcgacgaaaagatgtgtgctcccattccctgcgagaagaacgatatgacgtttgtgcactgcggaaacagcactatatgcatcatgcccagatggcgctgcgacggcgatccagactgtccagatggcacggatgagttggactgcgccaaccacaccagtttaagctgcgatcccggacagttccgctgcgctagcgggaactgcattgccggctcctggcactgcgatggtgaaaaggactgtccagatggaagtgatgagattaattgccgcaccgagtgcaggcacaatcagttcgcctgcgataaaacgtgcattccagccagttggcaatgtgacgggaagagtgactgcgaggatggctcggatgagggtccacagtgcccgaatcgtccttgcagaccgcacttgttccagtgcaagagctccggtcgctgcattccccaaaagtgggtgtgcgacggagaaaaggattgtcccagtggccttggggacgagggcagtgaagacgaaggaccccaatgcgggggtgtcgctcacattccggactgcccgccacctgcccacctttgcaccagtggcctctgtatcgactctcattacgtatgcgatggagatgaggattgccccggaggtgacgatgagtatgaaggctgtgtgccagcctttcagccgcactcctgtcctggcggttcgctgatgcaccagtgtcaggatggcctctgcattttcaagaaccagacgtgcgatggcaaaccggattgcggcgatggatccgacgagacgagcagtctatgtgcgcacacccgtggatgcaatggcaccgatgacttccgctgcaaaaatggagcatgcatccatgctgatttgttgtgtgatcgaaggaacgattgcgctgacttctcggacgaagagctgtgcaatgtgaatgagtgtctgattccagatatctgcgagcacgaatgcgaggacaaggtggtcggttaccaatgccattgtcgaccgggttacaaggttcttcccaagagtccgcacctctgcacggacatcgatgagtgtgatgagcagcagccgtgctcccagacctgtataaatacttacggatcatacaagtgcctgtgcgcaaagggttatgcattggttgaccaccacacttgcaaggccaccagcaacgtatccatggagctgatcttttccaaccgttactacattcgtcaggttgacatgactggcaatggcagtattttgatcaacgagctttccaatgcagtggccctggactacgactgggatagccagtgcctgtactggtctgatgtcaccagcaccgtgggcaccatcaaacgatactgtcccaaggaaaacaaaacgcagacattgcatcaagctatgctaaagaacccggatggcctagccgtggactgggtggccaaaaatttgtactggtgcgataagggattggacactatagaagtgtcccagctggatggaaagtaccggaaagtcctaatcaacgagtatttacgggagccgcgtggcattgccctgcacccatatcagcaacacatcttctggtcagattggggggacagtccgcacattggcaaggctggcatggatggctccaatccaaagatgattattcgcgacggtttgggttggccaaacgccttgaccattagctttgagacgcaacagttgttttggggtgatgccagggaagatacgatatcggtgagtgatttggatggaaatcatacgcgattgctactggcaaggagcattaatcccctgttgaatctgcaccacatatttgccattgccgtgtgggagggtcacatctactggtctgattgggagaccaagtccattgagtactgcagtatattcaatggacaaaactgcaccacgttgattacgacaatccatcgaccgatggacctacgtgtctttcatccctaccgacagcagcagccgatgagcgggaatccgtgcctggctgccaactgttccactctgtgcgttctgtcgccggaggaaccgtactacaagtgcatgtgtcccacaaactttatcttggcggacgatggtcggacttgtcgggccaattgtacggcagcgcatttcgagtgcgttaacacttacaagtgcattcccttttactggcgctgtgatacacaggacgattgtggcgatggcagcgatgagccagagacctgtccgccctttcactgtgagccaggacaataccagtgtgccaacaaaaagtgcacccacccatcgaacctttgtgatggcatcaaccagtgtggcgacggttctgatgaacttaattgcgacaagttcacctgtttcgacaaccacatgaagtgcggagcaacggctaattcgagtgcgttctgcgtggacaatgtaaagcgatgcgatggtgttaaggactgtccgggcggagaagacgaatccgcgtgcacgccgctcgtctgcaagaaggatcagttccaatgcggcaacaaccgctgcatgccctttgtgtgggtgtgcgatggggacatcgattgtccggacaagtccgacgaggctaactgtgataatgtctcttgcgggcccaatgatttccaatgcgattcgggtcggtgtattccactggcttggcgctgtgacgatgaccacgattgccccaatggcgaggacgagccagccagctgctttagctcaaaggccacctgtgatccaacctactttaagtgcaacaattccaagtgcattcccggccgttggcgctgcgactacgagaacgattgcggtgatggaagtgacgagctaaactgccagatgcgcaactgttcggagagcgagttccgctgcggaacgggcaagtgcatcaagcacaactatcgctgcgatggagagatccactgcgacgacaacagcgacgagatcaattgcaatatcacctgcaaggagaatcagttcaagtgcgccgcctttaacacgtgcatcaacaagcaatacaaatgcgatggtgatgatgactgccctgatgggtctgacgaggtgaactgtacttgccattcggatcactttagctgcggaaacggcaagtgcatcatgtcccgctggaagtgcgatggatgggatgactgcttggacggcagtgacgagagcttggagacctgtgccaaaacccattgccatgcaaacgcctttaagtgccgcaaccaactgtgtgtccgcaactcggcgctctgtgacggcatcaatgattgtggggagaacgaggatgaatctgatgctgtgtgtgcggcgctgcccaagtgccgacacgatcaattccaatgcgaaaacgacgattgtatctcgaaggccttccgctgcgatggacagtacaactgcgtcgacggatccgatgagatgaactgccagccgccagtttgcggtttcggaagctgttcccaaatttgcattgagaagaaggcaggccactacaattgtaagtgcgcagatggctatcacaaggggccggagaagaatgcaacttgcctagcatccggaccggatcagatcctcttgctggcctcggagcaggagttccggtttattctccctgccaagcaggagggtaccaccgtagttggtttcttccagacggatagcctcaagatagacgttttcgacatactgattaggcccaaggatacgctgctcttctggattgactcgcaccacggcaaggttcacaccatgaagatcgccacaccgcatgttgagggtacgggagtaagggtgcgccgtgatctcaaggagcttactgcatttaatattcccgagttggatgaccctaaatcgttggccgtggactggatatctcagcgtgtgtacatcattgattcgaggcataatcaaattctggccaccgatattgagggtaaaaagtacatctctctcgtgtcgacgggcatgaatcctacggatattgtcctggagccggaatcacgcattatgatctggtccaccttggagaatggtattctggtggcctctctggacggcagcaacaaaaagagtttggtggagcgtgacgtgggctggccaattagtttgtcaatggactacccgacaggccgtttgtactgggctgactatcgaaagggaacgatcgaaacgtgccgtctcaatggtaaggatcgcaacgtggtgaggcgttttggaaatcgagagaaaccccagaagatcgacgtcttcgaggactatctgtatatcaagctctacgatcagagtatcattaagatgaacaagtttggtaacgacaacggcacgtacttgctgaagggctatcgctcgtctgacattggcattcttcatccaatgaagcagaataggaatataagtaatccttgcgccaaggatccgtgcaagtcatctcgcgccctctgcattctctcctcggagtcttccgttgggtacagttgcaagtgcgccgaaggctatgtgatgaccgatgatggggtttgcaaggcgcacgcggatatacccgactattgtcctctgcagtgtaacctgggtacttgcaagatcgtggatcacgtgcccaagtgcatctgccagccgcagtttgagggcgagctttgtgagcactatcggtgctccggctactgtcagaactacggagtgtgctctgttgcgcccgcgttgccaggatctcaggaaccgccacccttaaaatgcacctgtacagcaggatggtcgggggcacgttgcgagacctctatgcctgcttgccagagtcgctgccacaatggaggatcttgcctgatctccgaaacggaaggcatgaagtgtagctgtcccaaaatgtttactggcgagcaatgcgagcactgtaggaatctaacctgtgaaaatggcggtatttgcagggaaacgctaacgggcaccccacaatgcgagtgtccggatggcttcaccggcaagcgatgcgagatcgacgagtgcgccgatttttgcaagaatggcggatcctgtgtgatcagcacaaagggtcaacggcaatgcaagtgccccagtggctacttcggtgagcattgtgagtccaattcatgccgcgacttctgccgcaacggaggaacttgctcggagagaggtggtcgattaagttgcacttgtccgccgcgttacatcggcgagagttgcgaatcggatctatgcaaaacctccagcccaccgcacttttgtgacaacaccaaggtaccgaccagggatccctgcacgttaatgatatgccagaatgcgggaacctgtcacattatcaagggcgtagcactctgcaattgcacggaccagtggaatggagatttatgcaccttgcccgttacggatgacaatccctgcgcccggtattgtgcgaatggtggcgtctgtcacctggacgagtatagattgccacattgcagttgcattggagagtggcagggcaatgcctgtgagatgccgcctcactgcgtcggaggagagtgcaacgtctgccgtccgggcagctccattaacgagtgtttgtgtgagaacaacagggtggtgccgtgtctgtcggacagtgccgatgccctaaaggaagaacaggagcccacggaatcgggcggcgtgttctctgtcgtggttttggtcctggcggtgatccttctcgtttttgccttgttcgctggtgcagtttacttccttaagaaacatcgcatagcccagccattctcccatgctcgattgacggacaacgtggagattatgctcaccaatgccatgtatcgcggggatgcagatgaggcgccaacattcgccagtgaagatgacaagggtaactttgcgaatccggtgtacgaatccatgtacgcggatgccattccggagccagtgagcactgaaataacacacagcacggctccggacgagcgaaagggtctgctgcagcacacgcacgacgagaatcacacgccggacatcctctga

SEQ ID NO: 4905 - protein, 4601 aa, DROSOPHILA
MPPCHPLTTASFASRPGPNGDTPKCRAFEGQCRNGDCLELSRFCDGRWDCDNDELQCDKQNAACAALNCSFNCKLTPQGARCYCPKDQVPESSNSTRCVDYDECSEPGTCDQVCRNTPGSYECSCVSGYAKTKGNRCRAINVPPTEPTTLIFLSRDGVQSVGTNGTEVIGPPGAKDNDKVTDKDGVGSEEELLLSQPLRFVHAFEVWHRNRTLCSLLFSWPELQMRCQRVDDARVNWTLPFSSFVSPQQFFTELRLDWLSGNWYLVSEDDGLVYLCTNAMTYCRVILQQVDPLSSLDLDPTKGFMFYTDWTPSLSRSLLDGSNRTVLVTDQVYHPSSVTLDLANELVYWIDIYKDEVNRVDYEGRNRWTLKRPLDSPVPLKTIHAVEVFENSIYLAAWMDTAIVALDKFSLKTHILQSNVSRGANLRIFHRQKQPEVAHPCRDNNAGCNQICVPQWTKGFASAKCMCTAGYKLHNQTTCLLSALDKFLVYSDKHLARISGIPLDTEQVQQLEQIGEQPDVMVPVYNVSKTLAIDVNVRGKAVFYVVADSGASPFGNGEPSCSIRSQSLNGSVSRLLAQGLKRVHAVAFDWINDHLYWTSHKKMQVAPLRNLSKVLTFNTDCDAMSLELDPTTGLLYWSQWESQSCEAGIYSSWMDGTHKELLAKGTSSMPMQWPRSLDVDRRTKELYWCDIRLSTIELMRLDGTGREVLFKSDQFHPYSIVQNNGLIYWADNKNSTILRFHAHQANLSSTFSSTVHLQRTGRAADLRIFDIASQPLPQTPSACAQSKCPGMCLNTPKGAICRCPDGFTLNGTGSHCIPQLAPSPIRPNCTSGYMCRSTRQCLDTKDMCDGFEDCEDGIDESSDPKGPCNVNTCDKTHNFVCNGRCYQRSLLCSTIPYCSDGTDQANCHQNTCNSNEFTCHKSGRCIQLTWVNDGVVDCGPDDDSDETSETIFASKCPEFDCNNGRCRQFADVCDGIDNCGNNADEMECEQECEHGEKYCRPIGCYGEMHMCDGIHDCLDFSDEANCNQTKSDNHPVTEWKELGECAPLEFACMFPFECIPDFLRCDGISHCFDKTDEFNCTHINTTRFDMNETVICEHPDRLCGFSKQCVTVDQLCDGKNDCEDTTDEGFLCADKLCDRGHECSHRCHNTPEGYICSCPDHLYLQPNGKRCSMQHACDHWDTCSQVCESSGKGYDCRCLDGFDLGFDRFTCKSTAPDEPYVIFTNRQDIKGINLKTLNVGNFYSSLRNIIALDFLYNNESNVEIYWTDVIDDKIYRGHLVGESLRNVEAVIHSGLSTTEGLAVDWVGKNLYWIDSNLDQIEVAKLNGSFRRTLIAGNMESPRAIALDPREGLLFWTDWDDNSPRIERASMSGDGRRMISTSWQLSAGWPNGLTLDYTQKRVYWVDAKSDSISSTMYDGSEHHVVLRNKEILSHPFAISVFENYVYWTDWRTTSVIRANKWNGSDVQVLQRTQSQPFGIQVLHSSRQPWDRNPCGENNGGCSHLCLLSGRGTFKCECPHVMRLDPANERNCVPNEQVLLFVMVDEIRGIDLHQPNHHTIPTIRQSPRRIDFLVDESRIFWSDIQQNEISSAGISNGLIEPIINTNIEKPYGFAVDWIARNMYFSSGQIKCNILASNLKGEFASIIHEDLNMVDSIVLDPANGKMYWIHSASDGSMSQLEQSNLDGSSRSLIYQHENNLQSLTMDFDSQRLYYAYDNSGIAYYDIPRNETRKVLVASPITSISSLTVYNGTLYFPENIQSVIMQCEKEACSNMSYLRVNTKSIQSMKMFYADAQTGSNTCAEWAYRGGCQQLCLATSSIDHVCRCALGYDVEPNNPTGCVPRAEFIFYSIDVLQGVEMIDPSEQFDTPSPALVPISRVSSASFIDYLANTDTLYWGDNELGSISRVKRDGTQRETILEALNLVGYKQQDWLGGIAIDWVAGNIYWSDTKRNIIEVARLDGSHRYVVVSNLEKPTALAVDPLQGLLFYVTQQHIGRVGLDGSQPFVLVNQTRANWAVGSLVLDIEATKVYWCERYPDALMKVDYDGNLREQLLNESLNNPVALAKMGDYLYWAENKYNEGIIRVAPLANLSQSKVVLQTEQDAIRDLKIYSKHLQRGSNPCAHSNGACEQLCLFNGTSAVCACAHSRLASDGYSCEPYENFLLFSYRSNIESIHMTDHADKNWPVQMISNTSLMRNVIAITYNYEEQLVYYSDVQLSTINQVHFNGTGHRVLLEQQQRVEGLAYDIVNEQLFWTSNNNATIRSVELRHLSEHADQNQVHVKKVLSLREDDKPRGIAVEPCLGMIYWTNWNEGSPCIQRSYLTGYGTEVIIKTDIKMPNALTLDLEQQKLYWADARLDKIERTNYDGSNRVVLAHSTPKHAFAMAVYGDLLFWTDWVLHAVVRANKYTGTDVLFLREHVTRPMGIVAVQNTSINCDANQCKILNGQCEDVCILNKSGQATCHCTQGVLAPDGRRCIAPVNTSCGLSQYNCHSGECIPLELTCDNVTHCADGSDEFRSYCIFRQCPETHFMCQNHRCIPKEHKCDGEQQCGDGSDETPLLCKCQSEDIDMHPSNNNTKEMPDMFRCGSGECIPRKFLCDSLKDCRDFSDEKMCAPIPCEKNDMTFVHCGNSTICIMPRWRCDGDPDCPDGTDELDCANHTSLSCDPGQFRCASGNCIAGSWHCDGEKDCPDGSDEINCRTECRHNQFACDKTCIPASWQCDGKSDCEDGSDEGPQCPNRPCRPHLFQCKSSGRCIPQKWVCDGEKDCPSGLGDEGSEDEGPQCGGVAHIPDCPPPAHLCTSGLCIDSHYVCDGDEDCPGGDDEYEGCVPAFQPHSCPGGSLMHQCQDGLCIFKNQTCDGKPDCGDGSDETSSLCAHTRGCNGTDDFRCKNGACIHADLLCDRRNDCADFSDEELCNVNECLIPDICEHECEDKVVGYQCHCRPGYKVLPKSPHLCTDIDECDEQQPCSQTCINTYGSYKCLCAKGYALVDHHTCKATSNVSMELIFSNRYYIRQVDMTGNGSILINELSNAVALDYDWDSQCLYWSDVTSTVGTIKRYCPKENKTQTLHQAMLKNPDGLAVDWVAKNLYWCDKGLDTIEVSQLDGKYRKVLINEYLREPRGIALHPYQQHIFWSDWGDSPHIGKAGMDGSNPKMIIRDGLGWPNALTISFETQQLFWGDAREDTISVSDLDGNHTRLLLARSINPLLNLHHIFAIAVWEGHIYWSDWETKSIEYCSIFNGQNCTTLITTIHRPMDLRVFHPYRQQQPMSGNPCLAANCSTLCVLSPEEPYYKCMCPTNFILADDGRTCRANCTAAHFECVNTYKCIPFYWRCDTQDDCGDGSDEPETCPPFHCEPGQYQCANKKCTHPSNLCDGINQCGDGSDELNCDKFTCFDNHMKCGATANSSAFCVDNVKRCDGVKDCPGGEDESACTPLVCKKDQFQCGNNRCMPFVWVCDGDIDCPDKSDEANCDNVSCGPNDFQCDSGRCIPLAWRCDDDHDCPNGEDEPASCFSSKATCDPTYFKCNNSKCIPGRWRCDYENDCGDGSDELNCQMRNCSESEFRCGTGKCIKHNYRCDGEIHCDDNSDEINCNITCKENQFKCAAFNTCINKQYKCDGDDDCPDGSDEVNCTCHSDHFSCGNGKCIMSRWKCDGWDDCLDGSDESLETCAKTHCHANAFKCRNQLCVRNSALCDGINDCGENEDESDAVCAALPKCRHDQFQCENDDCISKAFRCDGQYNCVDGSDEMNCQPPVCGFGSCSQICIEKKAGHYNCKCADGYHKGPEKNATCLASGPDQILLLASEQEFRFILPAKQEGTTVVGFFQTDSLKIDVFDILIRPKDTLLFWIDSHHGKVHTMKIATPHVEGTGVRVRRDLKELTAFNIPELDDPKSLAVDWISQRVYIIDSRHNQILATDIEGKKYISLVSTGMNPTDIVLEPESRIMIWSTLENGILVASLDGSNKKSLVERDVGWPISLSMDYPTGRLYWADYRKGTIETCRLNGKDRNVVRRFGNREKPQKIDVFEDYLYIKLYDQSIIKMNKFGNDNGTYLLKGYRSSDIGILHPMKQNRNISNPCAKDPCKSSRALCILSSESSVGYSCKCAEGYVMTDDGVCKAHADIPDYCPLQCNLGTCKIVDHVPKCICQPQFEGELCEHYRCSGYCQNYGVCSVAPALPGSQEPPPLKCTCTAGWSGARCETSMPACQSRCHNGGSCLISETEGMKCSCPKMFTGEQCEHCRNLTCENGGICRETLTGTPQCECPDGFTGKRCEIDECADFCKNGGSCVISTKGQRQCKCPSGYFGEHCESNSCRDFCRNGGTCSERGGRLSCTCPPRYIGESCESDLCKTSSPPHFCDNTKVPTRDPCTLMICQNAGTCHIIKGVALCNCTDQWNGDLCTLPVTDDNPCARYCANGGVCHLDEYRLPHCSCIGEWQGNACEMPPHCVGGECNVCRPGSSINECLCENNRVVPCLSDSADALKEEQEPTESGGVFSVVVLVLAVILLVFALFAGAVYFLKKHRIAQPFSHARLTDNVEIMLTNAMYRGDADEAPTFASEDDKGNFANPVYESMYADAIPEPVSTEITHSTAPDERKGLLQHTHDENHTPDIL

SEQ ID NO: 4906 - DNA, 3131 bp, DROSOPHILA
agaactgctaagaattcaattgacttttgtattatccatcccagccacacacttgttgatttaagttacccacttttcacttatttttccccactaagacacttgtcttccgtcagctctcaaatttaagcttcacagctggcagccattgtgagacgcaaaaaaagaaaaaaagaaaaaaaaaaaagctgtggagctgaagaacataaaattacccaacatatccacgaagcttatagtatgttccaatttcttgtgggcgcgcgctgatggcctcaagtatttgcaaaataataagcagtaagctaaatttcggaagaattgggcgctggtacaataacaataatacgagagcagaaaaccacgagaaaagcataaaaagcatacaaaaacaacaaaaaaaaaccgacatgaacaaacaaggagtaattgtatgcccgtctctttccacgcccacatagccgtctctttcttcttggtggtttatgggcaaaacacatttattcgtattattcgtgtgcatgtgcgtatgatacgtattatatacatgagtcacgtcgagcatatcaacatcaatggtcacaaagcgcatcatatcaatgtacataagtacagtttgtcctcggggaaacggacaggatgtacgttaaatgaataaataactttggttgagattcttacagcaatttaaggcactaatgtttctgacgactcaaaataagtgggaaatttttaagttattaaataagtttttacactgcaattgccttttggcaacccactgtctccagtcgcctctctcgcttccgcttttgtctctttctaatgcttctttatttgtcagaagacgaatgtcaccatcacgcatatttctcgtttctttttttttcactcccgctttttgcgcctccctggcgtttcgatggagaaatgaaggagcaacaatgtttctcatactcacatacatacatacatacatacaaccatttccaaggatatgatgtgtgcatatgtatgtgagtacgcaactgaaagaacatgtgaacaatataggtgggttcctaaatgtatgcgccacatagtctcgccgtattgctttcgagatgataaacttcttaccaagcgtattttgcattcaaagggagttcgccagaaactcgactatcagatacctgttactcggactttttatgcgctcgaattgttgatggatttcgatggtcgaggtctccgatttggattggcaatgggaatgagtactgcaaatggaaagggactcggaatggggcagcttgatggcttttggcttttggcttttgccttttgccttttgacttgcgtagtccttcaacttgttgctttttattgcagcccgtgcgacggcggtgggtcatgcccatttcatttctgagcgtaactttaacccttcaaccttggagcaacaacaaaagcaatcaagctaaccgattcagtgcactcgaatggtgcccgttaaattaaagtcttgcccttttttttttctttccaaattgtcttgctgccccagaccgcaaataaattgaaagtgcctttggaatatttttcatgcaataaccatagccgggaatatattaaattggcgatcccgaggatcaacagagagtgttggaaaaaaaaaaacgttgaaagtcctgtctaggccggaatgggtggattcagtggattcaagtggattctagtggattcccccacccccctccaatcgcggtttccagtctaacccctgttgcgcctgcgctgggcgcgcctgcgagcggcagcagcacgtctcctgcgtgcggcacgacgcctcctgcgagcggcacgcctccttctggcggcagccttcttcttggatgaactgctggagctagaggacgagctgctggaactggtggacgaatcgctgctgctgctgctggcctcggtggtgtccgaggatgaggaggaggtgctggccgaggttgtcgaagtgcttgagcccgtagcggtggtcgactcggtgctggtgctggtttccgtggtggggctggtgcccgtagcgctgtacagggcacagatcagtacgactgctaatagcagccagtggagcttcatattgagtcaaagttaatcgaaagactggatggtctaatccaggcgccgtttaccctatttataggtgccaatgggcctctctgcgtcattgaggcctaacaatattaacaaaacaaaacaacatacgttagaacgaattcggatttttttgtttgtttttcattttttttcaattatttttttttttttttatttcggtgacactcgctctttaacagctacaatatttgcacaaatgccgaatatttgcccagccaaaagtcgcaattatattaggcaagccatattacgctagccaacatatttcgcattgcccgcttactatttactaattttgttctacggggaatcttcattcatcgatttcattgttcattgatcaaatttcattgtgagcaggtgaacatctatctgccaatgttgggtctgacttcaaagcaataggcgttgtcaaacaaaaaggcaaatttacgcggcattgaatgtgaactttgtttgaaattcaacaatgttatattagacgaatgaaacgtttcgaggtgccaccacatgtgttttaatattctctttgaagattaaatattggtctttaaatatttatatacacaaacatccaccaattaagttaacggagttccaattgaaaccaatcaatatagtcttaaaaacgttttaaaaactatcgatttcagaaacataaaagttaacttaagctgttgcaaaaaaaaaaaaaaattgagactcattcaactttatctgaacatttcggtgcgcttgccattttttttcccagatttataaaatactctgaagtaaacaattaaatatttagctacagctcttaatagcttcgttcgcgtttgctttttgctttttatgcgcatgttagtaagtgttccttgcaaaatcgatggaaacggaaacggaaatgaaaatattgtagaaatggaaaaatgacactctacattgcctgtactcaactcgtcactgcaactttaactttaacgataacgaac

SEQ ID NO: 4907 - DNA, 678 bp, DROSOPHILA
atgtgtgcatatgtatgtgagtacgcaactgaaagaacatgtgaacaatataggtgggttcctaaatgtatgcgccacatagtctcgccgtattgctttcgagatgataaacttcttaccaagcgtattttgcattcaaagggagttcgccagaaactcgactatcagatacctgttactcggactttttatgcgctcgaattgttgatggatttcgatggtcgaggtctccgatttggattggcaatgggaatgagtactgcaaatggaaagggactcggaatggggcagcttgatggcttttggcttttggcttttgccttttgccttttgacttgcgtagtccttcaacttgttgctttttattgcagcccgtgcgacggcgcggcacgcctccttctggcggcagccttcttcttggatgaactgctggagctagaggacgagctgctggaactggtggacgaatcgctgctgctgctgctggcctcggtggtgtccgaggatgaggaggaggtgctggccgaggttgtcgaagtgcttgagcccgtagcggtggtcgactcggtgctggtgctggtttccgtggtggggctggtgcccgtagcgctgtacagggcacagatcagtacgactgctaatagcagccagtggagcttcatattgagtcaaagttaa

SEQ ID NO: 4908 - protein, 225 aa, DROSOPHILA
MCAYVCEYATERTCEQYRWVPKCMRHIVSPYCFRDDKLLTKRILHSKGVRQKLDYQIPVTRTFYALELLMDFDGRGLRFGLAMGMSTANGKGLGMGQLDGFWLLAFAFCLLTCVVLQLVAFYCSPCDGAARLLLAAAFFLDELLELEDELLELVDESLLLLLASVVSEDEEEVLAEVVEVLEPVAVVDSVLVLVSVVGLVPVALYRAQISTTANSSQWSFILSQS

SEQ ID NO: 4909 - DNA, 3095 bp, DROSOPHILA
aactatgccagcattcgaaattaaaaacaagaaatgtttctcgactattagagtgtgtgttttacccagcaagtgtgaatgcgtactccaaataataaaattaacgaaacaaaataaactaaaaacaatgcttcaaaaatgtgggcttggcggttttgggatgttttagggcattagagtgggccttttaaaaaagttttttggcaaatatatataaattacaagactaataaaattatgacaaaatatccaaaatttttaaaaaaaagtgggagtggcagctttaggcgcttttagggcgttagagtggacgtggcaaccaatttatttttgcaaaacgatagaaatttacaagactaataataatgtaaaaaattaattaattaataattataaaaaaattaatgtaaaatataattttatagttcctgaatcttgacgttcatacggacagacggacatggccagatcgactcggctattgatcctgatcaagaatataaatactttatatggtcagaaacgctcccccccactgcctgttactttttaacgaatctagtatgcccttatactctacgagtaacgggttattaaaaaagggttattatttgcatttcaaataattcaaatactgaaagctaatataatttccaaaagaaaaatactaaagcctcaatgcatttatatacaaacgcgtagctcttatttgtttacgactcgttcagttgtcaatagcaacgcaacgcatagtaagaaagtattactttgttacaatcgcaataagatggaagaacttcaaaaagttggtgtgtttatagatgaaatttacacggtgcgagttgagcatccaaacctttccagtagcaaaataatgtttaaacaagaatgcttcaactacattaaagcattcactatttttaaaaagtttgtgtttaattattgtaatatttctgaaacgtttgccaaagatgtcgataaggaaaaactacgcgctattggtactcaaaatcaattaaaaacggcatttattcagcgccagaacaagcagcaagtctatcaatatgagatatttgagcaaacagtagaacttgaacgcttaaaaggcgaattgcagtttttacagcgaattgaaacggagcaacatgaaataataaacaatttttttgtcaatcaatattaaaattaaatctacgtatttgtagacgtttttcttattttgttgatattcttacgataacatgtaagactacataatggaacatttgttgttgaacaattatatgtcttgcgattttcacaaccgcttacaaagcacacctgtgaaggaggaggtgtacgagggagttgaacttttaaaggatattcgtaacctgggggaactattacatagttgccagttacagcacttatataggttatttttggataagagggctgttgtaaagacttattgcgaattgaaatccgatccctgttggttgcctgtttttttaacaaccgctccattgtctttaatttatctttttctctgcgttcgtcagcttgttgttttcgtttttgagatttcagaagagctttatgaatttcctccgcagtctgcggcttttccttttctttataaccacttggaagagcaattagctcttctataaatccatttatttcggagtcctgtgtccgttcataaatagcacgttgacgtgctgtcataagtttggggtcctttatctttttaagttcctcatcaacaacgtctagtttcccggtttctatggcggtaagccaccgatcctcttcactggacgtatcactgttgcgtcgtcttttaccttttttagcacccgtgtgaggcaaactgtcatcatgtgccaatttttttgtgctaatatttctcgtgcgtctaagaggatgttcatgaatatttgaattagatgcaagcgcatctgtagtgtaatgaagttctttaggtctcaacgaatttgaaatagactcagcagataagtactctgcatccttagaacctatgaataaaaaatgttactttttaagatgtaacgtttggtgattgatataaattaccttctttcaccatttcaattgaaatacactcgtcctgtagcagcggccaatatttttgtttgttatgcttaattttttcaaatgtccaaaaattgcattggtcatacatccactacgatgcttatagcctaattccacaaatgacatccttattaaacggctgggaaaatcgtgcaatctctctggccacatagtataatgattttaaacttataatgattataattataataataataattataataataatactaaaaaaaatttgaattgtgcacaatatatttttgtattccccttcctaaatgcatttaagcaattcacagaatacatagcaaaaccatggttagcggttgtgttgaaccgataaccgatgaaactgaatagtaactaaatatcgttcctgatgtcgagactccaatctatgtgcacttatgcacgcgaattcaaattctgcatgaaaagcgcataagttgataaatgaataatggataaagtttaataaaattacaaattatttgaatttttggtcgggtaatgtttaatgttttttatgttagtgtcattacaatcgatatgttcgattattttactaaactttatatatatatatactatactatactatatatatactgtttgtcaagaaactgtttacacaccgtgaaataagttgaatttttaactttaaaggtcaaaattaagggttatttgtttaattaaacgcaatttttttatgaaatataattaaacaatatttattttacttataaattaaaaaacaaattcaaaatatcaaatatacaagaaaataaacaacaaatttcaagtttacacacttttgagagtgtaaagaaactatttacacaaaacactaaacctaagtttaatcataaattttttaattattttgttaatatttgaaaatttttagtatttagtatgacccccattggctttggctacaagttgaagcctttttttcatggaatggatgagtttttttaggtcat

SEQ ID NO: 4910 - DNA, 1037 bp, DROSOPHILA
atggtgaaagaaggttctaaggatgcagagtacttatctgctgagtctatttcaaattcgttgagacctaaagaacttcattacactacagatgcgcttgcatctaattcaaatattcatgaacatcctcttagacgcacgagaaatattagcacaaaaaaattggcacatgatgacagtttgcctcacacgggtgctaaaaaaggtaaaagacgacgcaacagtgatacgtccagtgaagaggatcggtggcttaccgccatagaaaccgggaaactagacgttgttgatgaggaacttaaaaagataaaggaccccaaacttatgacagcacgtcaacgtgctatttatgaacggacacaggactccgaaataaatggatttatagaagagctaattgctcttccaagtggttataaagaaaaggaaaagccgcagactgcggaggaaattcataaagctcttctgaaatctcaaaaacgaaaacaacaagctgacgaacgcagagaaaaagataaattaaagacaatggagcggttgttaaaaaaacaggcaaccaacagggatcggatttcaattcgcaataagtctttacaacagccctcttatccaaaaataacctatataagtgctgtaactggcaactatgtaatagttcccccaggttacgaatatcctttaaaagttcaactccctcgtacacctcctccttcacaggtgtgctttgtaagcggttgtgaaaatcgcaagacatataattgttcaacaacaaatgttccattatgtagtcttacatgttatcgtaagaatatcaacaaaataagaaaaacgtctacaaatacgtagatttaattttaatattgattgacaaaaaaattgtttattatttcatgttgctccgtttcaattcgctgtaaaaactgcaattcgccttttaagcgttcaagttctactgtttgctcaaatatctcatattgatagacttgctgcttgttctggcgctgaataaatgccgtttttaattgattttgagtacc

SEQ ID NO: 4911 - protein, 281 aa, DROSOPHILA
MVKEGSKDAEYLSAESISNSLRPKELHYTTDALASNSNIHEHPLRRTRNISTKKLAHDDSLPHTGAKKGKRRRNSDTSSEEDRWLTAIETGKLDVVDEELKKIKDPKLMTARQRAIYERTQDSEINGFIEELIALPSGYKEKEKPQTAEEIHKALLKSQKRKQQADERREKDKLKTMERLLKKQATNRDRISIRNKSLQQPSYPKITYISAVTGNYVIVPPGYEYPLKVQLPRTPPPSQVCFVSGCENRKTYNCSTTNVPLCSLTCYRKNINKIRKTSTNT

SEQ ID NO: 4912 - DNA, 2325 bp, DROSOPHILA
taagtaaatgctttaagcggcattgataagcagaatgaactaatatcgaaatattcattttatttgccttaagtgttttgaacggaaaaaagaaaaccaaaaagaaaaactacattttcaaaggcgtcacgatcagatcagttggtttgttgtacaagatgtggtcactaagacaggcgtcgggcacttcgggctctcctgcggcggatgcgactgttaccactgcggctactggtgctgccactgctgctactgctgctactgctgcggcgacgacgacggctgcgtgtgctggtgcgatcggtagagctttcgtcgtcgtcggccttgtgcctatagatatgtcgtatccgctttggcctataaacatgacgtgtatagtgatacgtcctcttcttctttttactctttgaggaggaggacgaagtggttgtggtagccgctgtggtagtagttgtatccgacgcagtggttgtcgtggccgaggcggaagtggtggtggtagccgaagcagaagttgaggttgtggtggccgtggagccacctgtctgtgggattagcagacaggcaacggtggccagaagtaaaagaacacaggagtagcgcatgttggatggccagtggctggacaactgatgtctgcagccagaggccgtggtcttttatactaattaccacagttaagcaattacgtaacaaaatctttcatatcttttgcgtagcgaatataaattggacatacataattgggcatttcttaaaagttatattatatatttgcacttaacttacttgactgtttgaacaattgggcacaatgaacaattgacaaacttgcgggttttttgttctgcaaaaacgctccctttgttttggccaaaactgttgacaaaaatttgcaaaagaggataaacccagttgagaagactactataaaagctggctttcgttcttcaagacagcatcagtagcaaggcatctattgtagcatttgctcaccatgaagatcaccgtggtactcgtacttctcgccaccttcctcggctgtgtgatgatccacgagtcggaggcgtccacaaccaccacgtccacctccgcctcggccactaccactacttccgcttcggcgaccaccactacttccgcttcggccaccaccaccacttccgcttcggccaccacaacaacagcctcaccttcctcgagctcaaaaaagaagactgtcactcactataagcgaaaggtcaagaggccaaagaaggtcaggaaaatcacaaggagaaggggtctcaggagccgcaatggtcgcagatccgatgaatgaaagatccacaggaccaataggaaatccactccaatcccaatgctgaacccaatgacaaccatagcacttaacttttgaatagtttataatgaaatagcaatattgttcgtttataaggcaaatatataaatcaatgaaatagtatttctcatgttgaatttctgcattttttcaaatcagtttaaaatgtttttttttttttggttgacagattgactgaatgtaaagttatcagtagttgaaaaagtttgtgttaattatatgtatttatttagtaatattacggctgatcatagttgcattttcaaaattctaagaattgtatgatctttcgctcatatatcatttaggttagtaacttttctcacttataaaatgaaagctttaataaacaatcatcccgcaaaagtgtgctacaaaaaaaaagctgtgttttgtgctgcttttgtctcttgaacaaacaaaaaatagagattaacttaaaacgtataatgcttaatttgtttaccttagcttatgtagcattcatgtttggacttcgcaaatatccgaatgcaaaaattttggtaagcaataaagattgctatgttttcgaggtcaactggcgtcgtctacaattgaatactattgtatatttgaaccattgcaaatgggttttctgtcaattgtttaaatatttgaatatttttgcttgattatatttaaatgcaaaaatgtatgcgaactttctctttcacttgttcaaagatgttttgtctatgtggcgtcgtataaatttagctggtctgtacaattattttctataataacccagtctatgaccattttggtctttcccacaagtctgtttaaataataataggctgatgataggatcatgtttttgctaaacaattgtttgattaatatttacgattaatctttacgttttaaatccattgattatttaccctttaaatccaacgattaatatttacgttttaaagccattgattaatatt

SEQ ID NO: 4913 - DNA, 325 bp, DROSOPHILA
atgaagatcaccgtggtactcgtacttctcgccaccttcctcggctgtgtgatgatccacgagtcggaggcgtccacaaccaccacgtccacctccgcctcggccactaccactacttccgcttcggcgaccaccactacttccgcttcggccaccaccaccacttccgcttcggccaccacaacaacagcctcaccttcctcgagctcaaaaaagaagactgtcactcactataagcgaaaggtcaagaggccaaagaaggtcaggaaaatcacaaggagaaggggtctcaggagccgcaatggtcgcagatccgatgaatgaa

SEQ ID NO: 4914 - protein, 107 aa, DROSOPHILA
MKITVVLVLLATFLGCVMIHESEASTTTTSTSASATTTTSASATTTTSASATTTTSASATTTTASPSSSSKKKTVTHYKRKVKRPKKVRKITRRRGLRSRNGRRSDE

SEQ ID NO: 4915 - DNA, 4444 bp, DROSOPHILA
caacccaccacccaccgacgctctacccactctcgctccatatttcttgtacgtctttcaccaatggattttcattttacgctttatacggctctaattgagtgccttccaattgggttatggattaatttttgtgcataaattaaatatccatgcacacatgtctctcaataaagctggtgtctggggcatttagaaagcaatttcaagtggggagaaccagcaaaaatgcagtaatttcatgtggaaacaatatcggccaagaaactagtagttagtcttgataacatctggttagctatcagacaaacgagatcatgtacttcctagaagaaatggtattgcgatatgactaaactgatccaatatttatgtacatacatatgtacatcacgcaagtcagcttatcttatctgatattatcttgatttttgcaaaataaagctcattgctaccaactgcgatgaatatctattattctgacctaaattgtggccgcataaggcgaaagattgtatatgtacatgtactgacttatagggagtgtcaggcttttcgtaattgcttgagtcgcacatatgggcaagaactgcataaagggtatttcttaggaaacgaaaagcatgatacttttaggtggcaccaacggttcgcgttagttttcactggtccaataagcatcacacatacatacatacatacatagcagtgtgagaggtaaacacttttaattgtttgcggcgagtgatttacctatccgcttgactcgagccacgttcccagtcaatgctcctgcggaatgactcatccattagctcatggttaactaagatattgagaatgtaatcgtcatatccaaatcgccatatccatcgtcatgcctatcatacccagacgtgtgccaagcggacccgttccgctgcagttgagtaaacaacgaatttaatatggaatgcttttcagcttttatgtagttaaactaaggagaagactttattttataaaatgcaagagtatattttgtttcttgatgttttctgctgcgcttgcggcttttgccttgctggtgtgtgttcgggtgttcaatgactttatgcataataggtaaaatacaattacaatatcaatagcatacgttatacatggattcgttattcgttataattaattttaggatcaatttcgcctcgcactcgtacattctgcttagtttttattatgattaggctttaagatacttaagtattttgcaaataccgtttgttactgtctcgatttaattcgtttgcgtgttcaattcattaggctagcaaatgtgtttcgtcaagtaatgcgtggatatatattggtaaaatactgcaactgctatgtgttatatgtacttgtatagtatgtagaaaacaaatgcaacgccgtcgctggacgattgctgtgcgaatagaagccttgtggggcggctgggcccaacaatagatatatttatgcacttttcgaattactttatgtggtaggaataagagtaggatacgctagggttttcatttgctttgttctcgagattagcgcttaagtatacgaggagcggaagggggtttggggaatgggggttttgagcgtgttgacttagaacagacccttctttttcttctccttcttgccatccacattgtccgtgctgctgttggcccccaggctgcgtcgcttgagctcctcgagcgtcacgtggttgacatcctcccactccttcttctcgcgctcgaactcgcgtctcttctcctccagctcccggatctgcagctccagcgccttcttgcgctcctcgtggcgccgcgccagctccagctccgagtccctgagcttctgcatcttctccttgaccttcatgtcaaacacctgctccatctcggcctccatcttcttcatcttctgctcgtgctcccgcttttcctcctccatctgggtgagtgggttcttgttggacagcctggccttgccgtccaccaatcccagctcggatagcttccggcagcggtagttctcgtagtggacgttgttcgtcacgtccttgaggtcctgaaggtgcgtgcgtatgaccatgttgcgcagcgctataaagtcgcaatgcgtcaggttctccacctccaccaggccccagggataacgcctaccccggaccttctttccgtcctgctcgatgatggtgttggcacccaccaccgcgaatggcactcggctgcgcaaattctgcgtggttttggcctcctcggccgcatcctccagcgtggcggggaagtcgtagatcttgatcttgtgctgggcgatctcgttaaggatctgcttcttaaatagatgcacctcgtcgggcgtcatggtgtccgccttggcgatcaccggcaccagatttaccttgtccgacaggctctgcatgcaggcaatgtccagcggcaggagtccgtgtcccgatggcgctatgaagtagaggcagcagtgcacccggctgtccgaaatggtttttcggtacacccgcgactcggctgtcaggtactcctcgtacttgctatccacgtactccagtatgggcacccagcagttgctgttgtcaacggcatcaccgaatccgggtgtgtccaccaccgtgagtgtcagattgacgccgttctccttgagcattactttggtggcctccacggccacggtcttctttttgcgcagcgaggggcccggatactgttccgcgttgtagatgtccgacaggaacatggagttgatcagcgtcgacttgcccagcccactggcgcccaccaccatcagagtgaactcgaatccccgcttgacggccttgcgatagacctgattgggcaggttggcgaagcccacatagccggcgatctccatgggcttctggcgcaccgggagcggtggcttctgtggcttctgcgcctgctggtgctccttctcctgcagatcgtgggtcagtttgttcgagtcgccgttggaggcgcctccgccgctggtgtccagcttgccactggcggccactggcacactgggcggctgattgggcggtcgtccaccgacgcccaccaaggactcgctgccgctgctgccgttcgtggcagaggacgccgatgccgacgcagcctgctgcttgtcgcgcagagccagttgggccagagtgctgggcagagcggagatggcgccgccgctgccgccattaaccgcgttcgagcgaggactattcattggaatagcgccaaattcgcctttgagccttcgatattcgttcgcaggtgggcttcactgtatttattcactttgcttgcacagaaccgttgctttttcaccgcttttgtcacgcctacgccagctcttttacgctcttacttttcttgcattttctgtgtcagtaggaccgtgcgctgcaacgcgataaatacttctgctccgctctcgcaggcaacaacaacgccccagctcaggcgcagtgtgaccctggaaaataccggacgagagccgcgaatataccaaacgacgcttggagtgagagcgcatgagtaatgcgacacatacacacagagatacacgcacccatactgccgcagcaatgcacatgcaaacgggcaaagagaactattttctggtggccttatcacttgaaatggaatgttatgtttaaaaataggcaatgaaacgcattcatgtgtcccagcacttgggattccagatttctggcctgaatgactgcactggagtggccacggatcgcattacaatcgcccgctgatgcacaggaagaaattatccgtctagatgactttgacttttgccttaagcaggggtggattactgaggggttttttgactacatatcgaactatatttattttaaaacattttcagtttatgtttgtccatttttatagggaattaatttctatggtacaccataacgggtttttaaataaaattgttcactacgcccatgacttttgtggttacgggttccctttaatttttgttgcaatgttgcgcatgcccgtgagagcagcagaaggagcagagaaagaagaagaggaagctgagcttatctctctcgctgagaactaaagatgcttctgtcgcgtgggtgttgttattgtgacgctgagaactcgactttcgcttctctctcacacttgctataattccattcgactctgtttggaaagaggttagtgagctaactaacgccccttgtgggcgtgtgagaagtgccataaaaaggagctggataataactggcctctgtcgtttgacccgcttcatgctcgagtgtcctcgtcgaaagttcccacacacgcctcgtcctggcaccctctctaccccaccctctacgcgtcatcgcatgccgatgcatacacgcacacggacaaagcccgttgattgtgcgctctgcgtttcggtt

SEQ ID NO: 4916 - DNA, 2444 bp, DROSOPHILA
agcagaagtatttatcgcgttgcagcgcacggtcctactgacacagaaaatgcaagaaaagtaagagcgtaaaagagctggcgtaggcgtgacaaaagcggtgaaaaagcaacggttctgtgcaagcaaagtgaataaatacagtgaagcccacctgcgaacgaatatcgaaggctcaaaggcgaatttggcgctattccaatgaatagtcctcgctcgaacgcggttaatggcggcagcggcggcgccatctccgctctgcccagcactctggcccaactggctctgcgcgacaagcagcaggctgcgtcggcatcggcgtcctctgccacgaacggcagcagcggcagcgagtccttggtgggcgtcggtggacgaccgcccaatcagccgcccagtgtgccagtggccgccagtggcaagctggacaccagcggcggaggcgcctccaacggcgactcgaacaaactgacccacgatctgcaggagaaggagcaccagcaggcgcagaagccacagaagccaccgctcccggtgcgccagaagcccatggagatcgccggctatgtgggcttcgccaacctgcccaatcaggtctatcgcaaggccgtcaagcggggattcgagttcactctgatggtggtgggcgccagtgggctgggcaagtcgacgctgatcaactccatgttcctgtcggacatctacaacgcggaacagtatccgggcccctcgctgcgcaaaaagaagaccgtggccgtggaggccaccaaagtaatgctcaaggagaacggcgtcaatctgacactcacggtggtggacacacccggattcggtgatgccgttgacaacagcaactgctgggtgcccatactggagtacgtggatagcaagtacgaggagtacctgacagccgagtcgcgggtgtaccgaaaaaccatttcggacagccgggtgcactgctgcctctacttcatagcgccatcgggacacggactcctgccgctggacattgcctgcatgcagagcctgtcggacaaggtaaatctggtgccggtgatcgccaaggcggacaccatgacgcccgacgaggtgcatctatttaagaagcagatccttaacgagatcgcccagcacaagatcaagatctacgacttccccgccacgctggaggatgcggccgaggaggccaaaaccacgcagaatttgcgcagccgagtgccattcgcggtggtgggtgccaacaccatcatcgagcaggacggaaagaaggtccggggtaggcgttatccctggggcctggtggaggtggagaacctgacgcattgcgactttatagcgctgcgcaacatggtcatacgcacgcaccttcaggacctcaaggacgtgacgaacaacgtccactacgagaactaccgctgccggaagctatccgagctgggattggtggacggcaaggccaggctgtccaacaagaacccactcacccagatggaggaggaaaagcgggagcacgagcagaagatgaagaagatggaggccgagatggagcaggtgtttgacatgaaggtcaaggagaagatgcagaagctcagggactcggagctggagctggcgcggcgccacgaggagcgcaagaaggcgctggagctgcagatccgggagctggaggagaagagacgcgagttcgagcgcgagaagaaggagtgggaggatgtcaaccacgtgacgctcgaggagctcaagcgacgcagcctgggggccaacagcagcacggacaatgtggatggcaagaaggagaagaaaaagaagggtctgttctaagtcaacacgctcaaaacccccattccccaaacccccttccgctcctcgtatacttaagcgctaatctcgagaacaaagcaaatgaaaaccctagcgtatcctactcttattcctaccacataaagtaattcgaaaagtgcataaatatatctattgttgggcccagccgccccacaaggcttctattcgcacagcaatcgtccagcgacggcgttgcatttgttttctacatactatacaagtacatataacacatagcagttgcagtattttaccaatatatatccacgcattacttgacgaaacacatttgctagcctaatgaattgaacacgcaaacgaattaaatcgagacagtaacaaacggtatttgcaaaatacttaagtatcttaaagcctaatcataataaaaactaagcagaatgtacgagtgcgaggcgaaattgatcctaaaattaattataacgaataacgaatccatgtataacgtatgctattgatattgtaattgtattttacctattatgcataaagtcattgaacacccgaacacacaccagcaaggcaaaagccgcaagcgcagcagaaaacatcaagaaacaaaatatactcttgcattttat

SEQ ID NO: 4917 - protein, 539 aa, DROSOPHILA
MNSPRSNAVNGGSGGAISALPSTLAQLALRDKQQAASASASSATNGSSGSESLVGVGGRPPNQPPSVPVAASGKLDTSGGGASNGDSNKLTHDLQEKEHQQAQKPQKPPLPVRQKPMEIAGYVGFANLPNQVYRKAVKRGFEFTLMVVGASGLGKSTLINSMFLSDIYNAEQYPGPSLRKKKTVAVEATKVMLKENGVNLTLTVVDTPGFGDAVDNSNCWVPILEYVDSKYEEYLTAESRVYRKTISDSRVHCCLYFIAPSGHGLLPLDIACMQSLSDKVNLVPVIAKADTMTPDEVHLFKKQILNEIAQHKIKIYDFPATLEDAAEEAKTTQNLRSRVPFAVVGANTIIEQDGKKVRGRRYPWGLVEVENLTHCDFIALRNMVIRTHLQDLKDVTNNVHYENYRCRKLSELGLVDGKARLSNKNPLTQMEEEKREHEQKMKKMEAEMEQVFDMKVKEKMQKLRDSELELARRHEERKKALELQIRELEEKRREFEREKKEWEDVNHVTLEELKRRSLGANSSTDNVDGKKEKKKKGLF

SEQ ID NO: 4918 - DNA, 4975 bp, DROSOPHILA
tcatttaaagaaaagaaaataacgaattaaaattagatacaattttatgtcttttgagccccgttagatttcgttcatttaaatatttagaattctacacaaacaaaaaaaaattttcaataaaataatatatatatatttgcaaccaaaaaaagaatatatgtatattcatatatttaaagctaaacaagatgtatgaataagctaaacaagatacatgcataacattgtaaaacgaacaattatatttgagcacgcaacaaacatctgagccctttgctttcatttggaaatatacaatttattagagccattaaaactaatcgatctgcaccataaatacgagtagtacacgaaagctatatccgccgatcgcgagccaggccccgaaaatatcaagatatcaagcgtatttgtaaatagtcaccttcttcagtatctgcgaacacatcgatttgtccctgagctcggcgatgaaactggccgaaggggctggactcgcggatcggatggcctcttaattctatctacttgtgtatatgggtatatatgggtatataatatatctgtataatctgtataaacatgcataatgcaatgcgggataggcgggcttctagtgttcaaaaggttcaggtcgttaactctcggatatttgtacaagtttaatattcgtgtcctttgccttttgagtacggttcaaagtcttttgagaaacacatggccaaaacgggtcgttatggatactaaatatatgaatatcgctaataatatcaagttaaagttgagagggagagggagagatgagcactcgcacaatttgaatctttggcaagaccgcacatactgatcacaagaatcgtttcgatttagttagttcgtaatgctacaactagactacaagctaggcgtcctcgctcgcttaaaatttggctaattgtggagcagagactcgggtacatcgggtatatcataggaatacgttacacatggctgacaacatcgaatccctgtcgttaagtactctaagttctaaattcgctgcatgttaccacaactgctttgtggcgctcgtttgttcacggtgctgcggctccctcgcttggatatagattcaccaggatggcgtaatagtgacatccggcggccagcaccacaaacagatgccaaatggcatgggccatgggtatcgtgccgtccgccttgaagaatacaatgcccagaatgtagaagccgccgccgaacttgagctgcatcataccgtggaagtggtggccagtgaacacaacgactagagcgggtcccaggcccatcaccagatagaagaacgtctccagacacttgtagcgctcgtggaagacctgttttcgccaaacaaaaggaaatttcaccttaaggagcatgtgaacacgggtgctgtaaatgaacccacctgctggtaggcaattcctatgcccgccatcagccagatgacccattccatgcagaagagtatggccgaatgatcggtgttctctagcgtgagccaggggaagtacgatccggcgatgaacacatagatcatcgccctgtcgcagcgatggagcacgttcttgagcccctgatacgtctgccagccgagacagggccaggccttgacattcttcggtggtctagtggaggtatacaaaaatgtacaaatcaaatggttaaatcagcctgtgtgcgcactcacttgtgctcggcgcaatagcaggagcagtggaagaaggtggacaccgtgaagagcatgcacagggctccgccgtagacccaagcaaccagatactggctggcgctggaggagcgttcaaacagcttgatggccgcaaaaacggcgggcagtatccaaatgccgtgagtaatcacattggccacctgctcgatctgtttttttttggatagagtaaatgtggtttaggcgtcaggtgtactgtacacatacaatgtatagaactcacctccgttggctggtaggcacagccgggcttcgccttggcattcttccacttgacattgcgcaactgcagtttgagattggaattcgacttgatgatagacttccagaacttgctgaagagattctcgaggaaggcgtacttatgctgcagatcctgcatcagactgaggtctccattgccgtttccattcgcattgcgattcagtgtacggattccactttcgtggccgcttccttcgctgttgctcatcgtggatagactgtggattagattgtgaattggttgtccgatttgccaaattgattgattgccactcgattagacagacgacgactaacccggctaacccaaacaccatccacacttcacccgttttatggccaattgattatcattcgtctctatcttcgccttttgggcctcgcctcgagtgataagccagcgcttggccagctgcaataatggttggacaatggaaatggacgagcggccggacacttgaggcattcctgcattgagactaatttatgctcattgagtttcgcacagacaacttgcatacaatggcccaaggttgggcgattttgacccgatccgcaattgaaaccagttctctgattgccggccgcttatctcgcgtgtcgagaacatggctcaaagtccgattcggatgagatgtatgtatgtacaaatgaacatatgcccatccgcgggcgcactattatgattatggcgtctctcggaatccgattgcactttcaatccaaaagaaaaggttttcattctcattacccgaagaagttataatatgattgattgtgtaaatggcaatgtttaccaattatttggtatttgaaatgcgaaaggcgagttttaagctcatcttaaagttcaattgaaatgaaaatgagctgctagaaaaaccacgcgttcgttttacataaaaaccttgagttttccttttaaattagttcatatatctagatagttaccaacgggaaaacacgatattcgattcaatgacggcgtgaatttaatgaaacattatagttttaagatctgcctgtatttgcccgcaattgagaggactcgaaactttgctggcttgtctgttctgagttatgacaacttttcaataaaccaacgatggtggaattaaaacacctcccagttcccggcgcccccaaaagtatgccccattgggcgcggtgggaggtcacggggttgaaaagcataacgaacaaaccccccacccccccttcggaatttatcaccataacgactatgctaagcggtataaaaatagatacctcgggcattccttatattgccaattacaaaacagcgggcggggagctagtgcactgcgagaaaatgtctggactgcaaatcgcaaggtattccatttctttttaagctttgaatttaacagttactgaatcgaatttattttctaaacaaattgtgcttaagaatcctttaaagtaattcatttcacattcatgttttttggctaatgatatttcagcttagtcttaaacctattttatcttattcaaccaatctttccatctttttttgtgccttgctttaccatgttatttttctcagtgcacaggaagattgtttacatctcccattcagaatcaatcgccgcactaatccaatttgtagcgctgccgtcacgcaattcgcccctacaacctgaccgtccacctacacaagtattttccatcccaatcacagctgctgccccccccccccccggaaaatccaaaaaaaaatgcaggtggaaaactcaccgtttttttgctgccgcggatgtggctgcggatgctgtgcgtgggcggaagcggtggcggatgcggatgccgcgctgacgtgcggatccggggcggaagaggattcggaatcccaggcccacgcaggattctcagggacccagagcttgctgcactgcatccggggatgtgggaagattcgatttggcgtccgtcttcttatttactttccgcggactggctagtggtgggcagggcggcgatgtaacatcgatagctcgccgttgtaacggcaagccaagtcatcgatggcgcaccagcgaagtgccatctctagaaagtaagcaaataattaacgtatttataaatatttaaagtttatatctagcttatagttccactattcgaaccttcaattatggcttatttgagatcatttttaaaaatatttcacttttataaagatttttgggcagaggaagaaatcatctcatatttttagcttttatatttatctttatttattacgtttattataaaaagtgcctgcttaatttgaagctgaaataagaatcttgtgattcacatttatttcacttaaggattataggatatttaatgttgcctaattctaccaatgtttcgatgatttgtgcttaaatgttgcaaaaaacaaaaagtggaaataaataagtgaactactaaactttttagcgtacgaatttcaattcaagaagcaaataaaaaaaaaactcaattagagggagaccttttacttacgatctagatgcttcagtttatcaactaggcatatctaatgcgattaactatttccaggttggccaactccttacaaacatacagatcccgatggcgactctagtcgccgctggaagcgcagcggcctggtatgattatatatatatatatatgtatgcatttgcagttgcaatccggaatttacttcatagtccgggcattacgtaggcgatgttgtcgagcgtgtcggccagatttttgctcaactgcacattgttctccatgccgggtatttgcgtggtcatgcagagcagcggtcccatggcgcagagcaggctgtcgaggagcacggacaagctgcccgatagcgccacgtatccattgtgcttcttcagtcgctcgccaatcacagtcaggctctcgccgagcagcttcagatgtgcggccgcatcgatc

SEQ ID NO: 4919 - DNA, 1225 bp, DROSOPHILA
acggacgccaaatcgaatcttcccacatccccggatgcagtgcagcaagctctgggtccctgagaatcctgcgtgggcctgggattccgaatcctcttccgccccggatccgcacgtcagcgcggcatccgcatccgccaccgcttccgcccacgcacagcatccgcagccacatccgcggcagcaaaaaaacgtctatccacgatgagcaacagcgaaggaagcggccacgaaagtggaatccgtacactgaatcgcaatgcgaatggaaacggcaatggagacctcagtctgatgcaggatctgcagcataagtacgccttcctcgagaatctcttcagcaagttctggaagtctatcatcaagtcgaattccaatctcaaactgcagttgcgcaatgtcaagtggaagaatgccaaggcgaagcccggctgtgcctaccagccaacggagatcgagcaggtggccaatgtgattactcacggcatttggatactgcccgccgtttttgcggccatcaagctgtttgaacgctcctccagcgccagccagtatctggttgcttgggtctacggcggagccctgtgcatgctcttcacggtgtccaccttcttccactgctcctgctattgcgccgagcacaaaccaccgaagaatgtcaaggcctggccctgtctcggctggcagacgtatcaggggctcaagaacgtgctccatcgctgcgacagggcgatgatctatgtgttcatcgccggatcgtacttcccctggctcacgctagagaacaccgatcattcggccatactcttctgcatggaatgggtcatctggctgatggcgggcataggaattgcctaccagcaggtcttccacgagcgctacaagtgtctggagacgttcttctatctggtgatgggcctgggacccgctctagtcgttgtgttcactggccaccacttccacggtatgatgcagctcaagttcggcggcggcttctacattctgggcattgtattcttcaaggcggacggcacgatacccatggcccatgccatttggcatctgtttgtggtgctggccgccggatgtcactattacgccatcctggtgaatctatatccaagcgagggagccgcagcaccgtgaacaaacgagcgccacaaagcagttgtggtaacatgcagcgaatttagaacttagagtacttaacgacagggattcgatg

SEQ ID NO: 4920 - protein, 313 aa, DROSOPHILA
MSNSEGSGHESGIRTLNRNANGNGNGDLSLMQDLQHKYAFLENLFSKFWKSIIKSNSNLKLQLRNVKWKNAKAKPGCAYQPTEIEQVANVITHGIWILPAVFAAIKLFERSSSASQYLVAWVYGGALCMLFTVSTFFHCSCYCAEHKPPKNVKAWPCLGWQTYQGLKNVLHRCDRAMIYVFIAGSYFPWLTLENTDHSAILFCMEWVIWLMAGIGIAYQQVFHERYKCLETFFYLVMGLGPALVVVFTGHHFHGMMQLKFGGGFYILGIVFFKADGTIPMAHAIWHLFVVLAAGCHYYAILVNLYPSEGAAAP

SEQ ID NO: 4921 - DNA, 3573 bp, DROSOPHILA
cctgcatcccgcttctatgcgaagaaccaaggagcagccagccaaaaatcggatgacgacatggtcagcgatgagcccatcaagtttttcggcagccaggcggccacttggcgcgccaaggacacccgcagtggtggcagcgacgagaccctttggtaccaaccctacgtaatctccgccagcctggccatcttcctcctgtacttctgtgcgctgcgcgaggagagcgacatcgatctccggttggagggcaacttgtacgagcatgtcagtggtctggaggaggtgcagctgactgtcaactacaggtacaacaaggaacacggactggacaccaaggagcaggagagacggctcagggaactgggcgttgatctgggccagttggatgccaagttggccgcccagtagtcgtagggttggtttgttgtacgtttttgtttcgttaagtgaaattaaacatttttaataactagaagatgtatgtttctaccagggtaaattatttattaatcttttttaatggcttggtgatatttgcaatcaatttttggttgtttttgtttgtttaactgaaattgaatattatattggcttccttgtttaaataacccttcatttaaagtaatttaatgtaaaaatataatatgagatttcttaaataggatcggctaaaaataatcatcaaagttatagctttagtcttacaaatgcaaatcattttcctttgtataccccgatcacatagattaatatattatatacttgagtacggcatgtgcccgcctattttctttttatcacgcggcgcagaagctgaaaaggattataaactatagtataaaagtataagacttaaaaattttttatgaattcgcgccaattttttttacgtggtcggagtgtgaccatacggcagcatccttggtaatcgcgccagctgattgctatcgataggaacagctgagttcggttagcaggtgtgcacacactgtgtttgcgataagaaacgcgcaggaaaagcagaaaaaggtaaactgatcgtgaccgctatagccattgcctgtgcgtttcatgcacacatccgttgacctacggccggccccacccccaaaaccagaatccagtggaaggcggtagactccgacagcatggtgagtagacaaagaagccatatcgccattggcccccgcccatcgcaaccgactgatttgcacccaatcacgccctttcagagctacgatgatgatgactatccggcggacacgttccccaaggactttggctaccgggcctacaaccaggatggcctggaactggagcccaatgcaacgggcagcagcgagacaaagccgcgcattctgctgatgggaatgcgcagatccggcaagagctccatccaaaaagtggtcttccacaagatgtcgccgaacgagacgctcttcctggagtcgaccagtaagatcgtgaaggacgacatcaacaactccagctttgtgcagttccagatctgggacttccccggccagattgacttcttcgagccgacctttgattctgacatgatctttggaggctgtggagccctggtctttgtcatcgatgccaaggatgactacaacgaggcgctgaccaagttcaagaacacagtgctgcaggcctacaaagtgaacaagcgcatcaagttcgaggtgtttatacacaaggtaatatccatgagttgggcgcttatcgtgttgataacccagcgacacatgctcttttcccaggtggatggaattagcgacgactcgaaaatggaatcgcagcgggacatacaccagcggtcgtcggatgaccttaacgaggctggcctcgatcagatccacctgagtttccatctgacctccatatacgaccactccatcttcgaggccttctccaaggtggtgcagaagctgattccccagcttccgacgctggagaatctgctgaacatttttataccagtacacgaaacttgcattgttgtttttgaactacgcagttaattccttatccattgcagaactccggaatagaaaaagcctttctgttcgatgtggtttccaaaatttacatagccacggactcgtcaccagtcgatatgcagacgtatgagctctgctgcgatatgattgacgtggtcattgatctgtccagcatatacaggcaagctaactaatttcgatgtatttgctgctttgcctaaataaccattgctttaccgcagctccgaagaaaccgcctttgacagcgggagctctagtctcatcaagttaaacaacaacacgatactctacctgcgggaggtgaacaagttcctggccctggtctgcatcctgcgcgaggagaacttcaaccggcagggcgtcatcgactacaatttcatctgtttccgcgacgccatcagcgaggtattcgagctgcggctaaagcgccagaagcagctggagaacaacgaccaggacgacgatgatctggtcgatgagcagaccctgattcgccatggccacgacgcaggtggaatttcgcgagcgcagccaattaattaggcgcactgcatccccaagcggagagccccttttattgcccccctacgctagcttctctgtggactctttgattccaatttgtacgttctcttccgttaaatctgatgttacctttgtctattgatacgttaggacgccactctcacagagcagcgtaaaaaattgcccagcggttgaaattattgataatactaccaataaacatgtctatttttaaatacgagtgtgctcttgcctaatttatttccttaatttttgttacgttacagcgcaccagtataaaatagcaaacaaagatgttagggatcactttttgtaagtgctatactctatgatagttcattgtttttagatacttttgaaactctaagaaaagataattagttttaatcttttgagaaagcagctattcacaggacgaaagccatgatctaaaatctctccgctgagtaaagcaaactattttgatgagcgaaacaatatattgtctcggtaaatatataagaaagaaactatcttggaaacttcatacttgcttcctacacaacattcctaacccgctagagtacatagacccatctctttctccttacatcggctactccacatgttatgtttgatcaactgttttcaggaactgtagcttcagaccaggccaagattatggtgctcagtcgcttggcaatcccattagggttcagttgcgggtgaaaatagagtctttgacgtacgtgcaagacaataattggacacataacccacttcttgtttgcacaagtgaaccattctgtgttcccagttgaaagggaaaccccaataagtgcagaatgacgagtgcaagtctattgtcgcgttccctgctaacagaaggtgcataatcctcacatatatcataccaaagaccctagaatattctagtgtctttgatcataccaactatctatgagctacctaatccactgaccaattgcagctccgcgttctaagaatcgctcggtgt

SEQ ID NO: 4922 - DNA, 1315 bp, DROSOPHILA
cgataagaaacgcgcaggaaaagcagaaaaaggtaaactgatcgtgaccgctatagccattgcctgtgcgtttcatgcacacatccgttgacctacggccggccccacccccaaaaccagaatccagtggaaggcggtagactccgacagcatgagctacgatgatgatgactatccggcggacacgttccccaaggactttggctaccgggcctacaaccaggatggcctggaactggagcccaatgcaacgggcagcagcgagacaaagccgcgcattctgctgatgggaatgcgcagatccggcaagagctccatccaaaaagtggtcttccacaagatgtcgccgaacgagacgctcttcctggagtcgaccagtaagatcgtgaaggacgacatcaacaactccagctttgtgcagttccagatctgggacttccccggccagattgacttcttcgagccgacctttgattctgacatgatctttggaggctgtggagccctggtctttgtcatcgatgccaaggatgactacaacgaggcgctgaccaagttcaagaacacagtgctgcaggcctacaaagtgaacaagcgcatcaagttcgaggtgtttatacacaaggtaatatccatgagttgggcgcttatcgtgttgataacccagcgacacatgctcttttcccaggtggatggaattagcgacgactcgaaaatggaatcgcagcgggacatacaccagcggtcgtcggatgaccttaacgaggctggcctcgatcagatccacctgagtttccatctgacctccatatacgaccactccatcttcgaggccttctccaaggtggtgcagaagctgattccccagcttccgacgctggagaatctgctgaacatttttataccaaactccggaatagaaaaagcctttctgttcgatgtggtttccaaaatttacatagccacggactcgtcaccagtcgatatgcagacctccgaagaaaccgcctttgacagcgggagctctagtctcatcaagttaaacaacaacacgatactctacctgcgggaggtgaacaagttcctggccctggtctgcatcctgcgcgaggagaacttcaaccggcagggcgtcatcgactacaatttcatctgtttccgcgacgccatcagcgaggtattcgagctgcggctaaagcgccagaagcagctggagaacaacgaccaggacgacgatgatctggtcgatgagcagaccctgattcgccatggccacgacgcaggtggaatttcgcgagcgcagccaattaattag

SEQ ID NO: 4923 - protein, 387 aa, DROSOPHILA
MSYDDDDYPADTFPKDFGYRAYNQDGLELEPNATGSSETKPRILLMGMRRSGKSSIQKVVFHKMSPNETLFLESTSKIVKDDINNSSFVQFQIWDFPGQIDFFEPTFDSDMIFGGCGALVFVIDAKDDYNEALTKFKNTVLQAYKVNKRIKFEVFIHKVISMSWALIVLITQRHMLFSQVDGISDDSKMESQRDIHQRSSDDLNEAGLDQIHLSFHLTSIYDHSIFEAFSKVVQKLIPQLPTLENLLNIFIPNSGIEKAFLFDVVSKIYIATDSSPVDMQTSEETAFDSGSSSLIKLNNNTILYLREVNKFLALVCILREENFNRQGVIDYNFICFRDAISEVFELRLKRQKQLENNDQDDDDLVDEQTLIRHGHDAGGISRAQPIN

SEQ ID NO: 4924 - DNA, 14383 bp, DROSOPHILA
tccagccatgccagtctgtccgtatgaacgtcgagatctcaggaaatattgtattaaagctagaaggatgagattaagcatacagattctagagacaaagacgcagcgcaagtttttttttcacatttttgttagtcttgtaagtttctatcgatttgccaaaaaacttttcgccccgcccactcaagcccacaaaagccgccaagccggtcacgcccacgcatttgaacaatttttaaatttttttaccattttattccccaatatctttcgatacccatcccacaaaaattatgaacactagctaactaacgggtatctgatagtaggggcactcgactatagcattctctcttgttttttttctatgctttggtcaatttttttttgttccgaaactcatctgagcagttccaatctccggagagggcagagaagtaatagctagttaatattggcttatcgttttctgggtttgcaaaggcataaacttgtttactgggttttagtacgcagaaacttcttatatgggctcatattttgtatgagggggttggatggctggggtaaaggatttgaaggcatcttgtttcctgcttgtcctttcttattttcttaattttaacctaaatattgcccatttgcgtgtatagtctataacgttttgtaacgtaactatttgtatattttcgtatgctcaattatacctgttacccgtagagtaaaagggtatatttggttcgttgaaaagtatgtaaaaggcagaaggaaaatcaaaagccgagtcgatctgattattattgttcgagtattaaaaccttctaaagatatcacataccgtccgtaggtggcatgcaagattcctagcgcaattctgcctacgtactaaaacaaaaatctccttgtgctctattcagtacttgcacgctcacgattggtccaagtacagatccttggggaacacctgccgaagcctcggtatctttttggcccagcttccttatcgtaccatgggacacggtacccaaagttgctgagttgcggcccatctggcggtgttgaaggcgttctttacgtccagagtcactattgcgtagtattcctccctgccaactagccatgtatcaccagcaagagcggtcttgtcgatgttactcacggtcaaaggagtgtccaggatactctttcccttccgaaagccatattgctgacttccttcgtcactgagagcatcgacggcctctattcgagtatacaagatatcttcggacagttttccaactatatttagtaggcatagagggcggtagctgtttgcagcatatgctgatcccttgcatttgtgcagcagaactattttctggcttttccaccttattgaaaagattccgtccaaaagacattgctgtaaggtggccctgaagatgtcaggtctaccgaacgccaatgctttaacaactgcaccaggaattccatttagtccagcggctttattgggtttgatacgcttgtctacgggtttttatacgacagcgatttggcagccgccatgccacgcttgaactctatgcgtttccttctgaaagccaccatgagctccgcgtggagggtactgcctctggctcgtttcgccgttctcctagccctgaagcaatcagaccgtagttggcttagggtggcactccaccagtacacgtgtggtttgcgccgtacctttttcttccttctcatggttgcttcgcaagttttaccaagcatattcatgaggtcagccgccgaactctctgcatccctatttgggattaccagggaattgatttgataagccagcattttcctcatcgatcttcctggtatcccatgcttgatcggcgtgccctccggagagactaaaggaaatcatagcgtggtcgcacagcgttaccagcaatgatccttgggcttcgccctctcgcatggcccacaagcacctccacaaactcctcgaactggtcgggggcgtcgctaggcggagcatagcagcagtacatatacacgtgttttaccttcgcatatgcaattgcccgcataggtgatgcagccagttcctgaacgtggggagagctgcaacacttgatagctgctttacctgactcgtctaggatcttggagtattgtccccagtgacgtaaggttcgcttaggagcatgatgtttacatcgcgttccaccgcgattgagcgaccatgcagctgtggagctcctcttcttaggcttcaccttggtccactctgcagtcgtgctagaattctgggagacagattcatagctgcctggcttggactcttttgctctggatgtcgcctttccttctcccttgctaccagtcgcttggtagttcggcttgggcgcctgaacgttgggaacttgctccttgggcacctgcgcattgtgagaagccttttttgtaggcttttctacctatgtctgggtagcactgctcgtcaagcggtgctcgctagtggccccttcatacaactctatcgccctgttgttaagggctgagagtccttagtctctcttgtgacgtgcctttgagtttcaaatgcggatagcaggatgtttatcttgccagttatcctggtgagtatgcacttcaggttctggctctggagagccgtggtcaggtccgaagaccatcccgccttttgcgatggcatggtagtgtagtccatcgtcttctggcttgtcgcgatagtagatgctgtaggagccaagttctccacctgtacagccgcaatgcactccctagttaacctgaggggcctgcttgctcagccctcgcttccgccggaaccgagattccgtctccctgagtcgggtttccgataactgtatgtgtgcacacgtatgctcacgtctcattgtagatttgacaaaatatacccttcactttacaagttttcaatttgttttgttttgcataaccttaacattatagattcgaaaatagcatagaaatattaatagccaaacctctgtacataatatcacataataaatatcataaatgattttgtactggattaatttttatgaaagtgttcattataaaaaacatgatttggaggaattgtcacaattagcagtgagcgacgccagttcttaagctattagtcaattttgtctggctgacaataacgattggcgcaccattcacccacctctttgcgtacctgctgagccgcttatgagtctaacttgacagcttgaactacaatcgtttagacggatggcagaaagtaaaggacagcatcttgtgtagagcgctcatgaaattgtgcctgctgccattagattattcttttaaaagcgagtttacaacggaggaagcatgtcgacagtaggagatgttggccttattatttctaaacagcaaaatagtatacttaatactaagcaatgctatatctattatattctaaggcctcagctgcagcaacgcatattagccggcagtggcggtcgttttaaagtctcactatttgtttcttgatcgcttggtcgccgttattctaagcgcaagttcacaagaaataaaatttataacttttcccaaattaaggctgagttttaattaaaaaaaatttagatgccaaaaagctggtagcacaaatataaatcttttagaatctaactcccaaaaaccgctcaaaactgccacgcccacccttttaaaaaatgtttcgatttttcttcgtttttttgtttgtcttgccaatttctatcggcatacctaaaactcgttggccacgcccttctaacacctacaaaaattacaaaacggccacgcacaaacaaacctttaaaaattttgttttttttttttcaatagctgagtcgatctacccatttccgtatttccgtcaggcaggcaaacgacccttcgtccgtatgcaagccgagatctcggattctttaaaaattaaaaagttaagattaagaacgaatatttaagatttatccgattaatatcgagctttcaaaagtttgacctttgcccatcttgttaaaaaagtggaacaacggaagccagggttcagaaatatgagaaaatatatataaatatctaatagtcaggaaactttactatagtgttctcatttttgcacatttttaaactttgcgggaaatacgtggcttctcatatgtttcgttgttaactattacctaatttcttttttgaaataaatatgttcaaattctacaattatgaatagtcgggatcatactccgagagggtccgacgtgagacccaatgtcaatgtcaccagaaaggatgatcaagaaaatataagctttatggggcatcaataaaagtatacaagagctttaatatatatatttcaaaaaaagcttaccttcatcgactaaaacgacttccacgattgcgttaagtggaatatctattttatgagtacacatacagtttggcccacaatctgcgggacgattgtccccgttacaaaactgatctgggtttatatcattatattgggaagtcagtggcgctggagccgataggtatgaaatttcatcgataagtgaaattacatggtcgccggtgggtgccactgaaatatttgtacttagtgattatattaaaacttattttttgctacgtacctaaaaacctgttataagtgtttggctggaacagatcttcagcccggtatacaaagaaccggaaaggtaaaaatatttttacgtctggcttctctgccaatataccacgatcaatctcaagagcgtttttaagttggcttacgcatatggcatcgttacgttgacggttacattgggcgtccaaaggattcataacctttgcaattatttgttgcgttttggacggtcataaaatacaacggtttttgtgtgtatatatacaggtgcggataaccaaggtttgagtggtttttggtttggtgataatatacatattgggtattaaaagaaacataaagaaaaatacatagaatttcattttatttataatatacatatatacatatataaggtttttttgtaaagaaaaatataaatactctattgatttttactacaatattcacaaccattcacatcacatgaaatacacagcaccagttaattaaattatgtttatatttgaattttgaaacgtcatttaagcagagaaaataagaagcaaatcaaatttgcaaaaacaaataaaaaaattgaattccatgagtcatttaattaatcgaataattaaaatatgtcaaaaaataaataaaagatttaaaagctccactaagctttttaacgcgccctatttcgataatacaattaatatgatattatataatatgactgcgcacccccataaactagggagggataagctgcaattatgggctgctgatgcttaattataattatggtctgaataaataaaagagttcttgtctaacattctagacggttttcaagttaaataaactagcaataaagatatattatttttttttaagaaatcgatcctcattaatgtattttagaataagtcacaacaggattttgtcagtatcgattgccaaaaaattagcattgtaaaaaacaatactaccaattttataagcatttaaataaggaaacatatctacttttcgaaatgattcaaaatatattttgtctttggtctatagatacttacgactccttgcggtattccaacatcgtatgttggcggagaagatgctggctgataaggtccacgagcgtaacgcaggatagccagttgttgagctctacgaataccacactcaccaagtccacgtaactgtatccaataagctccaacaggttgatcggcgcttataacaaaatcgtagcgctcaccttgaatgtataaaatttatcacaaatatagttagccgaagacataacatcaaagcgagcttcatgtttttaagtggttatcattataatgccattaaacgcaaaaattaaaatttgtgtgaagagctaatgattcacaagtgaccattgtgttattgacgtgacagagcagatgctagcaaatgacaaaagtaaaatacaacatacaaataacaatagtgagagagtggcacaagcgaccaacaagaaagtgaaggcaagcaacggtgggattacctttcaaaatcggtaaagagcgatttcgccagggacgaaatcagtggcggacaacaaaacatttatccatctctaacaagaaagaatgaatctatagccgagttccccgactatcagatactgatatctgggatatcaatagatattggtgaataaaactttttaaaaattttaaaattgttccaaagtgtgggcgtgacctggtcggcggctttggggcgttagagggggcgtggcaaatagatttttatcaaatcgatagaaattcacacgactaataaaaaatatccaaccaattttcaaaaatgtggacgtggcagttgtgggcgatttaagtgcgttagagtggacgtggcaaacaattttttgctaatcgatagaaatttacaagactaataagaatgtgaaaaaatatcaacaattatagaggctttgtctctagaatctgtattctgagtcactgtattctgaaccttctagcttttacattttctgagatctcgacgttcaaacggacagacggatatggccagatcgacttggctattgattcagattaagagcatataagctctatatagtcggaaacgcttccttctgcattacatactttttaacgaatctagtatcccttttactctacgagaaacaggtataaaaatagaaaaatagttcttatttcagaaacactgtttatcccactcgagagtgtatataccacaaagtataaaaaaaagtataaaaataaaatgcattttcgcaacggtaacaacttttaaacttttctttttaatggggattttttgtcactccggttatcaagtggacattttgaactacttaatacagcggcatcatcttcaaacgtagatgtcattgctcgctgtttcgtgggtatatctgccatatataggaggtatacactagttccgaggcaaaactcctgccgcaatgtccgcacctggttaggcagcttttgagtcgcagcaaaatgaatcggtataaaattgacgatttcatatgcatatgttttggccttatagaaaagtgatcgaactgttctaattctgttctaatttcagtggtgaagtgattgtattggtcaaaggtaatactaaattgatatgacgttaaaaagattacagagtgctagaagttgtgttatcatttcagattttagtattcttgacttttcttgtattgtttgttgtatagtttaaaaacgttgttttttttctaaattgctattatcacagaaccctcattggtcctgcatgcatcaactgtctccggtgggcatatatggatatgatttttccgcagtgagaattctgtgcttgtatataatatatttcaatatttcaaattctttgaaatgcaaggcgaccaatgctatttccatgtatgttggaacatttaaatagtattgaaccattggcattttgaattatggttcgtctgtatatatctgtcacaagtaagcacgaagcactcgtgcatgagtaatctatctatagcttattgtctttactctcatttctctgatatatcagcatcagcatatcttttctaggaagaaccagcattataagttaagcaacaacttaacgtttttgactggaaattgaaagaataattttgaaattttttaaatcgagtgaatgtgagatgtcgttactcgtagagtaaccgtacgaacgtcgagatctcaagaactataaaagctagaaggttgagattaaatgttttggtaaatgttttaatatttatttatgtttttattagtcttgtaaatttctataaatctgacaaaaaactttttgcccaaggctcacatgttcactcgcctgaaaacggttttttttttatattagtcgtgtaagcttctattgatatgcaaaaaaacttttccacacgcccacaaagcgccctaaactgccacgcccaaacttttgagaaatattgtgatattactttgtattatttccatgcccacaaaccgcccaaaacggacactatttttttcccacattctaccgatattaaaaaaaattacatttctcgttcacacttccatcggaataatgggtatctgatagtccaggaacttgactatagcattctctcttgttaataatactcttaagctaggtttttctggccgtcgctatatccttgtattatttctggtcttttgagaagttctggttcaggaaggttttaaatagtatgcagtcgtagttataaagtggttgtcataggtttgatcaggtttaataggtttcttcgatcaaaaactgatgggtgactatgtatccatagacctaacactatctgtttgtaccaggctataattaccataattactagggtaggtgaccgaaataatcactgtccgaagctattcgtttgtacacaggcacagaaccaggtcgctcgagaggttcgcgtgcaaaaaaagagtatagtgaggttgcgggcctctagcttaactttcaattgtaggagtgagagtttggggtaaaccaataatcgtattcttaatgtaaacttcttatttgaaatctctgcaagtttcataccaaaacgaaatattgaaaatcgaaggtacccaagtttgatggcaatgtgaaagggattactagaaatgtttgtggagtttgagttttgtaagacatattcaaattatggaaagcttgacagctttcaaacgtaatggaagatggcgggagggaaactgcactagctatttatttctaagtgaatgatttttgtctaagataatgattaagcaatctgtaataaagttccacttttaaaatattcactagaaataaatataaatatttgtagatattattctaataaaaaaggaacttacctgaaaaggaaatgattgtatttacatcaacaggatgcacaggctcaccatcggttgctataaccgtcatgccgtgaccctcaattgttacctgtgctggacagactgaagcaaatgcatttatcattcgaaagcggtaacgacgtcctggcgtaattgtgaatatttccaacggagtattagtcataaatccagtgttcgggtcacgaaactggccttttccgttaatcaacatagactccggatcttggcctgtgttaacagccaagcgtccaggatatctctctgctgcatcttcatgcaaccaatcactgataagcattatatgtgttgttaaatcaaaatcatataaatgggagttagggtcccttgatggtggctgtcgaaccacgacgctgccgtagagtccatctagtttctgtagaccggtatgagcatgccaaaaatgtgtcccagcgtttcctgtccactgataacggaaggtattaccctgctgaatggggcactgagtaacgaagggcaccccatcataatactgcgatccacgttgccatataccgtgccagtgtatagttacttccattccctccatatggttctccacatcaataacgactttgtcgttttcacacacttgaatgcttggcccgggtatcatacgattcgcagttagaattccacgttcaactccatcagctaagacacactgacaatggctccaaaccgtattcgttgcgtttggagtacatacttgacacgcactgtgtgtaaataattataattataattaggtcaatccgataaaaatatattaatttgatttatttattttaaacttgctcaattgtaaggaaagacatattaagtgtagccaatattggtgaataaaatgaaaaaatatttaaaaattgtttaacagtgtttgtgtgtctatcttgggagtgtaggtgaaagggggcgtgaccagggtttctgatttacagatcaaaattggcaagattaacaataaaacgaagaaaaatccaagcattttttaaaagtgtgggcgtgatgatttttgtcaagtctatagaaagttacaagactaataaaattataaaaaaaaaaaaatatccaaaacttaactcaaaaatgtaagcgtcgcagttttggacggtttgtgggcgctagagtgtttgtggcaacatgggtcaacaagttgacgctgcgtctttgtctttagaatctgtatgctgaatctcaacattatggcttttatagttcctgagatctcggttatacggttcatatacgcttccttctgcctgttacatacatttcaacgaatctagtatacccttttacactacaagtaactggtataataacgcaacagacgaagagcttttatagctacttacgatttaatgtatattaattttataaaatattagttttaatatgcgtacaaagtatatttatttttgaggggggcaaatatattgataaaatttatttctaaaagagatggggaaacactttctccgagaagacctattttgtctttaatgtctaatattttcgaaagtatgtattaattttaattctaatgggtgggtaggcaggacaaacttgatatgcaaattgaaaaaggtcaatattttgtatttgtggacattttcgaattatcgtattttcaaaactgtatgtgcccagcatttttgagctgtcgtcgttgatcgttagatttcggtctttggttctcaaagaaattgttcgctacaatactgtcgatttatttaacacctcttctgtgcttggcttgactagaatagtatgatgttaggctgactctgatctgttgatacacgattataatcattcatttaaatgcattttaaatgtatcctgttgtccaatgtttttaatcttttcttttgtctctttccttagactctttttaatgaatacataagtacacaaaataaagtttaaactgcatagccacgctctaaatataggtcccttcacattaaaaattattcgaaattaaatataatacaaaagtattctcacacccttcccattttaatttggaatacgtaagcttatttcagaaatgattattcatcgattgcatatgtcagaaagcttaatgcaacatgtagacaataataataatgatacttaaaaacttaaaactgataaagacaaaaatgttcttgtaagtattcgcattagaattaaactgcacacgcatttatgcccatcgttcaatcctaaagtaggtaaagtttttacattatactctttattcaaaaatacatatacagctgtgcaagagaaacttagaaatacgactgtattttgtaagccgtgttttcgtttcggaataaaaaattaaaaacaaccaatattttaaagtattatagcagggttttgttggtcaagctaatttttatcagttaaaaaaatgtattaatatgcaacaagagagaatgctatagacgaattccgggagtatcatatacaagttacttttactagtggaaatatgaacgcaaaattctggcatatcgatagtattgggaaattagaagaaattaaaaaaattttcaagacgttagtagaggcgttgctacagtgtttttggtaaaccgatagaaattggcaaaacaaacaataaaacgaaaaaaaattagaacgattttttaaactgtgcgagtggcaaacattttttttttaatctatagaaatttacaagattaataaaaatgtgaaaaaacatcaacacatttttcataagtgtgggcgtggtcatcattgtctctagaatttgtattctgaatcttaaccttctagcttgtatagttactgagatctcaacgttcatacggacagactgacatgggtagatcgactcggctattgatcctgatcaagaatatatatctgcctgttacatactgttcaacgaatctagtatacacttttactctacgagtaacgggtataaaaatgtataagctcacacattgagctaaaaacccaaaacttaacactgaatctgattaaaggagctgcacaggtacactagaatccgttcttacggcagcagccctaaaatcagaaacgttacaattaatccgaataggactgacgaacaaatcgaaactcgtcctggaaaagcgacgcttacgtggagaatggcagtcctccagatctccatctgcaaaacaaaagctaacaatagccacacggtagagaaggaatacgctcagcgttttgctgagaaatatttcaatgttaagcagactgagcctccacatttagcgctcacctacaaaatgtattaactccaaaccaggctactagtacattagcgctaccgtctttatccgtaaactgccactaacaacacaccacaattgtgtttcctccaaactaaaataattaaagacaatcttatccggaaaaaatccgggtggctttgaccatataacaccgaaaatgatcatgagcggccacattccggcgttagctatataactcagctctttaccaaacatagttaccatgataaaagtgatcgattatcataatgttttcaaagcctggtaaggaccactctgttgcttcgccttacagaccaataagtcaactcttatgtattttgaaacctttggaaaaatgccagataatccaacttaatctacatctgagagcccacaacaaagtcccagcctatcaatttagttttcgcgaaagccacggaaccattgagcatgtgaaacgaattacagcgcaaataatataagtaataataataataaaataataagtaggattcgaaaatagagaatattgtacggacgtagttttagacgtatacccacgcatttgacagggtctggcttgattgtctaatgtttacagctttaccagaaagaatacacaaacttctaaagtctatgacaaaaagtttgcagtgcggaacaaaaattaaggctggagaatccccagactgcgtaattggtcctattttatacctcatctatacagcagacatccctacaaatactcgacacgtttgccgacgatccagctggattttgaagaaattaagagttatataagtgagaactttgatgacattctcctcaaatttcaaagcgtgccttgtaaacgcatccgcacgcaacctttgctggcggcatttctacgtatgattgtgcccatcagctacgtccactccggcatgacaccggcaccgtcgctgccatctcttgagctcacgatattcactggaacttgtattctatgtttgcgacgataatagatagtcattctacaagcgtagaaaagctgcagcatctacgatcttgtctaagggacacgtcgttgaaaatcattcgctcattaccgacggcaactgtataaagtgtaacagattttctaattgacttttggtttttcaagcgtatgtcaggagatatcggatgtccagagcgtatctgttttaatatttcgtgtcgaataaattcaactctcatattcgtgttctaagcggattgggtacaacggagcaaattgctgtatgcattaacgtccaagtacttgcccaaaagctggatctgtcgagtcaggccaaatgggaggagcacttggaggacctagccttcaaaatcttaattccaaaggggattccatgtcatcatatctggaacagcgatgcaggactctggtgactacggattgcgccatggtggaaactaattgtacagctaatatgcgtgaatcagcctttctagccaccttaatcctccgacatgttctttctgttatgcttctgggcactcaattcagtactgacaaagccttaagaacataactccaggaagtcgatttcaagaagcaaaaaaactgacctttgtataaatcgccttaagagtggttatcagttaatgcctaatgacacaatttggctttcaaagcgaacggtcgttttttttgcgccccgattcttattttgtgtttgccaaaccagccgtagtttttaataatcttctttaattatcatatattttaaacataattattaaagatccgctcgcttcgcgagttattccttatgatttgtgcagtagtttaaacaaatatacaaagtattttgcatttttcgtctttgttttttgtttactctcccttttgtgcgttgttcgcagggctgtatgctgttgttttttgcatacacataaactgcacttttcgctctcactctctcactctcccagctcgcttgaaagttttgatcttgtgttttcgtgcacagtggtctgattttaga

SEQ ID NO: 4925 - DNA, 2328 bp, DROSOPHILA
atgactatctattatcgtcgcaaacatagaatacaagttccagtgaatatcgtgagctcaagagatggcagcgacggtgccggtgtcatgccggagtggactgcgtgtcaagtatgtactccaaacgcaacgaatacggtttggagccattgtcagtgtgtcttagctgatggagttgaacgtggaattctaactgcgaatcgtatgatacccgggccaagcattcaagtgtgtgaaaacgacaaagtcgttattgatgtggagaaccatatggagggaatggaagtaactatacactggcacggtatatggcaacgtggatcgcagtattatgatggggtgcccttcgttactcagtgccccattcagcagggtaataccttccgttatcagtggacaggaaacgctgggacacatttttggcatgctcataccggtctacagaaactagatggactctacggcagcgtcgtggttcgacagccaccatcaagggaccctaactcccatttatatgattttgatttaacaacacatataatgcttatcagtgattggttgcatgaagatgcagcagagagatatcctggacgcttggctgttaacacaggccaagatccggagtctatgttgattaacggaaaaggccagtttcgtgacccgaacactggatttatgactaatactccgttggaaatattcacaattacgccaggacgtcgttaccgctttcgaatgataaatgcatttgcttcagtctgtccagcacaggtaacaattgagggtcacggcatgacggttatagcaaccgatggtgagcctgtgcatcctgttgatgtaaatacaatcatttccttttcaggtgagcgctacgattttgttataagcgccgatcaacctgttggagcttattggatacagttacgtggacttggtgagtgtggtattcgtagagctcaacaactggctatcctgcgttacgctcgtggaccttatcagccagcatcttctccgccaacatacgatgttggaataccgcaaggagtcgttatgaatcctttggacgcccaatgtaaccgtcaacgtaacgatgccatatgcgtaagccaacttaaaaacgctcttgagattgatcgtggtatattggcagagaagccagacgtaaaaatatttttacctttccggttctttgtataccgggctgaagatctgttccagccaaacacttataacaggtttttagcgccactgacttcccaatataatgatataaacccagatcagttttgtaacggggacaatcgtcccgcagattgtgggccaaactgtatgtgtactcataaaatagatattccacttaacgcaatcgtggaagtcgttttagtcgatgaaggtggagaacttggctcctacagcatctactatcgcgacaagccagaagacgatggactacactaccatgccatcgcaaaaggcgggatggtcttcggacctgaccacggctctccagagccagaacctgaagtgcccaaggagcaagttcccaacgttcaggcgcccaagccgaactaccaagcgactggtagcaagggagaaggaaaggcgacatccagagcaaaagagtccaagccaggcagctatgaatctgtctcccagaattctagcacgactgcagagtggaccaaggtgaagcctaagaagaggagctccacagctgcatggtcgctcaatcgcggtggaacgcgatgtaaacatcatgctcctaagcgaaccttacgtcactggggacaatactccaagatcctagacgagtcagacaagcgtatcaaacccaataaagccgctggactaaatggaattcctggtgcagttgttaaagcattggcgttcggtagacctgacatcttcagggccaccttacagcaatgtcttttggacggaatcttttcaataaggtggaaaagccagaaaatagttctgctgcacaaatgcaagggatcagcatatgctgcaaacagctaccgccctctatgcctactaaatatagttggaaaactgtccgaagatatcttgtatactcgaatagaggccgtcgatgctctcagtgacgaaggaagtcagcaatatggctttcggaagggaaagagtatcctggacactcctttgaccgtgagtaacatcgacaagaccgctcttgctggtgatacatggctagttggcagggaggaatactacgcaatagtgactctggacgtaaagaacgccttcaacaccgccagatgggccgcaactcagcaactttgggtaccgtgtcccatggtacgataa

SEQ ID NO: 4926 - protein, 746 aa, DROSOPHILA
MPEWTACQVCTPNATNTVWSHCQCVLADGVERGILTANRMIPGPSIQVCENDKVVIDVENHMEGMEVTIHWHGIWQRGSQYYDGVPFVTQCPIQQGNTFRYQWTGNAGTHFWHAHTGLQKLDGLYGSVVVRQPPSRDPNSHLYDFDLTTHIMLISDWLHEDAAERYPGRLAVNTGQDPESMLINGKGQFRDPNTGFMTNTPLEIFTITPGRRYRFRMINAFASVCPAQVTIEGHGMTVIATDGEPVHPVDVNTIISFSGERYDFVISADQPVGAYWIQLRGLGECGIRRAQQLAILRYARGPYQPASSPPTYDVGIPQGVVMNPLDAQCNRQRNDAICVSQLKNALEIDRGILAEKPDVKIFLPFRFFVYRAEDLFQPNTYNRFLAPLTSQYNDINPDQFCNGDNRPADCGPNCMCTHKIDIPLNAIVEVVLVDEGGELGSYSIYYRDKPEDDGLHYHAIAKGGMVFGPDHGSPEPEPEVPKEQVPNVQAPKPNYQATGSKGEGKATSRAKESKPGSYESVSQNSSTTAEWTKVKPKKRSSTAAWSLNRGGTRCKHHAPKRTLRHWGQYSKILDESDKRIKPNKAAGLNGIPGAVVKALAFGRPDIFRATLQQCLLDGIFSIRWKSQKIVLLHKCKGSAYAANSYRPLCLLNIVGKLSEDILYTRIEAVDALSDEGSQQYGFRKGKSILDTPLTVSNIDKTALAGDTWLVGREEYYAIVTLDVKNAFNTARWAATQQLWVPCPMVR

SEQ ID NO: 4927 - DNA, 16092 bp, DROSOPHILA
agccaccaattcgaccctcgctcttacaaaacatatttatgccaaatgatgtgcttaagtgctacaacagcatgatccgaaaccttccggacgaggaaggtgatatgaagagcccacttttgccacccaactggtcaactatgatggggtttcgagccttatgcattctttccggagattgtcgcaaggatacggaaacacgtagcttcgaatacaatgaatctttaccacccatccagcttttccgcaagcggttgcaagctcttttctatcgtaccactcttctcagccgcttggaatcacaactctttacggacttaccatcagcattagtttctttaccacgccccaaacacgattatgcaaaaatgggtacacatgttgaattaatcgatccagagccggcaccacagaatgatctaaaatccgagccgcttagcgagaatgaagtgattaatacagtcaagcaggaattggaaatggaatatacagttccataggaactaataagtaaatatgtaatattgattaatttaagctttaaaagtttatattttttacttcatatcgcgttatataatagttcattacaatggctaacaaataatttataaacttgtaggtacttttaacgtatttcacatacagcaaaatcaaatgccggaccgatgtgcattagggtggctcatttttctgattgtagtttaaaaatattgcttaggtttgaaaaaaggtatatttatagcaaaacgccctgcaaaacgaaacaatttaatacacaagcagtcaaaaaaactaatgtatattttagttgccgttttacaatcctttcaaaacttttatcccggatatttagttattagagcaaaattgtctaaaccttattttcaatataaaaagaaccgatccatcctattgttcatgcggtaacaatgtattacaaagcatttttatgatagcactagcagcttgagaactattttgttcgattcccgggggaggcgctcattggaagttactgaaatccgtcttcagcttgatcgtaggcttctgcggcttggccagcaggttcctctgcgcctcgcttgctttttgggcaatgttaatcgactgctgttggctgcgaatggccgcttctagtttttgtcgcagttccggtgtttgacccatcagggccttaaactcctgcggatatttcggaccgatcttcagtagccactgcagcgcctggtcgtgcagctgccgttgatactttggcagcgtccggagtcgactgggttccgctaggaagccaatgagcacagggaccaacagagtcagcatctgaatatctgtgaagtgtggacaaggaacaattaatattataatcctaagtttaagggcttgctaaacggaacatcaattcacagagatggacaagtcgcttcatcccgtacttttacttcatacgtgcaacatttaaagcgtaattttaattgacaacaagaactaggaactatgctatggattggtgcattgaaaaacattgagtgtgcaataaacgttgcaattcatgactataaggcagttaagataacataaataaaaaaacgaatagaatgttcatatttaatggtaggaaaataatttcatttccatttagcagaccgatgaaaaaggagtaaatttacaacgcgtgtgtaagtgtgaacagttatgccttatatttctgaaacgcttttttgacatgaaacgtgtgagtttatgatcgagctcttctatttaccttgtagcaagttcatgtttcctaacgtttttttttaaatattattttttttaatgttttgtaaatgatttgtgatttgataaaaagagaagacagagaaaagagcaaatatataataacttatttcgttttcccttcccatcgtgtgaagtttaaaatgaatgtacttaaaccaatactttggctgcgttcgaagatatatttgaagaaaacagatcgatacgacagaacagcctaattatgttggaaaggggagtgtgttaactattaaggcgggtaagggggaactgctagaactatattctaaaatggggtactcctgcaccaaatgaaagttatgtcgaattttatcctttctagtcacaatttaacattattcgaagaagtccttataatcaatcaatgatcaatttttattagttagcaatcatttaattatgatatagtcgagttcctggactatttaatatccgttagacacgtatggacacggccaagtagatttgccttctgatactgaaaaaaaatgtatacactttatagggtcgaaaacgctttcttccacctctttcatacttttcactattttccatgaattataattccaaatatatccctcctaaatccaaaggtataattatttaatctagttatataacataaacaaaaacacgttcttaaggttaagtattctttctcaaacaggagtaccccgagatttaaagaaggaccaagcttaatgattttcaaatacaaccagttacttacggttctgcggctccgacaagtctataagctgctccacggtaacgatgctctccagggtgacctgtagctccagttcgcttgtgggcaccttgctggactccgcatacaacgattcgattatcctaggcgcaagtgcgtggatgtagggtgttgccgtcttcaattcggcccgagcgaagatcgatcgcgtggtctcgatgcagcgcagcttcaccgagaggttctccgactgcaggcactgccggaagtgattaatgcatggatattgcaatgaaggtgtagccacaacggaggcgggagtatgtagaataaaaacagtgatggccagcagcatagtgacctcgtcgactttcctttcctcgttatcgccagccgttttggtgagatccacaatggtggccagtgcactttgcagtaactgttgccattcctcggttgtctcctctactttagcccacttgtggacacaaacggatcgcaagcactgcagggcagacttcacagcacacgtatttgccaagatagtactatctatggccgacttgttggcgatttctttaacgatactggttgtcatatacaggacggtgggcaggattgcaagggcacctttgggagtacacaaatccatcaactgttcgacgcactgcagtccgctggatactagcaggccgttttcatcgccgagcaccgagaagaatgacgagccagtggccattttggcataggcaaagtccagctgtaagccggagccaccagctccctgcctcgtgggattcatcgtaggtatttggcgaacaaataggcaaagacaaacctccagaacggcgtagacatgcgagcttcctggctgcatagaatcatcttctccatgtcgctctccaccctttccgtcctcagaattggcattatcgtcccgttttctttctaagtcttccctagcagcgcggattgtttgctttaaaatttctacgcacagaagttgtacgagtaattcatctctcgtcagtatctgacgatgtagaacatgacagagttcaatggttaaagcccgatccttgaccaactgcctcctagcccaatcagaatcaaagatgctgtgcagtgagcgaaggcagctcacaatgtttctcggcctttcagagcttctcatgctgcagagcgcctccatgcagatgccgaagatcatatggaagcgatccgctgacaaagatccatgagtgatctgattattgttggactcagctgcggcttcacttgtgtctagatgacgggcgaacccttcatcccttaaccatagtgcggaggcatagaggattgggggccaactggtcatgtaatgtggttttgacgaattaatggtgtccgtggtgtaaaaggctcctccgtcgtgcggtagttgggattggaactccgcaggtagaagcagcaaggcgtgatccttcatagcactcagccagtgtgttgaaagattgtggagctcaggttgcactaatcctaaaagactttcacccctactgtcaggaacatccgagtccgtttccagattggttaaggattgaaagccggattgttgggattggagattcagtagggaagccggagcctttccatttcctatcatggccacaatataaacctctgcccacgcctttaaaatgcttagcttctccaaagtagccatggattcgttatataactgagtgctgttggtttttgaggaaagcttatcaagggaactgactaacagctggtgaactctttttagatctcctatgtcgcgagccactccagatccaatccacgctgagcaaacttcacaagcagcagctgtcacatgggagggggtatccggcgcgaaagcagggcgcaaggcagctcccacctgagcctggaactgctccaagagtaggtgaccagggaactccggttccggaacgttagcaaatcgatcgattatttcctgcagggtgcgcaatccttctaatctcaattgatccgagtccgaggtggcagccataaaggacattcgaataagttccgctaaatggaggatgaggtaatctccgcgagaacgaataagttgctgttccttagcctgcaggagatcaaagtgcactgaactggcagcctcacagctggctatgatccgccgcacgcactgggcggcgaaaacacgagtgggccaccttggctgcactgctggatgggtggatgtgttctcctctgctcggtattctgttacatcatcagcatactcttcctcctcgtcctcttcatcatcttctccaccagcctccttgctcttgctttgttccccagcagcgggatcatcatttagtcctccttccacagcaacggttaacacattcttgcaaagactcaaccaggagctgagattatctgcagccagcatttggagcattgatgtgagtgtatcgtgaatgtttctcagcatctcggcatccgtttctgtgtcgagcagtgagaaaagcagccctggaagtccatactccgtaattaccaaatccggaagttgttcggcgttaatagttaaagctaattcacacacttccttagcttctcgatgggccaactgacggaggcaggaaacggaggccttgcgaagtatgaaatagttacaggctagcattccaaccagcgtgggtaccaactcctctagttgcagagatttactggcaaaaagatgtagctgctgcaggcagccaatagcctcagcttgtacaagaggatccgaatgtgattgaagaagagctgctgagcagaggaatgatcctctcatggtggccactgcgcctcctcctccttgcaactccggtcccacggtggtgatcaacgcattgactacacggcccacacactgatgtacatcaacatgagcgtggggtacggtaagtaaaagtttcagacacagcgtcaaagttgcctccacgtagccgcggaacattggtcctccagagtcggcaatctgcgctagagcataaagcgaccaagcctgtaccactggcgatgcactatcttgacccaaggccaaaaggatagatacactggtgctcagatgctgcgacgagcccatgccacccacatagcgatgcaggcagcccagggcatgtgaatgtcccgtcctcgtgaccacatctctggcagactttagtttatcaaaactattttgagccaactccgcggtaaaatgagaatctcccacgacctgggccaatcgacccaaggcctctccagccgcacaccgtatggtagagttggcactcgtcagcgaagcaactatcaatgccgtggcactctttcgaacatcctcctgtcctaggcttgtcttgctatctgtcagattttttagagcgcatagcagagccgtaaagatattcatttgaacggcttcttggcgactgctcttggcctggcgaatgcactcagtaaagtgctccagcatttgcagcctatgcttgtttgccactttgggaaaaatggttccatacagagtcactgccatatcgatcactgctaccccgagtggcaatggtcctggacactgttgggccttgctgatctgctgaatgttgcttcctccaccgccgttgcttccaccagtagatgttgctgatgaaccattcgagctggatccattgccttgggcagacctgggacggtacaaacagcatggatcgtgctctaaggcgccagatcccgcggcgctattgggttgcagctaaaaaaaacaataaagttttaattagtaatgctaccaattaatatgtagtaccaaagacattattctagtgtctttggtagtaccttagtaacaaggtatgacaaaaagaatgcaattcaaattaactattcaaaatgtatgcatgcagaaaaaagcaaaatcgatatggcttattgctaaaatgattttctcaaaaaatcaaaggctattgttgaaaaattaacaacaaatacgcttactgaaagcatatcgaagcttaacaaccgatatcggaattttaaaataaaatttgctctttacaaaagcatctattttatttattgtatgtacacgtatttgaacagattaaaatctcacacttggaagcttatccaattttcgacatttgaattcatgctcaaataagtatcaaaatcaatcgcaaaatgttgagtaattaatataatgtaagatataacgacttaatagaactcgaaacaaacactggtattgcactccacttacatgctcgccatcgactttgcgattgggctccatcttaggatatgcacaattatagagagaagggtggaaaaaaagtgaattcgggttcacggatagacagttggttgagcgtacacacacatgaacaggaagatatacgtaaactcccaaattaaacccacctgatcctcaatggtgcgatgattagtttcttgcagccaggtgcccagtatgatcgaatcatcaccatgacaaagcgtccgcaacaatgagtttgtagtgttggccgcgttatccgaaagagtaaactccgagacgagcatgcgaagaagatgggtataggaggcctctagcgcattagcaggcagcagcgtcagcgtttcaaagagacgaagccgcaccatagctgccggtgcctttagctgggttccatagctctttaggacagatgccaagctggaaaagaaaggattcaattagcatgacagataagctgaatattaaagatgaatctcacttgaccaacatggccagggcgctttcgatgggggtgagtagtcgtctggttatgtcttcgttcaggagatccgggcaattaagcaggaagctgtgcattacagaaagagctccagctctgccctctagggtcacctgccaggtaaaggcatcgccgcgcgccttttccgattcaagctctttgttggaccgcgggaaagagttccgccacagtagcagcattcgcggcagcaagcccttgactaccggcgatcccaaagtcattatagctccaattaatagccagccggcctgggtacggtgcagcgacatgcggctattctgggaagcagatcgcagcagttcctccgcacagttgaacacgacctttccctttgtgtggggtatgcccaatggcgagtaccgaacgcttcccaaaattgccgccaaagcgcagctatatccggccattgcttctggcgaggatcgcatctgctcgatggcctccacaaagcgatcaattagtggcgtgatttgcccaggaaccgccacacaagcgcatcgtaagcaccaagcggcagccaaacgggcagcggcgcagggatgtaccaatacggcacaggtagcatcgatcgcttgcagggattgatctcccaacaagttctgggccgtggttcctaatccaataagtagagaactcaattcctggagggcacacaccagcaggtgctgactgaacagtgtttcttgattagaatccttggcgttctcgggattgaagtcaattgagttcatctgtttggctaccagatggaccagttccttgcaggcagcgctctgcgccttctcgcctagcatctttccaatcgttgatcggagtataaagctaatgcatttccgtgaatacactgcatctacgtgggagcacgctgcctttggattggccacgagatccaaaacgtgtgccagaaatgtgcttaactgtcgttccaaccaaacgctgcccatgaattgcacgaaaaccacgtatgcatgcgttacacccactcgcacctcacggttgacacctgagctgcctttgataatctctccggtacccttgagaaaagatgcgccaccacgaaggaaacctgacatgagaatgcccagagcttcatccagggaaaccaagcgttgggtagctcccttgcccgcttgaatagccaccgcttgtccctgtttctttttgcttgttgccgcttctgccagttgttgagtataggctagaagtgttcccagcagctgagctaccgcacatcgcacttcatagttgctgccgtcgaaggctcggaaacacaatgttcccaagctttccagctccgtttggtacaggaatggtgcactgtatatcattttaaggatgcagcgggctgcagccactcgaacagccataactcggtccaacaggcaatgcttggccgccttgtaaatatccttgtgcacgttggcaatggctgtgcccatgccagcgctcaccttctccagcgtgtgcatgatctcaatccgcgcctgcgactcagcgttgcgaagcgttcgaataaggatctgcaccgtatcctcgtaggtgcggcccatcatcctgcccagcttctcatacatagagcccagcacacaaatggcggcactagggataaaagagactcagtttcgatttttatatttttataaatgcaatttactcacagctttgtgggcaagtagctgggcgagtcgtccttgttcttcaggatgtcattgcaggcgttgacggtgtcgaagagcatgaaggtgtcaccaacggagaatagcgtggccaacgcgctagcaatgagcttacgaatgggcggacctggtgcgccctggattctttcagagagctgctgcaccagcttcttctggctcgccttgatctccgctttggacaccagtggcagggccttctccaagtagcgcagccattccaactcgaacacaggccgcttgtgttcgggcaactgcttgagagcatcctcattaaggatcaaagtgtgggccagctccatttcggatatagcctcctcctcagtttccgagcgtccccttgtcgatgaggcggaaaaatggtcgctgtttataaacgatctgcagagcaagcgagaaaaaaaaacaatataaattgcggaatgtttcatcaattaaacgcaacatatggttgatgattgtgttcgctacgaatcggtcggcctttgaccttgccatttgagtctactagtacggacagctgcattatcgattacaatttgttgatcacatttcaaaatttgttatttttttactatttaagtggtatactaaacttttatatccattaaatttatagatcaatgtctaacaaatatataatgtatatacgtgcgtaagtatgccacttgaaaaaaaaaaaaacattggttttgccaatccatatttataaagttgtaaaatagataaaaaattgtcaagaaaacgacttcattaaatataactattaagaagatgacctttttttatttataacagaaacgttggaaattgtgtccgcttaacaaagcaaatatgtcttaaaagcttgccactaataagtagagcaatcaatttacggaatacacatttatgtggataaggggcccagcgcggctcttcccagtggtattgtgtggaaaagtatgcatcactcaatctatatatacggcgatgatgacggtgatgaagtcaacccagaaacatattcaaatgtatcgatgcgccgccacgcttcgaacggaaactgcactggtagcgactaggaagtccacacacccacaaccgctctattttcttgttttatccacacacccactcccactgtcacccagctttgataagtgcggcaaagagctgtcgccttgggctcgatagcagcgcccattgacacagatggcggcaaagtcaagaggagccaaattattaaatcgaaacaaagaccttttcttcggaaaatcaaaggggtccgaagcggcggcggcggctcttgtcctcgtcatttgtgtgctatgtgcgaaatgatgtccgccggctatgggtaatagggtaagaaaagacaatgggaaggatgttcgagggtgcgctgcaattttaatggtggggcgttggagcaccatggtgctggggaaggtcgtttgcagtaattgctttactggaaacatccagccatgtaaaagtgcccttattcgaaaaagtttcacatattaattcttagttgactgtacagtaaaaggaatatatattgtcaactctaagctagttagttacgcaacattttttcaccacctatagctattgtgaatcattacaaaaagagttatttagtcttcagccaaatacagactgatttcatacatacatacattcaatgagtatttcagtgctattattttgaccaccgctgtgcgtacatacaaggcgaaataatcctcaggcgtgaggacaccgaaccattgacgtctgcaggctcgagttacataagacgccgttgggctgctgcaccgcctcctttggcgaccactttcccgcccacaaaaggaaaacaagtaaaacctgtaaggtgcagcccagctatggaaatgaaaccaagaagcagccacgaactgaaatcccggctagacttgtcctgtgcactacgggaacatcagggtgactcgttcgccggtgagtggtgaattcttttgggtggtggtggttgacttttccactttccacacacacccccccccccccctccctcgattaacccaccctccagctttgtttttgtttttttcccgaaattacctgcgcgcctcggagataactttgcgcagaaattgcggcgtgcgtgcaaagtttaagttttccattgttgtgatttgctgtgtcttcacatttccagaaaactttcttcgccgtttctctcgccaatctgcagcagcctgcaactttcacacaaatcgataacacttccacaaaagcacttttagcacacgtttttaactgctccaatggattttgtttaatattactgttttgctttcaattacactaggtcaattcattcttgtcactcgatgtagcataagttgcgaaaaaataaaaccgaattagagcggattacaggcgcaactctggaaaagatgcaggtccagaccagatccgcttacacttgcttcgcgcaccgagtacaaaaacaaaatgaaatgaaagagcgctggcgagcacaaacccaccaagtaaaaagtgttctctctctcttcatacactttttaaggatagcatcggtcttgccaaatgttatccaacgccttcgttcgtgtttcttcatttattttttccaacgaatagaatggaattttcttttaaaaatgagttttttttttaataataagttaatttttattttattaatttatttattattatttaatatcaaaataacgtttggtaaattagtgtgttcctccttgcaaatatttgcataatatatgtcttgaaaaaaggcctttaaaagtgtatacacaagtcgagtgtacgaatgtacgaactttaaagtgagagagcgccaaaacaaaataaaatcaaagagcggcgcaaagaacacgggaaaaacacccgctgtggggcacgttcgagaagagtacaagtgggtggcaagtgctgccggaagagagcggcttgtgagagagcgggcgatgacgtcgcacgctagaatcgcagctgatttagcaacaatttgcagccagcactgttatagacttttgggcacattaacaccgatgtccgcacacacccgcattggcgtgaactatgtcaatgtgtcagttaagtcgtttcgctgattcggcgctcgggtgaagggaagcccaggtgcagtgtcctgcgacaattgtcccgcttgctttgtcctaagagaacacgtttggcggcacttccggccgtaaagggtctaccgaatgatttagaatcggtcccaaatccaaattcattcagaaaaaagttctatacttaatttgcttaaaagcagatactgaaaaaaggttatttaggtttttaaagaccagagaaaataatacataaggcgaataattaaccctacctcgccagttgcaagtcaaattatatttcagaccgcgactcactgatttacttatgtcctaagattaatcaaatctataagtgccaaggctgatttaacagttacataatatagtgagaagcacaaatcgcgttatagttgcttcgatttttattttattgaaaatgttagaaaccttgcacaaggccccgattaatctgcaataataaaacaacaatgcactacaaattatgtataaacaaaactttgtacactgtctaatatttctaaaaaatgtgctcaaataaatatataaactattttatcagctcttgtttcaaactgattttgggtgactattccccaaaacaaaaattcgaatttatcaaagtacacacacaattgtaaggtcagtaggtccttcgactttattgcgacttatgctaagagcttaaggtaaaaactgcatgctgggaataaaagtcaatgccttggaagtggggcttttgggattccccagatctttggcgattccctgcacgcgggccaccacgtcactgcgctggatatcgccccggtccaacatccttttaaatagagtatacaattgcctggccgccgaaacctgtgacaaggcatgcagctccaccagcagattctcggaatatccctcgtacttgctcagactcgccgccttagcatcgcgctttagcagatcgtaaaccagcaggaaatccacatagggcttagtgggaggaactctctttttgcctgcgatcgaggcggtgctccatcgatccatcgcggactcagaaccgaaagcggcccttccgtagttatcgtcgtagaggcgcaaaaagttatccagtgactccacatcgttggtaaagtcgtagcgctcgctttgaatatcacggatcaaagacaaaggcagggtatcaaagtcgctatcatctttgatttctgcaaatagatcgttgccctcaagggacttttccggcggcgcagttggtgcaaaaattgccggacggtgcggcacagtgggtggcgatgtgggtctctcggttgtggatgatctcttcggcgtttcccaccaacttggcggctgccaccagcccatgccaccagatccagacgcacctgctccaatcggtcgccttgtggtagtggttctcatcctcgtgggcaacggtgtggatgggcgcggatttgcagtggtggattccataccttcttcatccgcactgaaaggaggctccactgttgtgcttgatagtggctcgtactgcagcaggtcaatatagtatgccaaggcctgcatggaggcgggcagatagctagtcagtaggttagccggcgccactggatccactaggtgacccactagaagcaccaccagcattggacgaaccgttagcccactgcgcatttctcgcttttcttactttcttctggcgggaacggtttactctgggggaatggaggcactcaactgaagcgactcttcccagcaaccagcgagcatctgtagttggctctgcatctgtctttgtctccgtatctgtatctggttttcaaaatgggtgacagcgggttcggctttagcttatactctttcaaaaggtattttaacgcgcagaaaatataaaaaaatcttcagggtcaaacgattacaactaatctgtattgattttatattaatttgagtatcatcacaatcttttatttctattaataaatgttattaaagcaatacttctcggttttcctttttaaatcatttgccctaatggaatagcgtcaatgatttctgagcatacttatagcttcggtgttgggcttcaacttttcacatgcgattttttgggggttttagcaaactcgttgagtggagaggccagcgaccgcgatcgccgcttgttgcgtaaattttgtaaccaccgacttttggcggagaatgttgttcttggaaagagtgaaagatgttccgttgccaaaagaacaaccagtttggtcataaatatgcaaagtgtgcacaaacacaggcagaaagcaggcgaaccgcacataaacctgattttgggtgctttattcatttgcaaggagtacaaaagctcttacattaaattaaatgcatctttggtgcagtttaagaatcacttgcaagtgcgacactttgagagccattgatgaccgctgtcgatcaaaaaaggagagcaagggagcccggcaaacagctgtttgagaagcattaacctgttgttgttgctcttgtgttgccgtctagatgagttttcgcttttttcgaggaaattggagcacggtaaacgacttagcataacgggtttcctaagcaagccgtgccgctgcttttttagcacagacataacggcctcacactcgcacacctaaactttttgcacttccgcctggccaattagcacttaatagtgtcatgtgtattttttgacgcgtcagaaccaagacacacacacaggtaacaatttcactggcacactcccacacccaaattggccccatgcaaatggttgctttgttttcaatttcgacgtgctttcagactcaactcaccggttcacttcgtgcacaaacaagtttacaattaaaatcactctcttcacatggttattgcttttagtttactggaaaaattgaatttttcacgaattttcactgcgttgcgatacggtttgtgtaggctagctcgataactttggccgatggcgatagtctaaacatttgtctacgtttcgatgtgaatgagaaacagctgcttgttgattgcacatgtgcttatttttttgtttacctaaacgctccagaatttctgtgcacaactttgtaaattacagataaataatataggaagaatggccagaagaccagagcattcggcgccgccagaaattgtgagtatacgccataacgtactgcccatcaagtgaaccctcaccaattttttattcctttagttctacaacgatgatgaggccaagaaatattccacaaagtgagtagattagatagatatgtatgtatatgttcgaactcataaaaaccagaactttttagcacccgcatcattgagatccaagtagaaatggccgaacgtgccttggaactattggcgctcccggatgatgatgagtctcggttgattttggacatcggctgtggttctggactctcaggtagcgttcttgaggacagcgagcacatgtggatcggcatagatatttccaagtctatgctcgatatcgccgtggaacgcgaggttgctggggatgtcattctgggagacatgggcgagggaatgccctttaagccgggcactttcgacggcgccatctcgatctctgccctccaatggctctgcaatgcggacaagtcgtatcacaatccccacaagcgcctgctgaagttctttaccaccttgttttcctgtctgacacgcaccgcgcgagctgtctttcaattttatccggagaactccgatcagatcgagatggtaacctcgcaagccatgaaggcgggattctacggaggattggttgtcgactatccaaactctgccaaggctaagaagtactacctggtgctcatgactggaggatctgctgagctgccgcaggctttgggttagttttaataataataattatagaaaactaataattactttcacatcatttt

SEQ ID NO: 4928 - DNA, 6560 bp, DROSOPHILA
caaaccgtatcgcaacgcagtgaaaattcgtgaaaaattcaatttttccagtaaactaaaagcaataaccatgtgaagagagtgattttaattgtaaacttgtttgtgcacgaagtgaaccgatcgtttataaacagcgaccatttttccgcctcatcgacaaggggacgctcggaaactgaggaggaggctatatccgaaatggagctggcccacactttgatccttaatgaggatgctctcaagcagttgcccgaacacaagcggcctgtgttcgagttggaatggctgcgctacttggagaaggccctgccactggtgtccaaagcggagatcaaggcgagccagaagaagctggtgcagcagctctctgaaagaatccagggcgcaccaggtccgcccattcgtaagctcattgctagcgcgttggccacgctattctccgttggtgacaccttcatgctcttcgacaccgtcaacgcctgcaatgacatcctgaagaacaaggacgactcgcccagctacttgcccacaaagcttgccgccatttgtgtgctgggctctatgtatgagaagctgggcaggatgatgggccgcacctacgaggatacggtgcagatccttattcgaacgcttcgcaacgctgagtcgcaggcgcggattgagatcatgcacacgctggagaaggtgagcgctggcatgggcacagccattgccaacgtgcacaaggatatttacaaggcggccaagcattgcctgttggaccgagttatggctgttcgagtggctgcagcccgctgcatccttaaaatgatatacagtgcaccattcctgtaccaaacggagctggaaagcttgggaacattgtgtttccgagccttcgacggcagcaactatgaagtgcgatgtgcggtagctcagctgctgggaacacttctagcctatactcaacaactggcagaagcggcaacaagcaaaaagaaacagggacaagcggtggctattcaagcgggcaagggagctacccaacgcttggtttccctggatgaagctctgggcattctcatgtcaggtttccttcgtggtggcgcatcttttctcaagggtaccggagagattatcaaaggcagctcaggtgtcaaccgtgaggtgcgagtgggtgtaacgcatgcatacgtggttttcgtgcaattcatgggcagcgtttggttggaacgacagttaagcacatttctggcacacgttttggatctcgtggccaatccaaaggcagcgtgctcccacgtagatgcagtgtattcacggaaatgcattagctttatactccgatcaacgattggaaagatgctaggcgagaaggcgcagagcgctgcctgcaaggaactggtccatctggtagccaaacagatgaactcaattgacttcaatcccgagaacgccaaggattctaatcaagaaacactgttcagtcagcacctgctggtgtgtgccctccaggaattgagttctctacttattggattaggaaccacggcccagaacttgttgggagatcaatccctgcaagcgatcgatgctacctgtgccgtattggtacatccctgcgccgctgcccgtttggctgccgcttggtgcttacgatgcgcttgtgtggcggttcctgggcaaatcacgccactaattgatcgctttgtggaggccatcgagcagatgcgatcctcgccagaagcaatggccggatatagctgcgctttggcggcaattttgggaagcgttcggtactcgccattgggcataccccacacaaagggaaaggtcgtgttcaactgtgcggaggaactgctgcgatctgcttcccagaatagccgcatgtcgctgcaccgtacccaggccggctggctattaattggagctataatgactttgggatcgccggtagtcaagggcttgctgccgcgaatgctgctactgtggcggaactctttcccgcggtccaacaaagagcttgaatcggaaaaggcgcgcggcgatgcctttacctggcaggtgaccctagagggcagagctggagctctttctgtaatgcacagcttcctgcttaattgcccggatctcctgaacgaagacataaccagacgactactcacccccatcgaaagcgccctggccatgttggtcaacttggcatctgtcctaaagagctatggaacccagctaaaggcaccggcagctatggtgcggcttcgtctctttgaaacgctgacgctgctgcctgctaatgcgctagaggcctcctatacccatcttcttcgcatgctcgtctcggagtttactctttcggataacgcggccaacactacaaactcattgttgcggacgctttgtcatggtgatgattcgatcatactgggcacctggctgcaagaaactaatcatcgcaccattgaggatcagatggagcccaatcgcaaagtcgatggcgagcatctgcaacccaatagcgccgcgggatctggcgccttagagcacgatccatgctgtttgtaccgtcccaggtctgcccaaggcaatggatccagctcgaatggttcatcagcaacatctactggtggaagcaacggcggtggaggaagcaacattcagcagatcagcaaggcccaacagtgtccaggaccattgccactcggggtagcagtgatcgatatggcagtgactctgtatggaaccatttttcccaaagtggcaaacaagcataggctgcaaatgctggagcactttactgagtgcattcgccaggccaagagcagtcgccaagaagccgttcaaatgaatatctttacggctctgctatgcgctctaaaaaatctgacagatagcaagacaagcctaggacaggaggatgttcgaaagagtgccacggcattgatagttgcttcgctgacgagtgccaactctaccatacggtgtgcggctggagaggccttgggtcgattggcccaggtcgtgggagattctcattttaccgcggagttggctcaaaatagttttgataaactaaagtctgccagagatgtggtcacgaggacgggacattcacatgccctgggctgcctgcatcgctatgtgggtggcatgggctcgtcgcagcatctgagcaccagtgtatctatccttttggccttgggtcaagatagtgcatcgccagtggtacaggcttggtcgctttatgctctagcgcagattgccgactctggaggaccaatgttccgcggctacgtggaggcaactttgacgctgtgtctgaaacttttacttaccgtaccccacgctcatgttgatgtacatcagtgtgtgggccgtgtagtcaatgcgttgatcaccaccgtgggaccggagttgcaaggaggaggaggcgcagtggccaccatgagaggatcattcctctgctcagcagctcttcttcaatcacattcggatcctcttgtacaagctgaggctattggctgcctgcagcagctacatctttttgccagtaaatctctgcaactagaggagttggtacccacgctggttggaatgctagcctgtaactatttcatacttcgcaaggcctccgtttcctgcctccgtcagttggcccatcgagaagctaaggaagtgtgtgaattagctttaactattaacgccgaacaacttccggatttggtaattacggagtatggacttccagggctgcttttctcactgctcgacacagaaacggatgccgagatgctgagaaacattcacgatacactcacatcaatgctccaaatgctggctgcagataatctcagctcctggttgagtctttgcaagaatgtgttaaccgttgctgtggaaggaggactaaatgatgatcccgctgctggggaacaaagcaagagcaaggaggctggtggagaagatgatgaagaggacgaggaggaagagtatgctgatgatgtaacagaataccgagcagaggagaacacatccacccatccagcagtgcagccaaggtggcccactcgtgttttcgccgcccagtgcgtgcggcggatcatagccagctgtgaggctgccagttcagtgcactttgatctcctgcaggctaaggaacagcaacttattcgttctcgcggagattacctcatcctccatttagcggaacttattcgaatgtcctttatggctgccacctcggactcggatcaattgagattagaaggattgcgcaccctgcaggaaataatcgatcgatttgctaacgttccggaaccggagttccctggtcacctactcttggagcagttccaggctcaggtgggagctgccttgcgccctgctttcgcgccggataccccctcccatgtgacagctgctgcttgtgaagtttgctcagcgtggattggatctggagtggctcgcgacataggagatctaaaaagagttcaccagctgttagtcagttcccttgataagctttcctcaaaaaccaacagcactcagttatataacgaatccatggctactttggagaagctaagcattttaaaggcgtgggcagaggtttatattgtggccatgataggaaatggaaaggctccggcttccctactgaatctccaatcccaacaatccggctttcaatccttaaccaatctggaaacggactcggatgttcctgacagtaggggtgaaagtcttttaggattagtgcaacctgagctccacaatctttcaacacactggctgagtgctatgaaggatcacgccttgctgcttctacctgcggagttccaatcccaactaccgcacgacggaggagccttttacaccacggacaccattaattcgtcaaaaccacattacatgaccagttggcccccaatcctctatgcctccgcactatggttaagggatgaagggttcgcccgtcatctagacacaagtgaagccgcagctgagtccaacaataatcagatcactcatggatctttgtcagcggatcgcttccatatgatcttcggcatctgcatggaggcgctctgcagcatgagaagctctgaaaggccgagaaacattgtgagctgccttcgctcactgcacagcatctttgattctgattgggctaggaggcagttggtcaaggatcgggctttaaccattgaactctgtcatgttctacatcgtcagatactgacgagagatgaattactcgtacaacttctgtgcgtagaaattttaaagcaaacaatccgcgctgctagggaagacttagaaagaaaacgggacgataatgccaattctgaggacggaaagggtggagagcgacatggagaagatgattctatgcagccaggaagctcgcatgtctacgccgttctggaggtttgtctttgcctatttgttcgccaaatacctacgatgaatcccacgaggcagggagctggtggctccggcttacagctggactttgcctatgccaaaatggccactggctcgtcattcttctcggtgctcggcgatgaaaacggcctgctagtatccagcggactgcagtgcgtcgaacagttgatggatttgtgtactcccaaaggtgcccttgcaatcctgcccaccgtcctgtatatgacaaccagtatcgttaaagaaatcgccaacaagtcggccatagatagtactatcttggcaaatacgtgtgctgtgaagtctgccctgcagtgcttgcgatccgtttgtgtccacaagtgggctaaagtagaggagacaaccgaggaatggcaacagttactgcaaagtgcactggccaccattgtggatctcaccaaaacggctggcgataacgaggaaaggaaagtcgacgaggtcactatgctgctggccatcactgtttttattctacatactcccgcctccgttgtggctacaccttcattgcaatatccatgcattaatcacttccggcagtgcctgcagtcggagaacctctcggtgaagctgcgctgcatcgagaccacgcgatcgatcttcgctcgggccgaattgaagacggcaacaccctacatccacgcacttgcgcctaggataatcgaatcgttgtatgcggagtccagcaaggtgcccacaagcgaactggagctacaggtcaccctggagagcatcgttaccgtggagcagcttatagacttgtcggagccgcagaaccatattcagatgctgactctgttggtccctgtgctcattggcttcctagcggaacccagtcgactccggacgctgccaaagtatcaacggcagctgcacgaccaggcgctgcagtggctactgaagatcggtccgaaatatccgcaggagtttaaggccctgatgggtcaaacaccggaactgcgacaaaaactagaagcggccattcgcagccaacagcagtcgattaacattgcccaaaaagcaagcgaggcgcagaggaacctgctggccaagccgcagaagcctacgatcaagctgaagacggatttcagtaacttccaatgagcgcc

SEQ ID NO: 4929 - protein, 2117 aa, DROSOPHILA
MELAHTLILNEDALKQLPEHKRPVFELEWLRYLEKALPLVSKAEIKASQKKLVQQLSERIQGAPGPPIRKLIASALATLFSVGDTFMLFDTVNACNDILKNKDDSPSYLPTKLAAICVLGSMYEKLGRMMGRTYEDTVQILIRTLRNAESQARIEIMHTLEKVSAGMGTAIANVHKDIYKAAKHCLLDRVMAVRVAAARCILKMIYSAPFLYQTELESLGTLCFRAFDGSNYEVRCAVAQLLGTLLAYTQQLAEAATSKKKQGQAVAIQAGKGATQRLVSLDEALGILMSGFLRGGASFLKGTGEIIKGSSGVNREVRVGVTHAYVVFVQFMGSVWLERQLSTFLAHVLDLVANPKAACSHVDAVYSRKCISFILRSTIGKMLGEKAQSAACKELVHLVAKQMNSIDFNPENAKDSNQETLFSQHLLVCALQELSSLLIGLGTTAQNLLGDQSLQAIDATCAVLVHPCAAARLAAAWCLRCACVAVPGQITPLIDRFVEAIEQMRSSPEAMAGYSCALAAILGSVRYSPLGIPHTKGKVVFNCAEELLRSASQNSRMSLHRTQAGWLLIGAIMTLGSPVVKGLLPRMLLLWRNSFPRSNKELESEKARGDAFTWQVTLEGRAGALSVMHSFLLNCPDLLNEDITRRLLTPIESALAMLVNLASVLKSYGTQLKAPAAMVRLRLFETLTLLPANALEASYTHLLRMLVSEFTLSDNAANTTNSLLRTLCHGDDSIILGTWLQETNHRTIEDQMEPNRKVDGEHLQPNSAAGSGALEHDPCCLYRPRSAQGNGSSSNGSSATSTGGSNGGGGSNIQQISKAQQCPGPLPLGVAVIDMAVTLYGTIFPKVANKHRLQMLEHFTECIRQAKSSRQEAVQMNIFTALLCALKNLTDSKTSLGQEDVRKSATALIVASLTSANSTIRCAAGEALGRLAQVVGDSHFTAELAQNSFDKLKSARDVVTRTGHSHALGCLHRYVGGMGSSQHLSTSVSILLALGQDSASPVVQAWSLYALAQIADSGGPMFRGYVEATLTLCLKLLLTVPHAHVDVHQCVGRVVNALITTVGPELQGGGGAVATMRGSFLCSAALLQSHSDPLVQAEAIGCLQQLHLFASKSLQLEELVPTLVGMLACNYFILRKASVSCLRQLAHREAKEVCELALTINAEQLPDLVITEYGLPGLLFSLLDTETDAEMLRNIHDTLTSMLQMLAADNLSSWLSLCKNVLTVAVEGGLNDDPAAGEQSKSKEAGGEDDEEDEEEEYADDVTEYRAEENTSTHPAVQPRWPTRVFAAQCVRRIIASCEAASSVHFDLLQAKEQQLIRSRGDYLILHLAELIRMSFMAATSDSDQLRLEGLRTLQEIIDRFANVPEPEFPGHLLLEQFQAQVGAALRPAFAPDTPSHVTAAACEVCSAWIGSGVARDIGDLKRVHQLLVSSLDKLSSKTNSTQLYNESMATLEKLSILKAWAEVYIVAMIGNGKAPASLLNLQSQQSGFQSLTNLETDSDVPDSRGESLLGLVQPELHNLSTHWLSAMKDHALLLLPAEFQSQLPHDGGAFYTTDTINSSKPHYMTSWPPILYASALWLRDEGFARHLDTSEAAAESNNNQITHGSLSADRFHMIFGICMEALCSMRSSERPRNIVSCLRSLHSIFDSDWARRQLVKDRALTIELCHVLHRQILTRDELLVQLLCVEILKQTIRAAREDLERKRDDNANSEDGKGGERHGEDDSMQPGSSHVYAVLEVCLCLFVRQIPTMNPTRQGAGGSGLQLDFAYAKMATGSSFFSVLGDENGLLVSSGLQCVEQLMDLCTPKGALAILPTVLYMTTSIVKEIANKSAIDSTILANTCAVKSALQCLRSVCVHKWAKVEETTEEWQQLLQSALATIVDLTKTAGDNEERKVDEVTMLLAITVFILHTPASVVATPSLQYPCINHFRQCLQSENLSVKLRCIETTRSIFARAELKTATPYIHALAPRIIESLYAESSKVPTSELELQVTLESIVTVEQLIDLSEPQNHIQMLTLLVPVLIGFLAEPSRLRTLPKYQRQLHDQALQWLLKIGPKYPQEFKALMGQTPELRQKLEAAIRSQQQSINIAQKASEAQRNLLAKPQKPTIKLKTDFSNFQ

SEQ ID NO: 4930 - DNA, 3083 bp, DROSOPHILA
taagtttccgacttaacacagcattaagatgcattgcccagtttttcggtagtaaatatcttttatacaatcgattaaatactaaaaaataaattaatttttactttaggtataaacgaactaattaaactagtatattaaatacggttgcctattttaagtttccgacttaacacagcattaagatgcattgcccagtttttcggtagtaaataagcgctcagtaaaagtaccgatcgcattttgtataaaaaacgatgattttagcattagcatgtcccaggaaattatccctaagaaaaacatcacaaaaacaccgctatagccaccgctgtttaatcgcattattataggcaaaacaaatcacggttcatcgctcttttaccgctatttattcactacctacatacatatacatattgaaggaggggacatttggcatttacatcaaagattagcggtttttcatgaccttttttacttttttcatcagttatttattactatacatttatttgactttttatttaaattatacataggatttaaattcaagaatacaaatgcatatagaattctagagctttggggacgtcttgttatcctacatagttagggccagcttattttcagttaagcttggaatatgggtaaccttaaagtaaaatatattaggataatacaacaattaaacttctgagtaataattgacgctgcttgtaaaatgaatccattacctggcataattaacgaattaaatgccaaaatacttctcacaaaaagctagtcgcaagaaccaatatattaaagttttttaagcatttgaagttgtggggtattgaggatattaaaacgagggaagtgaatattttgaatttaatcaccgtctttaatctgaattcacaatgaaatgcaacataagggaataagaattaacaagtcacattcaaccaaattcccttacgactgctcccagggaaagccattaaaaaaataagcatgagtttcacgtttgtacaaaatcatttcggccaaactaaaggtgttttattcagacgataaacagtactatcaatatggagttcctcgactagcgaggtcggactgcttagtgacccgcggtggcggccttggcagcgatctcgtcctccttagcatgcagggcgatgagctcctgcttcttggtggcaatacgctcctcgcggcgcttgcgggcctcacgcaccttctgtcggcgagcctcggcctgatcagccagcatcttgctgcgctgcttctcagccttcttcttgtggatgtactccatgaggacgcgcttgttcttgaatacgttacccttgcacttcatgtacaggtcgtggtacaggtgcctgtcaatcttcttgctgtcgcggtacttcttcaacaggcggcgcagaacgcgctggcgctgcatccacagcagcttggtaggcatgcgggcgttcgcagtacccttacgctttccgaatccgcagtgacgtcccttgcggcgggcctcggtgtttttgcgcacacggtaacgggagtggaccacgacgggcttcttgatgatcagaccatccttgataagcttgcgaatgttctgacctggaatgggttaacaacacagttagctgggctgtctattcgaccatttagaccatttctactcacgcgagtttgtgttagcgatctcgttgatttcattgggatccaaccagaccttcttcttgccgcatcgcagcacggaggctgcgagcctcttctggagctttagagaactgcaaaggagggtaacttgttagtccatcatttcgaaagtagcgtgctgggatgcgcctatcagcttgtgtgtgtgtgtgcatgagcgtcgcatgttcggttatttcacaactgccgggaaacagaatggcacttgtccgcccggcagctgcatcatacggcacgcgctcgcccggcacactttgcaaacatttagaccccgcgagcgcaacttttcgctcatatttgcgaactcaaatctacctcatgctgtcgacctcgtcgtggctaggaaagaaagaaaaatttgacagccggaagtcagcaccattttctgaagggtgctatcgatacatcgataacgtactcgggggtctggcaacgcctcggggatgtactagtttaagcggagtggcaagatttatttaaaaaaaatatttaataacaactactttgtgcggtttccagcagcttggatgtgcaagatccggccatatttatattgttcgaattaagttagagcaattaagtaacgaagcttggtatattttatttatctacttgcggtcacactaaattggctaagaaaaacaaaaacaactttttagcccagttgcagctgttcagagtgcaatttctgcaatgcagcacacgcttatacgctgcttgggcatggcccggatatccctgatgcgtttgcagcccagacccacagtggcagcctccgggggacaggaagctgggtccatctcgaagccaacacaaccggtcagtcggtctttcgcctcgctgccgcaggagcaagacaagaaggagcagaatgccagagagagccttaaccgcctgcctcgcctaatggactttccagagatcgtgtggccatcggcgcttaactcgttaaaaaattggatcaccatacagttcataattcgaccctacttcgacagcgagtttcaactcaaggacttcatatacggcgccaagcaagcgctgcaggtgcgtcatggtttgtctatcatgaagtgtaatgatattaattccctcataggtagtatcctcaaaactgatgggcggcgacttagactccctggacaatcttgtctcgcccgaggcgatcgcagagcttagaccggtaatccaaaaactgtcaatgacgcaacggaggcagctagaaatcaaggagagcgacatatacctcagctttccctatcaggtaggtattatgtttgacgatgcaaacgacaagctgcagaagcgtttcgtagagatcaccatggtgtttcacgtaatgcgtggtctatccgagatgcgggaacgcggcg

SEQ ID NO: 4931 - DNA, 773 bp, DROSOPHILA
acttccggctgtcaaatttttctttctttcctagccacgacgaggtcgacagcatgagttctctaaagctccagaagaggctcgcagcctccgtgctgcgatgcggcaagaagaaggtctggttggatcccaatgaaatcaacgagatcgctaacacaaactcgcgtcagaacattcgcaagcttatcaaggatggtctgatcatcaagaagcccgtcgtggtccactcccgttaccgtgtgcgcaaaaacaccgaggcccgccgcaagggacgtcactgcggattcggaaagcgtaagggtactgcgaacgcccgcatgcctaccaagctgctgtggatgcagcgccagcgcgttctgcgccgcctgttgaagaagtaccgcgacagcaagaagattgacaggcacctgtaccacgacctgtacatgaagtgcaagggtaacgtattcaagaacaagcgcgtcctcatggagtacatccacaagaagaaggctgagaagcagcgcagcaagatgctggctgatcaggccgaggctcgccgacagaaggtgcgtgaggcccgcaagcgccgcgaggagcgtattgccaccaagaagcaggagctcatcgccctgcatgctaaggaggacgagatcgctgccaaggccgccaccgcgggtcactaagcagtccgacctcgctagtcgaggaactccatattgatagtactgtttatcgtctgaataaaacacctttagtttggccgaaatgattttgtacaaacgtgaaactca

SEQ ID NO: 4932 - protein, 203 aa, DROSOPHILA
MSSLKLQKRLAASVLRCGKKKVWLDPNEINEIANTNSRQNIRKLIKDGLIIKKPVVVHSRYRVRKNTEARRKGRHCGFGKRKGTANARMPTKLLWMQRQRVLRRLLKKYRDSKKIDRHLYHDLYMKCKGNVFKNKRVLMEYIHKKKAEKQRSKMLADQAEARRQKVREARKRREERIATKKQELIALHAKEDEIAAKAATAGH

SEQ ID NO: 4933 - DNA, 3641 bp, DROSOPHILA
ttgacagcgggagctctagtctcatcaagttaaacaacaacacgatactctacctgcgggaggtgaacaagttcctggccctggtctgcatcctgcgcgaggagaacttcaaccggcagggcgtcatcgactacaatttcatctgtttccgcgacgccatcagcgaggtattcgagctgcggctaaagcgccagaagcagctggagaacaacgaccaggacgacgatgatctggtcgatgagcagaccctgattcgccatggccacgacgcaggtggaatttcgcgagcgcagccaattaattaggcgcactgcatccccaagcggagagccccttttattgcccccctacgctagcttctctgtggactctttgattccaatttgtacgttctcttccgttaaatctgatgttacctttgtctattgatacgttaggacgccactctcacagagcagcgtaaaaaattgcccagcggttgaaattattgataatactaccaataaacatgtctatttttaaatacgagtgtgctcttgcctaatttatttccttaatttttgttacgttacagcgcaccagtataaaatagcaaacaaagatgttagggatcactttttgtaagtgctatactctatgatagttcattgtttttagatacttttgaaactctaagaaaagataattagttttaatcttttgagaaagcagctattcacaggacgaaagccatgatctaaaatctctccgctgagtaaagcaaactattttgatgagcgaaacaatatattgtctcggtaaatatataagaaagaaactatcttggaaacttcatacttgcttcctacacaacattcctaacccgctagagtacatagacccatctctttctccttacatcggctactccacatgttatgtttgatcaactgttttcaggaactgtagcttcagaccaggccaagattatggtgctcagtcgcttggcaatcccattagggttcagttgcgggtgaaaatagagtctttgacgtacgtgcaagacaataattggacacataacccacttcttgtttgcacaagtgaaccattctgtgttcccagttgaaagggaaaccccaataagtgcagaatgacgagtgcaagtctattgtcgcgttccctgctaacagaaggtgcataatcctcacatatatcataccaaagaccctagaatattctagtgtctttgatcataccaactatctatgagctacctaatccactgaccaattgcagctccgcgttctaagaatcgctcggtgtttaccttgattgctggtttggtggtcggctactgcctggctcaaatcttctccagcattgcgccgcacgagagtctctatccgtatctcagcagacggttcagcgattcccaggtggccaccggtggtcaattggctccggagcagagcgggttgaagcatgatcatcgcaacgacaacgtcagcgtggccgagcagttgaagaaggaggtacgcatcctctgctgggtgatgaccaatcccacaaaccacaagaagaaggctcgccatgtgaagcgaacctggggcaagcgctgcaacatcttgctcttcatgagttccggcgcggatgaggagctgcccaccgtgaagctcgacgtgggcgagggacgggagaatctatgggccaaggtcaaggaggcgttcaagtacgtctatcatcaccactataacgacgccgacttcttctacaaggccgatgacgacacttacgccgtgatcgagaacatgcggtatatgctctatccgtacaatcccgaaacacccgtgcacttcggattcaagttcaagcccttcgtgaagcagggctacatgtccggcggagcgggctacatactcagtcgggaggccctgcgtcgcttcgtggtcgagggcattccgaatcccaagatgtgcctgccgggcacggtggtcaacgaggacatcgaaatcgggcgatgcatggagaacctgaacgtcaccgccggcgattccagggacgaaatcggtcgcggtcgcatgtttcccttcataccggagcatcacttgatcccagccaaggcggataaaaacttttggtactggaactacctttactacaagacggatgacgtaagtttcgcctgataagggataggtattcttaacatcttgtgttccgacagggtctcgactgctgctcggacttggccatctcctttcactacgtagctccgaattccttctatgtcctggactatctcatctaccacttgaaaccctacggcctactgcgatccctggagcctctgcccgccaaactcaaagtgggtcagtttctgccgcctcccgtggaggccagggggcgcctggccagtaacgaggattccgccgatgattacgacaggatctatacgaccacgaccgaaaagccaaaggagcccgatgctcgggaaatggactccaaggaggtggaaaaagaggatgccaaatacagggaaaagctttcaaaggaggacgaggaacgcgaagactcgcgaaaaactgacaatgattcggagtatactgaggaggaaacggaaaagcgttccaagtccaaggaaacatcgaaagaaaattaaaatttattgagtttacttggcaggctttggaactgagctgtttctgagtctacgccgctcatccggtttatacattttaataaaaattttcttagattattattttagaaggactattttcaaatacatcataataaagataaagtaaatgcagtaatgggaatggtcagatgtcagttctttaaaaaaattagttgattcaattccatgctaagttgggagataatcgattagccaaaggctcggaattttaaaatcctaaactgatcctttggattcgtaggagattccagtcaccacatggatatgctttttcggaagttgcattttaataaataactaattttaaacattaaaactgcactgcacgcacatacaagacaacattgcgtatacgtgattatgagttacatttttaggatcagtacgtagaaagcaaatattttgaggggatttatgtttcaaaacataggattgtgttttaatgcaatatgaatgattattaaactgtaacataataaaactaatattctatttataataattatattatgcttgcattttgtacattgagtttcaaggaaaatggatttcgtaatcaattagtaaactaatatatttccaataattatattattaaattatatttcatttgtatagttcgcagcaaaatggcctattgcaccttttgacctttttgcaccttcgggcgtaagtttctatcttgcgattactgaatttcgtattaataagacatctttggtcgaaatgatatgcaatttgaatgcgattaaagatctattcctgacatgagaccaataataatgcccattagctaaatgagcacattgatgtctctatacatttgttttttagaaaactgtgttctgaatgctcactgagtactttcgtacgctctcagggtgcgcttcgtcactacgtgaacgggcgtctacatcgattagatgataagtgaggaagactggaatgcctagatcga

SEQ ID NO: 4934 - DNA, 1474 bp, DROSOPHILA
gttcagttgcgggtgaaaatagagtctttgacgtacgtgcaagacaataattggacacataacccacttcttgtttgcacaagtgaaccattctgtgttcccagttgaaagggaaaccccaataagtgcagaatgacgagtgcaagtctattgtcgcgttccctgctaacagaagctccgcgttctaagaatcgctcggtgtttaccttgattgctggtttggtggtcggctactgcctggctcaaatcttctccagcattgcgccgcacgagagtctctatccgtatctcagcagacggttcagcgattcccaggtggccaccggtggtcaattggctccggagcagagcgggttgaagcatgatcatcgcaacgacaacgtcagcgtggccgagcagttgaagaaggaggtacgcatcctctgctgggtgatgaccaatcccacaaaccacaagaagaaggctcgccatgtgaagcgaacctggggcaagcgctgcaacatcttgctcttcatgagttccggcgcggatgaggagctgcccaccgtgaagctcgacgtgggcgagggacgggagaatctatgggccaaggtcaaggaggcgttcaagtacgtctatcatcaccactataacgacgccgacttcttctacaaggccgatgacgacacttacgccgtgatcgagaacatgcggtatatgctctatccgtacaatcccgaaacacccgtgcacttcggattcaagttcaagcccttcgtgaagcagggctacatgtccggcggagcgggctacatactcagtcgggaggccctgcgtcgcttcgtggtcgagggcattccgaatcccaagatgtgcctgccgggcacggtggtcaacgaggacatcgaaatcgggcgatgcatggagaacctgaacgtcaccgccggcgattccagggacgaaatcggtcgcggtcgcatgtttcccttcataccggagcatcacttgatcccagccaaggcggataaaaacttttggtactggaactacctttactacaggtctcgactgctgctcggacttggccatctcctttcactacgtagctccgaattccttctatgtcctggactatctcatctaccacttgaaaccctacggcctactgcgatccctggagcctctgcccgccaaactcaaagtgggtcagtttctgccgcctcccgtggaggccagggggcgcctggccagtaacgaggattccgccgatgattacgacaggatctatacgaccacgaccgaaaagccaaaggagcccgatgctcgggaaatggactccaaggaggtggaaaaagaggatgccaaatacagggaaaagctttcaaaggaggacgaggaacgcgaagactcgcgaaaaactgacaatgattcggagtatactgaggaggaaacggaaaagcgttccaagtccaaggaaacatcgaaagaaaattaa

SEQ ID NO: 4935 - protein, 366 aa, DROSOPHILA
MTSASLLSRSLLTEAPRSKNRSVFTLIAGLVVGYCLAQIFSSIAPHESLYPYLSRRFSDSQVATGGQLAPEQSGLKHDHRNDNVSVAEQLKKEVRILCWVMTNPTNHKKKARHVKRTWGKRCNILLFMSSGADEELPTVKLDVGEGRENLWAKVKEAFKYVYHHHYNDADFFYKADDDTYAVIENMRYMLYPYNPETPVHFGFKFKPFVKQGYMSGGAGYILSREALRRFVVEGIPNPKMCLPGTVVNEDIEIGRCMENLNVTAGDSRDEIGRGRMFPFIPEHHLIPAKADKNFWYWNYLYYRSRLLLGLGHLLSLRSSEFLLCPGLSHLPLETLRPTAIPGASARQTQSGSVSAASRGGQGAPGQ

SEQ ID NO: 4936 - DNA, 2927 bp, DROSOPHILA
ggatgaatccgaatcggcggatgaatccgaatcggcatccgagtccgtatcggcactcacaaccagggtaacgaaaagccccaggcacacaaaaagcaaccataactttgtcaacttcatttcgacactatattctatttgactctgagggatccgataatgctatgtcgcaatttatagtaaaagctccagaccacgttttatttacccaagcgaaggccaaaattaagtcaaatatcaaatctctcagaacaaaaaaaaaatggttgaaaacaatagagctggtgattggtctccgcgatgacggcaattggttggaaaaatgtgtatctaattggcaaatgacagggtaactggaatgatcctagttgagtcttgtctatgtctaaccatcgccacaagtaataaaatttgtttaccttagtaaacgatttgagcaaaactatttgatttgctcacacaactagtacacgcaatttttccacaactcgattcagtcaaaaaaaaataaataaataataaacaaaataataaacaaaaccacgatcaatatggaagactgcaacagctgcggttaagtaaactaaagctggtgctcgagataagttggtttaagccaacccgccggtccaaaaatggaaaacatacctttctattctgtaaatatttgtgaaagacaagttcgaggcacccgcactgtcctacacttcacgaacatattaataataatttttgattccatatatattgaatttaatattaaaatcattaaacaaatgggctttaattacaatgcgcaaacaatttcaacaagtttatcatgattcagcatacccttagctgaattatatttgtatatcgcttacttttagtttcttcattttaaaccgtagaaattgttatttttttgttgagtgtatcttaaattgttcgatgtgtcgatggcaaaatgcagtgggtatataaagcgcatcacgcggtattgaattccaaagtcaagatgcgcttggagttgttggttgtgttattggtggggctggctgcacttgccccgtcaggttctacatgctgtaaaactgaaccaccgagatgcgaaaccgaaccaccgagatgcgaaaccgaaccgccaagatgcgaaaccgaaccaccaagatgcgaaaccacgccacccacatgcaaaactgagccacccacatgcaaaactgagccacccacatgcagaactgagccacccacatgcaaaactgagccacccacatgcagaactgagccagccacatgcaaaactgagccacccacatgcagaactgagccacccacatgcaaaactgagccacccacatgcagaactgagccacccacatgcagaactgagccacccacatgcaaaactgagccacccacatgcagaactgagccacccacatgcaaagctgagccacccacatgcagaactgagccacccacatgcaaaactgagccacccagtgaaaagcactgcacgaaacgcatcaagcgacaccgcacaaaaagaaccaagcgatcgaaatccaccaaaaagatagtacatcatcataaccgtccaggaacgacaccagaatcgggatgtggctgtggatcgaaaaacgaatcgggcggtggaggaagcggatgtattttgaaggacctgctaacaccgaagtgccccgattccaaatcgaagtctcaagcttcgtgcaagcctgcacccaagtgtaaatccgacccgaaaccgaaagccgcatcgaaagccacatctaagccaaagccaaaggcgtgtgattcaggcaagaagaacaccaccaagaaaccgcggaagactcagccacaaaaaggtggttgctaaacagcaaacttgactcaaatgtcgttgaatatgaataaaatcacttttttttttttgaatattatattatttgaatatattattattgatttcactagaaatggaatgtgtcacttaaagcgaatcgccatttccttagtgtctgatattttctgctttattgtgcgaatccgctggccatttctactttcagggtttccagagccagagttgcacctgaaattcttttgttcggctcacttaacgggatttggggtcatgtaatttatttccagaccactaaacacaaattacacatgcaattgtcgctgtccaaactccctgaatgctgacaatcccacagatcctgtggcaccacattcacatcgcgtgcgttaatgttgcccatcaacgagagcacatatctgcgtctcttttagtgccgttgctgggcctctctttcgcacccattgtcttcgcattttgcacgccattttgtgtgaccacagcggaaatgaacttgctgacaatgcagtcaaagatacacaaaggaaatttcatttgaaggcgattacaagtgtgttgaaaaaactaatctaaaacatttgttatttttaatttatctgtttttataaatttaatcgacgatatttgaatgtctgcgagtctgttcgaaggaagtttaaggaagctctgatccattttgttcagtgtattagcccatccatatgtgtgcttgtatgcactttgtgtgtgtactagtgagtggaaagtggtgtattaatttatcacggtagaacccttgaggtgactcgtactcaatcattccatgcgaattcaaaagtacacatttttaattctattaaaatcgtgactctcttgcaaaagttacaagaaaatctgccagtataacctgcgtccttctttcaactttcaaatgtctgttcgtttttttttttttttttgtagggttgcgttcgtgcgaattatgtcaattgggatgcaatggttcgaaagtacataatgacttggcattttgccaagagcccccaattgcataaatgtgcataaattttccccattt

SEQ ID NO: 4937 - DNA, 927 bp, DROSOPHILA
atgcgcttggagttgttggttgtgttattggtggggctggctgcacttgccccgtcaggttctacatgctgtaaaactgaaccaccgagatgcgaaaccgaaccaccgagatgcgaaaccgaaccgccaagatgcgaaaccgaaccaccaagatgcgaaaccacgccacccacatgcaaaactgagccacccacatgcaaaactgagccacccacatgcagaactgagccacccacatgcaaaactgagccacccacatgcagaactgagccagccacatgcaaaactgagccacccacatgcagaactgagccacccacatgcaaaactgagccacccacatgcagaactgagccacccacatgcagaactgagccacccacatgcaaaactgagccacccacatgcagaactgagccacccacatgcaaagctgagccacccacatgcagaactgagccacccacatgcaaaactgagccacccagtgaaaagcactgcacgaaacgcatcaagcgacaccgcacaaaaagaaccaagcgatcgaaatccaccaaaaagatagtacatcatcataaccgtccaggaacgacaccagaatcgggatgtggctgtggatcgaaaaacgaatcgggcggtggaggaagcggatgtattttgaaggacctgctaacaccgaagtgccccgattccaaatcgaagtctcaagcttcgtgcaagcctgcacccaagtgtaaatccgacccgaaaccgaaagccgcatcgaaagccacatctaagccaaagccaaaggcgtgtgattcaggcaagaagaacaccaccaagaaaccgcggaagactcagccacaaaaaggtggttgctaaacagcaaacttgactcaaatgtcgttgaatatgaataaaatcacttttttttttttgaatatt

SEQ ID NO: 4938 - protein, 287 aa, DROSOPHILA
MRLELLVVLLVGLAALAPSGSTCCKTEPPRCETEPPRCETEPPRCETEPPRCETTPPTCKTEPPTCKTEPPTCRTEPPTCKTEPPTCRTEPATCKTEPPTCRTEPPTCKTEPPTCRTEPPTCRTEPPTCKTEPPTCRTEPPTCKAEPPTCRTEPPTCKTEPPSEKHCTKRIKRHRTKRTKRSKSTKKIVHHHNRPGTTPESGCGCGSKNESGGGGSGCILKDLLTPKCPDSKSKSQASCKPAPKCKSDPKPKAASKATSKPKPKACDSGKKNTTKKPRKTQPQKGGC

SEQ ID NO: 4939 - DNA, 10892 bp, DROSOPHILA
catttgctctatttcccgaaggcattagctacgccatcaacagcaccattccagaatcctaccaaactttcactaaatcagtcagcacatcagcaacactgctggcggatatgcttactacaacgcctaagtcaaaactgacaaactttcagtttaacatcaacgagttcatggccaatcttaaggaaagcgatttggccagtgtcaacccggctgttaatccgttgatcaaatatttgaaagatcttagtactgacgataacggaaataaaaatttacccaatccgctggttaatcgtcgccccgtaactgggagtaccagcaccttgaacagcacagctacgaccccccaggtagacatcacgccgaacacaccagcgtacaaaaaacgcataagacctgagccgacactccccacgcagagcactccgactacaatgaggattctgaaaggctacgaacattttattaagggcatacagaatcaactcaactcgcggaactctagccaaagtaccgtctacaacacatcaaccactttaatacgaatgccaaccaccacgaccatcaagagtgtcgactattatgacgaggattacgaagaggatgatgacatattgcctccgtctcaaatgcctccttatatgccagtctccgagaccatggcccctccccgccgacatttggctacagtaagacccaatactgagtcgccagggaaaggtccagccaatttccagacggggtttctggaggcaacaacaacccgacgtccgtttcccaacttcacccaggagaagcaagcagctgctgaggccgacgtgccctcatttataagctttcctagtgacattttccaagaactaaagcaacggctgcccaagctcccggaatccaacgccccacaatccagtaccaaaatactcacaactccacgcagtgtgcgcccaacctcccatccaaggcctatcgcctccagtacagaacagcagtcaactcgagtgcgttatacaactatccgaccacgcatacgaggacaacaaaaatggaatacgacgtcaccagtccaagaacaaaaggaaataaataatcataccgaaagcaataccgttgtcttaaactcaagcaagcagagcaacccgggcggcattcctctaaactcaatacatgccggctcaagtccagaaagacacaggtagctatatgagccgagacaaatctctgattgttgaattctataatgccgctacacagatacacaagaatttagtgaatacagaaaccaagtgctcctctatgtaaatataccatatattctacaccgctccgcccaactcggcggcaacaccgtttatacgtatacgataagacccactactaagcaattcacgtaacgaaattatcaagctgtacagttgactaaacaaatgttctggactgggctcctttaactataaccataattttaacgctaaccccagctaatttcttgtgctaatcgcttcaatcttttcatccatcttttgtacttattattttgtaaaatttgtagaaattttcttaaaatcttattttacttttatctttcctatttataaaaaccacatgtctctcattaatgtaccctataacattttttgaatttttggcaatgtatataatttttgctatttattcgacaactctactctcacaaaccatcaacaacaaaaacaacaacttgaacagagttgagtcgccttcaccgtcatcgctagggacaccgcaacccgctaatatatttgtacagcccacgtcagcagccccgccgcaacagtcagagcccaatcgtaactactacaatgcatctacatttaatcatgggggcagctaccaaccacagcagcaaaaccaacaacaacagccacaaccaacaccattccaacaagcgcaaccacaagaacaacatcagcagcaggcacaagccccaacacattcatatgacacatcctattattcggtttacgacgacgatatcgatttatatagggatatagagtaccatcagcaacagtcacaggagcagcagaaaacacctacgccgcagtatcagtcggcagtgcgccaacagcaggcccacccaacctaccgccccttagagcttcccgccactccgaagcccccctcttacgaaaaccagccagcgtacaatacagactacgatgaggatattaatagccaggtacagaaaaatctatattagtatttctcatattgtaacttttaaataccgtttcttttcacaaactatatatatatttaaatactacgaattttatgtttacccataattttagattgaacaggataatgcgtacgatcatccaacacgtactcctcaaaggtaagtaattccatttaaatgctttgaagccacggcattcgttaatttaaaaagcattttaaaagagatcatccacgaaaaaactcaatcccagaaaaacagtcagccttgcaagcatgaaaagttcctgcaataagaagtatcccgcaaaactagttagaaccctaacaagtgtaaaacttcatattctcactacacatgcatcaaaatttttacacaaccaccaagccaatacgtatacaccaaaccacaatacatttatctatcagggcagaacatgtggccatacaaaaactggatacccgagccagccactcgagcacactcactctaacaacgccagcatctcaaccggaagtactcacatactacgaaacgctgaccacagcctatgctccgaagggcgggtctagcgactacggctatgggtcgatagaagactatgaccagagggaccgtttactaaccgaagtcaagtcaaggccccataccggtacggaagactttgacctaattgccaatgttgtgggccataccgacaagaccaccggaactccaccaacacgatcgcaaaaaacgaaatcgacgccgccacataacggaagccatgcaaggagttccaacaccacaacacatgctgttacgtttacaaagtcctcaacaataacaaccacatccacatttcctccaacgacaacaacaaaacttgcaaggtattttacctattcattggaatcgctacctgaaaaaacatctgaacaaaagtatctctgccagtcgcctttcaacgtaatcgcggatcagtcataaaccgattttcatgaagcttgtaatatatcatatttacaaaccatttgcagcttaaaattttggctatcacacagttacacccttatagcaatgtaatgatatatacagcgtcagcaaagttacacacttttttgcgtcgtgacagggatcaaaagctatgctgactgtttagacacttttgttacttaattttgtttttgtttatctttctaatatgattatttactcacatatattgcatgactattcataagataacgtttaggtgattcgaaatataggtacgcatgagcatgcttctatccgttaaatgcagttgtctcagattacagcccaaccgaaaacgataaccaaaaaccaaaattaattaaaaaatctgagaaccaaaaggctaggcaaataggcgactctatacgtatttaaataagttactaacacttatgtgattacttattccaatacacgtctcttcaacagctcgaaagcgcatgcaaataagccatataaacaacatattcctgacaagtcaaaaacaaccacaaaagcttccagtacatcttacatgaccacgaccagctccacaccttttcctaatcaccttacttatagttcaaatccttttctccaatcgaaactacaacaagttgctaagtcgttggcaagagtagtgccaagcagtcaacctaggataaattttaccggttaccctcaagctcaaaaccttacaaactcgccccaccagtccacaagtttggaatcagttcctgaccaagtttccggtcaaattatttccctaattcccccgcccaccaccacgcaaaggcccttggtaaaggacaactccagtaatagcagcccggacaacgttgacagtgcctttgacaagagtcatacaattaatcagacggttgatccgccaaagagtcgctcctttgaaacgaccacatcgtcaaagttcctagattttattaatgccgcagcgtatggtacaagcccgagtggcattcggctgaatgaagtgccagataatcttgttaacaaggatattccttttcgagacaaggacaactcgtttgagtcgagctcaccgaacacagaaccagagcccaaacgttttcagaagtacgtagattctgatgtacctccacaaagttttaaagttcccacaaagggtggaatgcgagcaccaacggaagaaatggaaagcacaagcacaaccaggccaagtaagcccctacaatatagtcttcaaagtggatcaaaaggttttagtttgcatgtggagccaatgatcgcaaagacgaaaagtttttccacaagcacaaccacaactagctcaacaacactggcggacttatttcagaagttcgtcgacatcaaacctacaacttacgctccaccacttctcatttggcgtagtggaaggcccatcattcaacaagcacttcatagaccaacagtcgcaactttcatcacatctactagcgttactacaactacatctcctcctacaacttctaaagatgtagctgagtctagcagcactaccagggccattacagcatcaaaatctgcggcgcagcccagccgagaacagaattttctaccaagggcaggttatttgccccgttccaattatttcaaggaaagtccaaatcgagtaacagccaaccctgctatgcattttgtctcaccgttcaaaagccttgagaacttgcttcatgaagatcgccagcaccaccatcaccaactacggactacaaccagaccccgctacacaaattctcctgcctttccggagttcctccagactacggcaaaatcacgaaagaatctttttatgatggcgtctgttagaaactctagtaaagatgttttggccacaatggagacaggaaacgctcgcaactttagtgtcagcgacgctatactaagcacattcagtcctcagcgtcctgccccaagtatgctgcgaaccactaccacgactacaacaactactaccatgagaccacctcccctaggaataacgtcgactgaagattcaacaaccgtttctgccataatcgcttcctctgccatccaaatatcacagtccccaaagcctgcgcgtgggcgctctcgatacacggcggccactttaaacagtctcggggacagcggggacgagcccacgacttatgcacccaagcttagattgctccgcggatatgatcccattccgctgcctaaaaccaagccccaacgagtacaagtgatcggcaatcagaggtctttgttaggtgggccaacagcaatgccacatgaaaagtatagggaaataaagggcacattgcacgccagagatctcgcctttggctcccaaaatatactaagcaagtcgcttaaacataaagcaatcgaaaatgaagccagcgtttcggacgagccaagagccgaggcgttaataagcaagcctttggaggacagttatcaaaatggcattaatgaaaaagaaactgcaatagattacagctccaccgaacacgtggtggcaataacagaacgtccaactgtcaagttcctttactctaacaaataccgacagcaaacggcggagcacactctagcagatagtcttcaaaactccggctacataacatcgcctaacgggtcgtcacagaagttcagatccgccaacgtccttgatcaactgaggcaatttctttccggcagtgacagcaacagcaaaagcgatgagagtgccaattcccaattcgttaatgagtattcactccccgaattaaggtccgctatcggtgaaatcaagaaactgtacttgcccaacgaccggccagcaacgaccactttaaaatctagcacgactacgttgcatcctgataccacgcctattgccacactatttccaatccgaatcaagggagtatccgttttaccgtctcttaacatcttgaccgctaattccactttaacagaaagaacaacgtcaagcactcctgattttagtacccctagaaccctcaaaacccctccagtttctctaactactgtccccactattcccaccggtacagctacaccctcctcatttgcaccgcacactgcgcgcgcttcgagggtgaataatgatattaagtcgtcgattgctgccgctgccctaggccctagcacctcaacctatcagccaccagtgtcagcgggtaaaacccaaaagtttcaaatcggcttcgctaccaacaataaaaatcaccaactccaaaagagcagcatcaaccataatgggcccgcagcctcagcctctgtgaagtgctccgatagcacactaaacgccaaatgcaacgaaatctcttcaaggtatagatacccgtatcaagcaatcttgcttctaagttcagtcgatctactatcttattgctctctttattcctttattagaatcaccgtaatttcgttttgtacacaacaaaccaagccccaacactgtactgtttttattatactgttttcaagctttctctagtctctcataccacccccatctacccacctctaattacatatttatagtaactcttccatttggttggtgttgattgttgacttcatcctgtcaacagttttctttgcttgaaacccaatacctattgaacagtgtttgattaatgtacttatatgtaaatattcaaagtagtgttctattttacagaaaattactcggtgacattatgcaaagcacacaagttcttactacaatttaactgctggttaaaatgttgcaaatactttagtaaataaattgtagaaagttgtcattataaaattccgtcaaccgatcgctggttatcgttatattcctagcggtggtggatagttaagtatatccctacaaaatttttttattctatattcacgtcaattggttttccaaatttttaaatgtcatcaataaccaataagttaaatattaaagaaattcatattttttagtttacatttttaatttgtatgcaaaatggatatatagatcatatataaaaaacggaataaacaaattaattgaaacattttcatatacgacaccgataaaaggcaaacaaaactaaatcaaatttttcgcacattttaccgagcataaatttggtacacgcttgtgtgttgttacaagaaaataatatttagaccccatagtaaatcctctagatagtctacgcaattgtctttaagtataaatctctactgcttagattaaaaacttcaacaataaataaatcagactatttgtgcaacttattgtgaatgattgctcatgaagtctttacgcataaataatacaattatttgtattttctcagtctgtattgtcgtttaaaacgaaacacattagtatgctataaaactttttggttctcactatagaaaaaagttaatgaattgggctattatattatgttgcttttgtcggtgaaggtgataaaaagttaaaattaaaagtttgtaatgattactaaccaacatataccattcaaacagttaatcttgcgttccttagtatctcttgtgtatttgtgcagcacaaattagtaaatgccatttaaattaaattatatttgagtagagaagctatgaccctaccaactcaaaccttttcataaacaactatatcgacaaacctcatctagaaacaacaacaggaaccggggcagtgccatgtacagtaatcaggatcgagacgtgatatccacgcccaaccgcggaactcatcctccgtaaggaatcgtctaatattttgttgcgcagtaagataacgtaaaattttttaagacgaacgcggccaacacttaagccatcgggaacaattgtatcaaaggctcaagagtttgtggatatataccgttacccaccgtcccgccctgaccctatttacccacagcctatgccagataaaacggcagccaaatgccgaaaggacgtatgccttttgcctgactgctattgcggaggaagagatattcctggtaagtacacgcccagttaggtagatcacgattttagtgcagaaacaatagcccttatgctaaataataacaataatgcaaaccaatgtgtaggcggattaaacgcctcagagaccccgcaattcgtacttatgacgttcgatgatgccgtcaataccattaatattgatctttacgaggaactctttaataataagtcgcggaaaaatcccaacggttgttcttggcgcggaactttttacctatcacacgagtggacggactacgtcatggtacaggatttgtactcgcaagggcatgaaatggcctcccacaccgtttcgtaagttgcgttaaaccgtgttgccattttcgagggtctcattctcctaaagcgcctcttgatcacagtccacatcggtatcttgttcttggctaaaatggttactcgttctatatccatctgctatgattttcttacttttttcacccacatttcatctacattgttaggcgagctacctgttgaaagcatccctcagatcgttctcttgacctttgacgattccgttaatgacctaaacaagcagttgtacacggatctttttgaaaaaggtcgcgtcaatccaaacggctgtcccatcacagccactttttacgtttcccacgagtggactgactacagtcaagtgcagaatctttacgccgatggacatgaaatggcttcgcatacagtttcgtaagtagatggaacaagtttttgacccgacaatgaaatacacaataaagtcaactagtagaggtatcgccgaatcacggtacttacatatgtagtcaatcacctctcataacaaatctcacacagaataaacccaaatcgctttgtttacaaaaaataacacttatttatatacctgtcctttggaaagagtgtaacatgtggaagggaccgtttaccactagctcgtctgtctctctaatagtccgtatgaacgtcgaatcttaataaatataaaagctctaaagctaagactaaacatgaatttattcagaagatggacacgcccactcttagactcttaaacagccgaaaacagtcatgcccatcgctttgaaagatttcttgacttaatttttgattttacaaaacgttccgtttgtacttccactatctcaacaccgggtatctaatagtcgagtaaattgactatagcgttctcacttgctaacaatagaaataactataaaggcattgatctacagtcacagctttggcgagcagttctcccagaagaagtggactcgtgaaattgccggacagcgtgagatccttgctgcgtacggcggtgtcaagatgtcggatgttcgaggcatgcgtgctcctttcctgtcggtgggcggaaacaaaatgtacaaaatgctgtacgactcaaacttcacctacgactcttccatgcctgtctacgaaaaccgaccaccctcctggccctacacgcttgactacaagatattccacgactgcatgattccgccttgcccgacccgttcctatcctggggtgtggcaggtacctatggtcatgtggcaggaccttaacggaggccgctgttctatgggcgatgcctgttccaaccctagtgatgcagatggagtgacaaagatgattatgaagaactttgaacgtcattacactacaaacaggtaaacctctactgaaactcttaatttaggtttaaatttgaaacaatggccctatggcttatttaatttcttcatctatgtattttagagcaccatttggcttgttttaccacgctgcatggtttacccagccccatcacaaagagggctttattaaatttcttgatgccatcaatgcaatgcaagatgtgtggataataaccaactggcaagcgcttcaatgggtgcgagaccctacaccgatatcacgcataaactcattccaaccatttcagtgcgattattcggtaggtatacacagttgattaacaatctagttcaggaaaccaattaaaaccaaaaaaaacaattgaatatcaacaaggatcggcccaaacgctgcaacaacccaaaagtgtgtaatttgtggcacaagtccggcgtccggtacatgaaaacgtgtcaaccatgccccgacatttacccctggactggaaaatctggaattcgatcttcccgaatcgataatgaagttgaagagccggcagcgtaagactggaaatcaatagtctcgcgttgaccatttgcggatggaccatcaataggcaaaagggacacctgacaatccaagatactgaaatataaaagcgataaacatttgagctcaaaatacggagttcactcgttaaaatgttttctaacaatttcgtcattttagctaattctttaaaaggagcctagttacatttttgcagcatgttaatacaaattatttattcccttttgcatactccataccattctgtatattcctatagatatttacgatacattgagcacgcaatcgctgcacgacccttgtaaacggaaatcaattaggcatagaaccctattttaataagtactaataaaaggcgtaattggtgcaccgagtctttgaaaataataaaattacaagtatgatttggatgcatcaagtccacacaccaagaacgcatttaggtattaggctaatataatttttt

SEQ ID NO: 4940 - DNA, 1288 bp, DROSOPHILA
agtgcgttatacaactatccgaccacgcatacgaggacaacaaaaatggaatacgacgtcaccagtccaagaacaaaaggaaataaataatcataccgaaagcaataccgttgtcttaaactcaagcaagcagagcaacccgggcggcattcctctaaactcaatacatgccggctcaagtccagaaagacacagaaacaacaacaggaaccggggcagtgccatgtacagtaatcaggatcgagacgtgatatccacgcccaaccgcggaactcatcctccacgaacgcggccaacacttaagccatcgggaacaattgtatcaaaggctcaagagtttgtggatatataccgttacccaccgtcccgccctgaccctatttacccacagcctatgccagataaaacggcagccaaatgccgaaaggacgtatgccttttgcctgactgctattgcggaggaagagatattcctggcggattaaacgcctcagagaccccgcaattcgtacttatgacgttcgatgatgccgtcaataccattaatattgatctttacgaggaactctttaataataagtcgcggaaaaatcccaacggttgttcttggcgcggaactttttacctatcacacgagtggacggactacgtcatgatcgttctcttgacctttgacgattccgttaatgacctaaacaagcagttgtacacggatctttttgaaaaaggtcgcgtcaatccaaacggctgtcccatcacagccactttttacgtttcccacgagtggactgactacagtcaagtgcagaatctttacgccgatggacatgaaatggcttcgcatacagtttcctttggcgagcagttctcccagaagaagtggactcgtgaaattgccggacagcgtgagatccttgctgcgtacggcggtgtcaagatgtcggatgttcgaggcatgcgtgctcctttcctgtcggtgggcggaaacaaaatgtacaaaatgctgtacgactcaaacttcacctacgactcttccatgcctgtctacgaaaaccgaccaccctcctggccctacacgcttgactacaagatattccacgactgcatgattccgccttgcccgacccgttcctatcctggggtgtggcaggtacctatggtcatgtggcaggaccttaacggaggccgctgttctatgggcgatgcctgttccaaccctagtgatgcagatggagtgacaaagatgattatgaagaactttgaacgtcattacactacaaacaggtaa

SEQ ID NO: 4941 - protein, 354 aa, DROSOPHILA
MYSNQDRDVISTPNRGTHPPRTRPTLKPSGTIVSKAQEFVDIYRYPPSRPDPIYPQPMPDKTAAKCRKDVCLLPDCYCGGRDIPGGLNASETPQFVLMTFDDAVNTINIDLYEELFNNKSRKNPNGCSWRGTFYLSHEWTDYVMIVLLTFDDSVNDLNKQLYTDLFEKGRVNPNGCPITATFYVSHEWTDYSQVQNLYADGHEMASHTVSFGEQFSQKKWTREIAGQREILAAYGGVKMSDVRGMRAPFLSVGGNKMYKMLYDSNFTYDSSMPVYENRPPSWPYTLDYKIFHDCMIPPCPTRSYPGVWQVPMVMWQDLNGGRCSMGDACSNPSDADGVTKMIMKNFERHYTTNR

SEQ ID NO: 4942 - DNA, 7869 bp, DROSOPHILA
cgttggaaaagcaaagaagcaacaaaaaaaagaccgcaatttgcctttgcaattggaaaattaacaaacaaaactcaaaagtcaacacaacttatgccgcgttctcttgcctttcgcgtttattattttttaaaaataaatacgtactcgcgatgagcacgaaaacaaccggaccgctaccgtcgactaatattttgttattaactatttccgctgcacttttgttttaaatacttcggccaaacacacaaaatacaacacataaagcgcaaaacaacaaaaaacacactgcccacacgcacacaaagagagcgcgagagcgcgccaaccaagtagcgatagataagagagagagagagagaactagttccagtgaaatccaagcattttctaaattaaatgtattcttattattatagttgttatttttgatatatataaacaacactattatgcccaccatttttttgagatgcatctacacaaggaacaaacactggatgtcactttcagttcaaattgtaacgctaatcactccgaacaggtcacaaaaaattaccttaaaaagtcataatattaaattagaataaatatagctgtgagggaaatatatacaaatatattggagcaaataaattgtacatacaaatatttattactaatttctattgagacgaaatgaaccactcggaaccatttgagcgaaccgaatcgcgcggaactaacgacagtcgctccaaggtcgtcgaacaaaaggtgaatgtgttgcggagagcgggtgggagacagcgaaagagcaactacgaaacgtggtgtggtggaggtgaattatgaagagggcgcgcgatttgaaaagtttgtatataaaaaatatatcccggtgttttatgtagcgataaacgagtttttgatgtaaggtatgcaggtgtgtaagtcttttggttagaagacaaatccaaagtctacttgtggggatgttcgaaggggaaatacttgtattctataggtcatatcttgtttttattggcacaaatataattacattagctttttgagggggcaataaacagtaaacacgatggtaataatggtaaaaaaaaaaacaagcagttatttcggatatatgtcggctactccttgcgtcgggcccgaagtcttagagccagatatgcgagcacccggaagctcacgatgagaatggccagacccacgtagtccagcggcagatcggcggcggagaagttaagcgtctccaggatgaccttgcccgaactggggcacgtggtgttcgacgatgtgcagctaatttcgcccggctccacgtccgcccattggttaatcagcagaccctcgttggcgtaacggaaccatgagaggtacgacaaccatttgaggtatactggcaccgagcccgagttcaagaagaagccgccaaagagcaggaatggtatgataaccggcggacccacagacagcgccatcgaggtcgaggagctggcgcaggatattagatatccgaaggacgttgacacattggccaccagagtgaccagcgccaggcagttgaagaagtgcagcactccggcccgcagtccgatcatcggataggcaatcgccgtgaagaccagtggcactgtgagaaaaagcggcaattcggcaatcgttttgcccagaaagtatgtgtcacagcgataaagtcgacttcgggcctccctcataaaaactggcagctctgaggtgaacacctaaatcgaatcgattcattagaaagttagtaaattattgaaatgcaaatgtattctaaacatgacttacatttatcgtggcaaagacgttttgaaaggtcatgttggtcaggaagaggaagatggctccgttgatattcatcacacccacttgcgtgagttgttggcccaaaaagatgaggccaatcaagatggcaaccatctgcaaattaaaatgttactcgcatctcattaatattcgcgagttaaatgaaatttatttatcttctgcaaaactataaactatacatctcattgaaaaaaactaagaagggtgtggaatcaggcaattctatctaaaatctagcgaatttgtttccaagaattgtaagcgttatatcatttgtttccactggaaccactcaccgttgtctgaataagtcgcacttttacgaggagtggttccttgagcaccgacagccaggatcgccacaggaccgcccggaactgcatgaaccaggtggccttgtaggtgtacccattctccggctgctccagtggcttctccagatttttggtggccaacaactgctccatatcccgggctactttgctaatggcaaaattgtcgcatatcttggcgatccgatcacgggactcgatctcccgtccgggcacaacggccaacacctgtacgtaaaagtccgccggattgtagttggtaggacactgggcacccacgctggataggagttgagatgttatgtaatactagatacccttaataaacacatcgaactcactaggaaaagaagtcgacggcttcgctgggagtgcccaagaaagctaccctgccctcggccatcagaaggatcttgtcaaagagctcaaacagctcggaagacggctgatgaatggtcaggatgacggtcttgcccttctgcgacagcttcttcagcacctggacgacgctgtgggcggtaaaggagtccagtccggaggtgggctcatcgcagatcagaagcggcggatcggttagagcctcggaggcgaatgccagacgcttcctttctccgccggacagacctttcaccctgccgggcacaccgatgatcgtgtgctgacatttgctgagcgaaagctcctggatcacctgatccacgcgggccactcgctgccgataggtcagatgtcgtggcatccgcaccatggcttggaaaatcaggtgttccctggccgttagggagccgataaagaggtcatcctgctggacataggcgcacctggcctgcatctccttggcgtccacaggttggccattgagcagtcgcatcccggatggcgatacttggatgccctgcggcgatcgaaaggcaagggcattcagcagggtcgtctttccggcaccggaactgcccatcacggccaaaagttcgcccggataggccacgccgcaaactgagtttcaaattggtaattggaccctttattaagatttcacacagatcagccgactgcgaatagaaactcaccgttcttgagcaaatgtttcctgggcgccggtatgtgtcgctcgttgcagaatagtccgcgtgtccggttgaccagctgccgccatccggagcccggctgattgaccgccccaaagatgtccatattgtgccaggcataggtgaggttctcggctagttggccgctccctgaaccggagtcctccggcggactgggtggccggagcgtgccgtagtttttggcctgcccgaagccctggttaatgcagctctgcgaagccgctccgctgtcaccctgcaatgataggggatctcaaatatcaactacaagcgttatgctcatctaaccccgaacaaaaagtaccccgaagtatcctacgaagtaggtttatacttttatttattttttgtgcatctagaaaaggtttcaagctgaaaacttttcaatttcacggcgttcgtccataaaaatgaaggcgtctgtgcataaatctagcccagcctggccaatccctgctccgccgtccctgtttccgggcactaaccccccccccccccctcggctttataaagaaggagcccatctgtttaataaaaatgcccaagatccgagttttccaagtttcccaaaaaggagatggcgaggcctatttaaaatgtgcaaattagggctggcacttggtggatggccttgaaagtgggcggtggacggttgacggggtcacaggtcgttgggcgatggacgatggggcgatgggacgatgggtggtggcagtggcaaggttcctcccaccatgttgccacctcataagacaattgcgagtgtaaatcgctggcatctttggctttcgtttggggactttgagcttcgccagttttgtttttattaaatataaaactttaaggatactttggctttttttgggtggtgggaaaactcaatctcttgtagataagtgcaatgagcagtataaagcagtccatttacttgatccaattatgttgaacgcaatagtgttcaaactactacttctgcaattgagtttaagtttataaatccgaaatacaaattcttatttacgttattttgtttacgggtaaagtgatttccaaaaccactgagctgtcagttttcgcccaggtggggcttcccttttcgaaatggcggtaaccgaagacgtttgcggtatggtcaaatcaagccatcctccccgccccaacttttcgccccataccacttccgttcgcgcatattttcattttcataaacaattttccgttttccatttgtggggtttcttgccatcgcagcggcctgcggcaaagcataaataacagggatccactaattggcgtcgaggcaaaaaaaaaaaaaaatggaaaaaacaagacaaaatgatggccacaatatggaaagcattttatccgccgctgctctcataataatttgtataaataatcataaaaaaaattaagcaaaaaaatgcaagcaaatgagaaaggcaaaatccgaagaagagggccaaataaaaagctgacattcaataaaagcaagaaaaaataatgtccaccttgcactcagcgcctggcggtccttgctacagtgagccctgctaagaactttcattttttgaactatttaaaattaaatttatttttcaaaacgattgggggatttggatttatcgtttacattgctacatataaaatctagctaaaagaccaaagcctgaaaactgttgcatttcctccttagcgaggcttcactgctcatcttctgctgcgatgctttgacagcttattcttctagccactcagtgtccagtttttggcctgttaccaaaaaaaaagcacaattggtgacgttacgagaggtagacgcgaaaaaatgtaatatccgttttcaggcactcctcgagcagagcgagatggccatatggctgggaaagagatagagggacatggcgaaattgttttcacaacaaatgaggccgaaaaatgttattaaaaagttttcttttcttttctgttttcgccgtccctttcccactgggttttcttatctccctgcctcctctggtttactctcccaccttttccctattttcgtattttgttgaaataagtagcgaaagatgctacatttcatatttatttaattttttggcttacttttttttttatttactttgcgtgctatttttgaattacttacgaaatacgaaggaaactcgaggagtgggcgctagatggcgctgtgcagggaggcgaaggagtatcgtgatgaacttgacaaattgaaatgactgaataaagaagcgactcaatttgttgttcctcccgttttgtcgattgtgcgagtggctaatgagtgcactcaaaagtcattcactttgatgagaacgaaatactgaaggaggcgcaattattcagcggaaaagctgacgaccactcgatattattaaggaaatatcagagcgtaaacggcccaatatgtacatatatgcaacgaacatataattaaagatggcttcaaatattccatacatatcatatttttcaatactttgttacctttactgcgttacttacttcccaaaagaattaaagttcttatctccttgtataactttttgagacttttcaaaattgtttcaaagagcccggggctagatatgcaaatcgtactcacttatttattttgttatacaagccgaggtgctaagaatttaaagcaagatacgcacgaagatacctagatatcagatgctgagcccaaagcattcgtctagccaaataatgacccagataagactagattgtacatttttcgtcgagcgagacgtgcaaacaacgaggtattaagatcaggtagaagatgcgagtacacaaccagaaatggatacggatacagtatctagtatcttggcaagcctagagttatagacacccagcaatgttgttggccaacttaagccgactcctcccacgccaccactggttatgcgtccctaattacgatctactacatccaactatttggggtcgatgtataatgtagtgtagtgtagtgtagtgtagcaagaaaatatttgagaatgaaaggtggaagaaatgaggacttcatggtaagcttaaaatatctggttgttatattttttgtaaaaaagaatatagtcgaaaatgaatgcctttagatgtcttgatcatgatatgatctcaaaaattgtcttatatagcgagaacagctaccagaataatctgtttcgtgtcactatttgtttgtgcaattgcggtttgggatttttgtgggtcgcagttctcacgccgcagacaatttgatgttgcaatcgcagttcctatagatcaagtgaacttaagatgtatgcacatgtactactcacattgttcagatgctcggcagatgggtgtttgctgcctccgcgaattaatagctcctgatcctcttggcccattgccgggatttttcacactttcccctgcttacccacccaaaaccaatcaccaccccaatcactcaaaaaacaaacaaaaataagaagcgagaggagttttggcacagcactttgtgtttaattgatggcgtaaaccgcttggagcttcgtcacgaaaccgctgacaaaatgcaactgaaggcggacattgacgctacgtaacgctacaaacggtggcgaaagagatagcggacgcagcggcgaaagagacggcgatatttctgtggacagagaaggaggcaaacagcgctgactttgagtggaatgtcattttgagtgagaggtaatcgaaagaacctggtacatcaaatacccttggatcgaagtaaatttaaaactgatcagataagttcaatgatatccagtgcagtaaaaaaaaaaaatgttttttttatctactttccgcaaaaatgggttttattaacttacatacatactagtgacaacatgtttatgtttagctaatgtgttccgttcaaaataattaaaaattcgaccacctttgcaccaatatgatagtaccccacctgggcagtactcataagctgagtggctgtctttgaatactgattaggttgagtgggaagcgtcttcttatcgtgaataagagagttcttgttaatccgcctgttgtcgtcccgtttcgggggtttgcactgtactttgcatgcatgatttatcaaacggcgactgttgatgatgcgcattccgcactccccgtttcccgtacgcctatccgcacccgtacttcggacactccggtcgttgtcgtcatcgttagcacctcatctcaggccccggaatcatgaactgccgccatcagctgtccgggcattatcaatcttcatcatcggggccagttggtccaggatatggatctcgactgggacgggttttccgggaggctatcaataccattttcacggacgatgtggtaacaggttagcagttgcagttgccgaggaatctgcaggaattaatttgctgacgacgattaagtggtcttcaaatgaatatggttttcttttgagagtttagctcagaataatagcttttgattcgatttgcaagttaattatgcatatgcatgtgatatttgtagaagtctcactcagcact

SEQ ID NO: 4943 - DNA, 2352 bp, DROSOPHILA
gtttcgtgacgaagctccaagcggtttacgccatcaattaaacacaaagtgctgtgccaaaactcctctcgcttcttatttttgtttgttttttgagtgattggggtggtgattggttttgggtgggtaagcaggggaaagtgtgaaaaatcccggcaatgggccaagaggatcaggagctattaattcgcggaggcagcaaacacccatctgccgagcatctgaacaatggtgacagcggagcggcttcgcagagctgcattaaccagggcttcgggcaggccaaaaactacggcacgctccggccacccagtccgccggaggactccggttcagggagcggccaactagccgagaacctcacctatgcctggcacaatatggacatctttggggcggtcaatcagccgggctccggatggcggcagctggtcaaccggacacgcggactattctgcaacgagcgacacataccggcgcccaggaaacatttgctcaagaacgtttgcggcgtggcctatccgggcgaacttttggccgtgatgggcagttccggtgccggaaagacgaccctgctgaatgcccttgcctttcgatcgccgcagggcatccaagtatcgccatccgggatgcgactgctcaatggccaacctgtggacgccaaggagatgcaggccaggtgcgcctatgtccagcaggatgacctctttatcggctccctaacggccagggaacacctgattttccaagccatggtgcggatgccacgacatctgacctatcggcagcgagtggcccgcgtggatcaggtgatccaggagctttcgctcagcaaatgtcagcacacgatcatcggtgtgcccggcagggtgaaaggtctgtccggcggagaaaggaagcgtctggcattcgcctccgaggctctaaccgatccgccgcttctgatctgcgatgagcccacctccggactggactcctttaccgcccacagcgtcgtccaggtgctgaagaagctgtcgcagaagggcaagaccgtcatcctgaccattcatcagccgtcttccgagctgtttgagctctttgacaagatccttctgatggccgagggcagggtagctttcttgggcactcccagcgaagccgtcgacttcttttcctacgtgggtgcccagtgtcctaccaactacaatccggcggacttttacgtacaggtgttggccgttgtgcccggacgggagatcgagtcccgtgatcggatcgccaagatatgcgacaattttgccattagcaaagtagcccgggatatggagcagttgttggccaccaaaaatctggagaagccactggagcagccggagaatgggtacacctacaaggccacctggttcatgcagttccgggcggtcctgtggcgatcctggctgtcggtgctcaaggaaccactcctcgtaaaagtgcgacttattcagacaacgatggttgccatcttgattggcctcatctttttgggccaacaactcacgcaagtgggtgtgatgaatatcaacggagccatcttcctcttcctgaccaacatgacctttcaaaacgtctttgccacgataaatgtgttcacctcagagctgccagtttttatgagggaggcccgaagtcgactttatcgctgtgacacatactttctgggcaaaacgattgccgaattgccgctttttctcacagtgccactggtcttcacggcgattgcctatccgatgatcggactgcgggccggagtgctgcacttcttcaactgcctggcgctggtcactctggtggccaatgtgtcaacgtccttcggatatctaatatcctgcgccagctcctcgacctcgatggcgctgtctgtgggtccgccggttatcataccattcctgctctttggcggcttcttcttgaactcgggctcggtgccagtatacctcaaatggttgtcgtacctctcatggttccgttacgccaacgagggtctgctgattaaccaatgggcggacgtggagccgggcgaaattagctgcacatcgtcgaacaccacgtgccccagttcgggcaaggtcatcctggagacgcttaacttctccgccgccgatctgccgctggactacgtgggtctggccattctcatcgtgagcttccgggtgctcgcatatctggctctaagacttcgggcccgacgcaaggagtagccgacatatatccgaaataactgcttgtttttttttttaccattattaccatcgtgtttactgtttattgccccctcaaaaagctaatgtaattatatttgtgccaataaaaacaagatatgacctatag

SEQ ID NO: 4944 - protein, 687 aa, DROSOPHILA
MGQEDQELLIRGGSKHPSAEHLNNGDSGAASQSCINQGFGQAKNYGTLRPPSPPEDSGSGSGQLAENLTYAWHNMDIFGAVNQPGSGWRQLVNRTRGLFCNERHIPAPRKHLLKNVCGVAYPGELLAVMGSSGAGKTTLLNALAFRSPQGIQVSPSGMRLLNGQPVDAKEMQARCAYVQQDDLFIGSLTAREHLIFQAMVRMPRHLTYRQRVARVDQVIQELSLSKCQHTIIGVPGRVKGLSGGERKRLAFASEALTDPPLLICDEPTSGLDSFTAHSVVQVLKKLSQKGKTVILTIHQPSSELFELFDKILLMAEGRVAFLGTPSEAVDFFSYVGAQCPTNYNPADFYVQVLAVVPGREIESRDRIAKICDNFAISKVARDMEQLLATKNLEKPLEQPENGYTYKATWFMQFRAVLWRSWLSVLKEPLLVKVRLIQTTMVAILIGLIFLGQQLTQVGVMNINGAIFLFLTNMTFQNVFATINVFTSELPVFMREARSRLYRCDTYFLGKTIAELPLFLTVPLVFTAIAYPMIGLRAGVLHFFNCLALVTLVANVSTSFGYLISCASSSTSMALSVGPPVIIPFLLFGGFFLNSGSVPVYLKWLSYLSWFRYANEGLLINQWADVEPGEISCTSSNTTCPSSGKVILETLNFSAADLPLDYVGLAILIVSFRVLAYLALRLRARRKE

SEQ ID NO: 4945 - DNA, 5647 bp, DROSOPHILA
taatacactaagggccagaaataaggaacttaagagctaaatgaatacttaaacgcagctaaatcgaggataaatctacaaaagtatgtaatcagattggcttcacaactaaatgcaaaatgcaaaacacaaaatcggttaacaagcgatttcagttaagctgggctaaatcagatttgacacagaatggtaaggaaagggttttggggctctcagctcattaaattcattggagcaacgcaagtagtaacgacgttagaaagtttccttcctcaatttgttcgttttagattacaaaattaaagttgagtaggaagggaacttgattttgcgaagtgaacttaacttaagcaacaaagtaactaaactacagtatgtacttagagactaactcgaatttaacaataaaatgatttatacaaggcgacttgagtccgattagatgactctcgccgctactgaagaggcctcctgaagtcgatgagcgacgcctacgatgtgtattttgattactgccactgctaatccaatccatttgcagtccaatccatttccagccaagcccgccgccgccttaaacgtaatgaagtcttttgctgtgtaaaattgctataaaaactattctcagctctcagctgcctcctcctcgggtttcgattgaagggtgggtgtctcttggtgctttgcacaattctcagggaaattgttatggcaacaaagggtacaatttcagtggctccagaggcgaaaaagtttcacttgggcaacaaaatattggtgtcgttttacatattctttaacttaaaaaatataaatttagaaaacggtaaaagagactaaatatatgtgttatatataaacaaagtaaaaatcttaaaaaaaaatcaggataaaatcgacttaaagcgataaaaaaaaaaaaaaaaaaaaaaattagccatcaattcatagtcactgagaattgcccaaagtagcgaacccgaaaaatcgattttgtaatctaggaggactcgcttgtcgctggatgatgctgttccagcggctggcgtggctgtggggctgatggaggagcatgtggagccggcaatgccattggtggcagcttgttctccaccacggcgacaatgggcgctggattcacgagcggcgggggcaacgcctcgaaactcatgcatcctcgctgctgcccgtcgtccacaatgggcggtgtgtcgatagagtcaatggtggatgcactggacgaggtccttccaccgctcaatccctcggagacggccactaatgcggctgtggtgttgcggttgtgctgcagcagatcgttgatctgtgagaggcgcgaggaactggcgatcggtgtgctcaaactgataaattcattaccactggccgttgcaggagaagatgatacagtggctggcgaggctgttgctgaaccaactggattgcccacaagtcgtgacggcgaggctgaggtggaggctgcggtcatggagacagcggtggtctggtagggaacgttgctggaggcggtggtggttgcatttccatacggcggcaccgaaggcaccgcacaggagctatacgcgcacgaactgggtgctccgggggcgacagcgacggcgggtgacgccgaatgctgctgataggcggccgtataggaagtgatctgtgatggacaatcgattagcttacttcatgtttaaatagaaccttatatacagatgccaccgtcagtattatttaatactaataaaaaagttttactaacctgagtgctgccatagctgagcgactgatatagttctccgtacgagggcgtggcattggagccactagcaaagagtccggagtccaggctgtccaattgggcgtagcccgcgtagctctggctctgcgcttgctgctgctggggtatcaactggcccgcagtgggcactcctggctgctgtacctgctgttgatagtagctcacgctgctctcgggtgtgtaagctggtgaagcgtagccggagctgtagttcgattgcgtttgcaggaagtacgcggatgttgagccagccgttcccaccggggaatagccaatggtctgttgggatggttgctgctgttgcggctgcagatgtcctccctggacgccttgaaccgaaccctgtcgctgctcgagatccaaccgcatcaccgtgtggatatagtgggttcgcaccctcgtgggattgaactctacccggccaactgtgttgccacaagcttcgcgagtacatccgcaaggaaacatggctcgatctacttgacatttaatgcccgcctggctgcaggcacaagtctccggatcgcaaaactctctgcaggagcagccgcacacttcccgggagtttctgatatcgcggcattcgctcttctcgctggcatcaattttgcgcacgcccgccgctttcagcagtgcccttctctgcttgggcgtcaccggctgtaggaagccattggaaccgtcttcggcatcggagccactaccctcgcttaggtaatcctcctcggactcctcgctgtcgtcactgctggaaccccgaggctggagttcttggttctggctgcgatgtgcccgcctcaactccgctgcgtgctcggccagggtcatcgtcttaaaacctacatgccttgcacccatgcccaaggtgcatccgcccgccgttggtacacaactgaagccctgttgtcgtgggaagtagaacaccttcacctcgtcaaagttgatggagcgcttagtccgcttctggggggctactggaggggcagacatgtcgggcaccagatctatagcatcgctttccgaatcttcgagtctccgtttaaggttggaccttatgggcttcgtttccacctttttctggatttccggctcggcttctttctccgcctgatccttgagtaacgcggaggtttcacttcctaaaccagaatcagacccaccatctctaagctcatcctctttcggtttggctggctgggcaggctccaatgatgcttggttgttggacaccacctccgctgatctggtggccatttccgtctcattgttcaacttcagccaaagaagttctccactggtgtcgacctcctcgtttgtggtgaccgacgcggagtcaagaatgttgtcaattgccagtgggtcctcggagactgcgtcggaagctattgaagagttaagatccgcatcgcctagtacgattatctcattattaggatagttctccagctcaaggaactgctcctctagttcggtgtccgccgggccgtgagcaaagtccgccagttcatcatcgagctgctcaagcggcatgggtagggaagccaacgccttggctttcgctgcgtgcaccttgctggcgtcaattatggaggttttgatctgcctctcgatgtcgtcgtcgtcatcgtccaggtggggaaatatttgcagctgatgctgccgctcctccggttcgctctgattatccttgtgatccagatgccgctgatccttcctttcgccttcgtcgtgggcagttaggctggtggtcccctccctttggccggcggccttgtttcctgatgggctaaacatattggagccgctcgcatttttttgtatgtacgtaaatattttttttataggactaaacatgctatccgtgtcgaggtccctagatcattgagtgtcctttggtcatctgcaagaaagtaggaggaaatggttttacataatgttgcttggaaatttccttcgcaggtagcgaaaacgtatagatcaggtgtgtatgtacagtgtccattcgagagggagaactgccgggaatgcgaaactttatttctgagtaaattaattacacctgtttacgtttcgtaagagcccctgaccaggtcctagatccaacaaacaaattgccaaaagcctaatgagtgtaccttttacaacttgtgtaaatatttagaaatattaatttagctcaagtattaattttactgctcgcaagaaatcaattgttttctgtgtacgtgtaatggtttaaaaatatatatctttcgctttaatgttccgctcacttgtatgttcgctttttcgaatgagcactgtgcttggatgggtgtgcgtgtgcagaatcctttgaaatcctggatccccgagaatttcgcacgctagaaaggagaccacccgaaaagtagacataccgctaaccaaaatcaatattgattagcttctttttttgggggcccacctttgcgcttatattttcgcagccaagccaacggccggactcgcaagatcggtgggatttatcctttttgcaatttgcgttgcagctgcgataaaaaactgagagcgagagagatgacgaaagacgcaactgtgtgcgtgtgtttgtgcaagtctgtgcgagtgtgtgcgtgaaggaggcgaatcaggacacaaaggtcggtattcttttattaacacaatcactttactatgcgcctggcaacgcccaaaattatgatttattttttaaaactcatttcgcacttccgtaaactttttcttaatttttcacttcttcttttctcgcaatgttattacttcttctattcagtgtgcccgtcgctggacccctgcaacatgacaacagtcctgcaccgatccaaatgtacttaaaaataccaggcaaaaattgataaaagtgtatacgatagagcgtgatagataaatgtgactcactagtagatggtgcgtgtatttgctaagaaataattcagaagaaaaattaaaacaaattcaccaatggagccggttcctgcaagctcattgattacataaattcatagtaagacaattattatgtaaaatatacccgttttacgattcattagttgactcgtgcagcaaagaaatatgttttgtatattcacggtaagaaatgtttatattaaaattttatttatattgtgtaatatgttggtcccactaatcgatagaaatatgtatcgttggttggagcctctgctaacgagcagagcttaggatatgtttggcatattccaacagtcgtcctgcggtcacacataaaattccaagaaagttgtaagttaagtttactaataaaccaggcgataatttcgctagccattagcaaggcaaggaagctaaaaaagacaaaaatctttggcaaatcaatggtgacgtcgcccaggaagttaatcgacaaaaacacgacctgcgacgcgacgataattttgcgagaggcgagtcagtcgctatctatctccctctgcgctcgtttcgtttcgtttcttggggctgttttggggcacacaattgaaaggaaaaaacgtaaatgcaaatggtcaactggtctccaagtgccgcgtttagaagagtgcgtaattcggcggaaagtcgagtgcttttgcgttgttgttttcgctcacccctcgtaattaattaagaaagttgtgtaaaattttttcgccccgtccgccatagtgcgagtgtaagagcgagcgcgatagatggccctgaattttgggtgcgttgcccatgagagtgggcgctagagcgagacggccgtacgacctgctccaagtgcagcgtgcacagtgggtcgcaaggcctaagatagttcacgaatctaattgt

SEQ ID NO: 4946 - DNA, 2999 bp, DROSOPHILA
tgcaggactgttgtcatgttgcaggggtccagcgacgggcacactgaatagaagaagtaataacattgcgagaaaagaagaagtgaaaaattaagaaaaagtttacggaagtgcgaaatgagttttaaaaaataaatcataattttgggcgttgccaggcgcatagtaaagtgattgtgttaataaaagaataccgacctttgtgtcctgattcgcctccttcacgcacacactcgcacagacttgcacaaacacacgcacacagttgcgtctttcgtcatctctctcgctctcagttttttatcgcagctgcaacgcaaattgcaaaaaggataaatcccaccgatcttgcgagtccggccgttggcttggctgcgaaaatataagcgcaaagatgaccaaaggacactcaatgatctagggacctcgacacggatagcatgtttagtcctataaaaaaaatatttacgtacatacaaaaaaatgcgagcggctccaatatgtttagcccatcaggaaacaaggccgccggccaaagggaggggaccaccagcctaactgcccacgacgaaggcgaaaggaaggatcagcggcatctggatcacaaggataatcagagcgaaccggaggagcggcagcatcagctgcaaatatttccccacctggacgatgacgacgacgacatcgagaggcagatcaaaacctccataattgacgccagcaaggtgcacgcagcgaaagccaaggcgttggcttccctacccatgccgcttgagcagctcgatgatgaactggcggactttgctcacggcccggcggacaccgaactagaggagcagttccttgagctggagaactatcctaataatgagataatcgtactaggcgatgcggatcttaactcttcaatagcttccgacgcagtctccgaggacccactggcaattgacaacattcttgactccgcgtcggtcaccacaaacgaggaggtcgacaccagtggagaacttctttggctgaagttgaacaatgagacggaaatggccaccagatcagcggaggtggtgtccaacaaccaagcatcattggagcctgcccagccagccaaaccgaaagaggatgagcttagagatggtgggtctgattctggtttaggaagtgaaacctccgcgttactcaaggatcaggcggagaaagaagccgagccggaaatccagaaaaaggtggaaacgaagcccataaggtccaaccttaaacggagactcgaagattcggaaagcgatgctatagatctggtgcccgacatgtctgcccctccagtagccccccagaagcggactaagcgctccatcaactttgacgaggtgaaggtgttctacttcccacgacaacagggcttcagttgtgtaccaacggcgggcggatgcaccttgggcatgggtgcaaggcatgtaggttttaagacgatgaccctggccgagcacgcagcggagttgaggcgggcacatcgcagccagaaccaagaactccagcctcggggttccagcagtgacgacagcgaggagtccgaggaggattacctaagcgagggtagtggctccgatgccgaagacggttccaatggcttcctacagccggtgacgcccaagcagagaagggcactgctgaaagcggcgggcgtgcgcaaaattgatgccagcgagaagagcgaatgccgcgatatcagaaactcccgggaagtgtgcggctgctcctgcagagagttttgcgatccggagacttgtgcctgcagccaggcgggcattaaatgtcaagtagatcgagccatgtttccttgcggatgtactcgcgaagcttgtggcaacacagttggccgggtagagttcaatcccacgagggtgcgaacccactatatccacacggtgatgcggttggatctcgagcagcgacagggttcggttcaaggcgtccagggaggacatctgcagccgcaacagcagcaaccatcccaacagaccattggctattccccggtgggaacggctggctcaacatccgcgtacttcctgcaaacgcaatcgaactacagctccggctacgcttcaccagcttacacacccgagagcagcgtgagctactatcaacagcaggtacagcagccaggagtgcccactgcgggccagttgataccccagcagcagcaagcgcagagccagagctacgcgggctacgcccaattggacagcctggactccggactctttgctagtggctccaatgccacgccctcgtacggagaactatatcagtcgctcagctatggcagcactcagatcacttcctatacggccgcctatcagcagcattcggcgtcacccgccgtcgctgtcgcccccggagcacccagttcgtgcgcgtatagctcctgtgcggtgccttcggtgccgccgtatggaaatgcaaccaccaccgcctccagcaacgttccctaccagaccaccgctgtctccatgaccgcagcctccacctcagcctcgccgtcacgacttgtgggcaatccagttggttcagcaacagcctcgccagccactgtatcatcttctcctgcaacggccagtggtaatgaatttatcagtttgagcacaccgatcgccagttcctcgcgcctctcacagatcaacgatctgctgcagcacaaccgcaacaccacagccgcattagtggccgtctccgagggattgagcggtggaaggacctcgtccagtgcatccaccattgactctatcgacacaccgcccattgtggacgacgggcagcagcgaggatgcatgagtttcgaggcgttgcccccgccgctcgtgaatccagcgcccattgtcgccgtggtggagaacaagctgccaccaatggcattgccggctccacatgctcctccatcagccccacagccacgccagccgctggaacagcatcatccagcgacaagcgagtcctcctag

SEQ ID NO: 4947 - protein, 832 aa, DROSOPHILA
MFSPSGNKAAGQREGTTSLTAHDEGERKDQRHLDHKDNQSEPEERQHQLQIFPHLDDDDDDIERQIKTSIIDASKVHAAKAKALASLPMPLEQLDDELADFAHGPADTELEEQFLELENYPNNEIIVLGDADLNSSIASDAVSEDPLAIDNILDSASVTTNEEVDTSGELLWLKLNNETEMATRSAEVVSNNQASLEPAQPAKPKEDELRDGGSDSGLGSETSALLKDQAEKEAEPEIQKKVETKPIRSNLKRRLEDSESDAIDLVPDMSAPPVAPQKRTKRSINFDEVKVFYFPRQQGFSCVPTAGGCTLGMGARHVGFKTMTLAEHAAELRRAHRSQNQELQPRGSSSDDSEESEEDYLSEGSGSDAEDGSNGFLQPVTPKQRRALLKAAGVRKIDASEKSECRDIRNSREVCGCSCREFCDPETCACSQAGIKCQVDRAMFPCGCTREACGNTVGRVEFNPTRVRTHYIHTVMRLDLEQRQGSVQGVQGGHLQPQQQQPSQQTIGYSPVGTAGSTSAYFLQTQSNYSSGYASPAYTPESSVSYYQQQVQQPGVPTAGQLIPQQQQAQSQSYAGYAQLDSLDSGLFASGSNATPSYGELYQSLSYGSTQITSYTAAYQQHSASPAVAVAPGAPSSCAYSSCAVPSVPPYGNATTTASSNVPYQTTAVSMTAASTSASPSRLVGNPVGSATASPATVSSSPATASGNEFISLSTPIASSSRLSQINDLLQHNRNTTAALVAVSEGLSGGRTSSSASTIDSIDTPPIVDDGQQRGCMSFEALPPPLVNPAPIVAVVENKLPPMALPAPHAPPSAPQPRQPLEQHHPATSESS

SEQ ID NO: 4948 - DNA, 3449 bp, DROSOPHILA
gctgctgccccccccccccccggaaaatccaaaaaaaaatgcaggtggaaaactcaccgtttttttgctgccgcggatgtggctgcggatgctgtgcgtgggcggaagcggtggcggatgcggatgccgcgctgacgtgcggatccggggcggaagaggattcggaatcccaggcccacgcaggattctcagggacccagagcttgctgcactgcatccggggatgtgggaagattcgatttggcgtccgtcttcttatttactttccgcggactggctagtggtgggcagggcggcgatgtaacatcgatagctcgccgttgtaacggcaagccaagtcatcgatggcgcaccagcgaagtgccatctctagaaagtaagcaaataattaacgtatttataaatatttaaagtttatatctagcttatagttccactattcgaaccttcaattatggcttatttgagatcatttttaaaaatatttcacttttataaagatttttgggcagaggaagaaatcatctcatatttttagcttttatatttatctttatttattacgtttattataaaaagtgcctgcttaatttgaagctgaaataagaatcttgtgattcacatttatttcacttaaggattataggatatttaatgttgcctaattctaccaatgtttcgatgatttgtgcttaaatgttgcaaaaaacaaaaagtggaaataaataagtgaactactaaactttttagcgtacgaatttcaattcaagaagcaaataaaaaaaaaactcaattagagggagaccttttacttacgatctagatgcttcagtttatcaactaggcatatctaatgcgattaactatttccaggttggccaactccttacaaacatacagatcccgatggcgactctagtcgccgctggaagcgcagcggcctggtatgattatatatatatatatatgtatgcatttgcagttgcaatccggaatttacttcatagtccgggcattacgtaggcgatgttgtcgagcgtgtcggccagatttttgctcaactgcacattgttctccatgccgggtatttgcgtggtcatgcagagcagcggtcccatggcgcagagcaggctgtcgaggagcacggacaagctgcccgatagcgccacgtatccattgtgcttcttcagtcgctcgccaatcacagtcaggctctcgccgagcagcttcagatgtgcggccgcatcgatcacttcgatgctggtcttttgcacctcctcctgcttcagctgacccccagtccggccgctgacgtccgcatccgtgtgcacttgcgcttgtttcgtcgcgctcttcgagacctgcgacctggcacttcgtgtgctgatgctgcgccgctgtgtgttggtgccagtcgctgctgctgccgccgctgcggcagccgcttctattgaggattgctgccgatcggcggccagttttcgagtgcgacttgttgtcgcacggttctgaaagatcgtctcgtgctgcgtggcatctgccagagccgtgctgccgttgctcgccggctgggttgcaccgtttgcagcggttttgtcgcgagttttggccctggacgcctcgattttggccttgcgccgccaggtgttcttgtcccgattggaaacgttcgcccacagctcgctgaggcgtctggtcgcgctggtgaagtctgcaagcgtgcggggaatggtcaataagcgatagagagcgcacagatgtgtagcaacctacctagatcctggagatccttctgtcgcgcctccttggcccacagactgtaggcggtgtagcgctgcttgcccttgtccttgcgctgcaccttggcactcaccaccttgccgtccttgagcacctgccgcttgttggacttctcgcgcatgtaaagactctgacggacggatgactcttggctggtggcctccgcctggacaccatcgacgatatcctgcaccagattgtccagttcatcgtcggaattcagaatggccacgaccgttgccgttgtatccggatggaattcctcgctatccgagataatgccatcatccacgagcatctcctggtcaagatccagatcacgcagcgcattcgatggcctgccgcggcccgaatatctggctggctgtctggcgccactgtgacgccttgtgcgcttctcgatctcatccggagattcaaaatccaacaatttcgacgattttttgcgtacgcgtccgctgcgcgaaacacccgtcacctggaaatctaattgggaatttatgaccccgattccattgacggctgccgctttttccactcacccttggccaccaggtgcgaggttggggactccatgtttggatacctgctttggaagattgggatgcaatttgttgcaaaaagaacgaattaaacgaagcaaacaaaacagctgtttggtgtgaccagagctttaaaacgcgatgcattgcaagcgatggttaaatatggaacactagataaccattttagtttttgaatatattgctaagttaataaccattgcaccagtcaattgtacagagtaggaaaccattaaacttaattatttaataatataatattttttattgttatattatttaaattataagcacaggatgtgcacgcacaacttaatttttttattatattattaattatttttataaacaaaaacatttacgatatatacgactgcaatttcatttttattacaatacatctaaattaatatccagttagcttgcaaaaaccatcagctggtcacactgccgcacctttgttttgtttcgacttttttttttgctgtttgaaagcggcttttagtttatcgatttgctttgcacctaactgcgccaagcgccccatggcacgcgattctcgccgtttgtgagtcgtttcgccggtggcccccaacccaaggacattttggcccccagccggccgtatacgcatttggcgttgacccgcgtccgcttttttcatgaccaaaacggcggctgcgattcaaacgaagctcaagcgcaagcaaaaacattcgcgcagcgtcaatcaatcgaggcggtacttaatcgggtttagagctatccatagccatgtcagcggagaggaacaagagtggcgaagtacgcagtgcagctggaggattggaactggcatctgcgagtggagcaagtgcatccgagacggacaatgtgagcgcccttgaactgcagtccaacaagcgcatgctgtactttagcgacggcgtcatggaggagttgtcctcgggcagcgaggacgaggcggatgcggaaatgggcgacaaatgctacgacgtccatttaaacgaggtacatacattcagcaaggattatgggtggagtaatgcacttccggccatccatttagtacatggtcatgtagct

SEQ ID NO: 4949 - DNA, 1349 bp, DROSOPHILA
ttttgtttgcttcgtttaattcgttctttttgcaacaaattgcatcccaatcttccaaagcaggtatccaaacatggagtccccaacctcgcacctggtggccaaggatttccaggtgacgggtgtttcgcgcagcggacgcgtacgcaaaaaatcgtcgaaattgttggattttgaatctccggatgagatcgagaagcgcacaaggcgtcacagtggcgccagacagccagccagatattcgggccgcggcaggccatcgaatgcgctgcgtgatctggatcttgaccaggagatgctcgtggatgatggcattatctcggatagcgaggaattccatccggatacaacggcaacggtcgtggccattctgaattccgacgatgaactggacaatctggtgcaggatatcgtcgatggtgtccaggcggaggccaccagccaagagtcatccgtccgtcagagtctttacatgcgcgagaagtccaacaagcggcaggtgctcaaggacggcaaggtggtgagtgccaaggtgcagcgcaaggacaagggcaagcagcgctacaccgcctacagtctgtgggccaaggaggcgcgacagaaggatctccaggatctaggtaggttgctacacatctacttcaccagcgcgaccagacgcctcagcgagctgtgggcgaacgtttccaatcgggacaagaacacctggcggcgcaaggccaaaatcgaggcgtccagggccaaaactcgcgacaaaaccgctgcaaacggtgcaacccagccggcgagcaacggcagcacggctctggcagatgccacgcagcacgagacgatctttcagaaccgtgcgacaacaagtcgcactcgaaaactggccgccgatcggcagcaatcctcaatagaagcggctgccgcagcggcggcagcagcagcgactggcaccaacacacagcggcgcagcatcagcacacgaagtgccaggtcgcaggtctcgaagagcgcgacgaaacaagcgcaagtgcacacggatgcggacgtcagcggccggactgggggtcagctgaagcaggaggaggtgcaaaagaccagcatcgaagtgatcgatgcggccgcacatctgaagctgctcggcgagagcctgactgtgattggcgagcgactgaagaagcacaatggatacgtggcgctatcgggcagcttgtccgtgctcctcgacagcctgctctgcgccatgggaccgctgctctgcatgaccacgcaaatacccggcatggagaacaatgtgcagttgagcaaaaatctggccgacacgctcgacaacatcgcctacgtaatgcccggactatgaa

SEQ ID NO: 4950 - protein, 424 aa, DROSOPHILA
MESPTSHLVAKDFQVTGVSRSGRVRKKSSKLLDFESPDEIEKRTRRHSGARQPARYSGRGRPSNALRDLDLDQEMLVDDGIISDSEEFHPDTTATVVAILNSDDELDNLVQDIVDGVQAEATSQESSVRQSLYMREKSNKRQVLKDGKVVSAKVQRKDKGKQRYTAYSLWAKEARQKDLQDLGRLLHIYFTSATRRLSELWANVSNRDKNTWRRKAKIEASRAKTRDKTAANGATQPASNGSTALADATQHETIFQNRATTSRTRKLAADRQQSSIEAAAAAAAAAATGTNTQRRSISTRSARSQVSKSATKQAQVHTDADVSGRTGGQLKQEEVQKTSIEVIDAAAHLKLLGESLTVIGERLKKHNGYVALSGSLSVLLDSLLCAMGPLLCMTTQIPGMENNVQLSKNLADTLDNIAYVMPGL

SEQ ID NO: 4951 - DNA, 6751 bp, DROSOPHILA
tatgggaatgcatcattttacccaaggattttcacagtagggacagagggcagcaaaacggtccaaatgggtctgtggaatgcaacaatcggtgagtgtatctctcgcatgaagcgattgtaggtttttacacaaaacattgggcctatcttttcagaagcccgagaagcattcaggtggcacgatgtccgccatcgggtgtcgatttggttagcacaccggagcatcttcgtcctggatttcgtggacgggcacggcgatacaacccaaacgatttcgggttaactgacaatgaggaatggcgccatccacgaatgtttagggatatgacctgtaagtatttgaatgaagtgattgcaagtgattataatacattttccaatccaaatgaagtatatttcttactaaatttaaaattgattttcttttatttattttttttatttttattcagatgagacggatgcggcggccatggaaacttttcgccaggcacaaccacgtcgtcaagcgtatgaaacgggaattaacctaagcaatctgcccgaggagtgcctggcggatatgtcggcgcctggatttgatcttagcctgccatcgcagatgtccgatttgcgagaagagtttctggtcgatgtatcggctccggatatgtgcgatgtctctgaaggccatgtggatgctgtttatgatgagattctggatcgcttgaggagaattcgagaacgcatgaatcgttccaatcaactccgccgatcggatgattgcgcaatgcaacaacatgtaagcatttaattaatacccttttcttttaaggcgattaatgtgaattgtttgcatacacagcaaacgcatcgcagaatatacactcgtcgcgacccaagtggccatataaccagtcacgtggatgagacgaccatttcaaatgcaccctcgatggattgcactcaggctaatgatggcggtgagcctggacgtcatctgaatttctctctaccagggcgatgtgaaaacctaatggatcaatcaatgccctcgtatcatgaagcatcgatgccaaatgaatgctttgaggtcatgtcgtctcaggacgttctggaggatgagactatgccatcgtttgaaaatagttatgtattttcgcgacgacagccgacaatgccaagcgaatgcctagaggatgtaagccagccatctttcgaaaggagtagatctcgtagacaaagtccaagaaggcaattgacgatgccttcgcaaaacctttgtgacatatcagcgccatcttttggcgacacaactagggatcgaagtaccaacgagtgtttggaggacatatcaatgccgacatttgaagaagaggtttcaaatgtatccagaagcagaagtccgcgacggaagaagatatccaggagtgcgcgtaatacaactgataaagtcagctccagacgacagacaagcgaatgcctggatgatatgaccatgccatcgttcggaagatcatcgagtgcgtcaccgaaccgaagtcgtcgccaaacgcaaagattgatgacaaagtcaaatattaacgatatatccgaaccaacatatgtcagcatcttaaggggaccaagaacaaacgaatgcctcgatgaaattactatgccttcttttggcgcaatatcgaatgtttccaggggaagaacgtatcgaggacaaacaatgcctagcgaatgtttggacgacatgacaatgccatcttttggaggcatttcaagaggcaaaactccagatcgatatcagagatcaatgccatccagaatgacaagcgagtgcttggatgatatgaccatgccatcatttggtggaatttcaggatccaccagaaggcatttaacacttcccaatgcgaggagcagttctcaaggatcgagccgccggcagagaaccaatatcgacgatatatcggcccctttctttgcacactcaaccaaatatggagatacaaatgaatgtctggaaaatgtgtcaatgccatcttacggtggaatatcgggaacatcaaaaatgaaacaatcaaggcggcagcagttaacaatgccatcgcaaaatattggagatatatctgcgccatcattcgcaagttcgggtagaggtaatatgaccagtgagtgcttagaggacatatcgatgccaacttttggagaagtgtctaccaaatccaggagtaaaagtctagagggccaacaaagtgcaagacatcgttcgatgaccaatgagtgtttggatgatatgaccatgccttcaatgcccggactatctgctgcgtccagaagacaaatgacactgacaaatgagtgcttggatgatgttagtgccccatcctttgatcaaagcgtcttccgtggctcgagcagaagacaaggcagactatcatcgccaaaaccatgcgcgagttccaccagatgtccaccgacaaatgagtgtttggatgatataactatgccttcgtttgatcctgtttcgttggcctccgcacagaggcagatgaccatgcctagtgagtgcttggaggacatgagtgcaccgtcctttgcaggtgtttctaatctatctagaagacaaactactggcctacccagcgagtgccttgacgacatgagcatgcccaactttggcaatatttctgaaatatcgcgaagaacggaatgtgagccagcatttcgtagaagtagatcggttggaaggagtgtgcgatgtaatcgcagcataggcaaatcttattcctccagtgaatgtctagcggatgtgacaatgccatcatatggtgggaattcatatgcttcaaggagtaagagtacttcacgaagtcggaaatccatgctacctattagggatttatctgaaatgcggactgatgaatgtctggaagatgtgacgatgccttttgttggagatttatcgggtagatccagagcaagtagtccgcggcaaaggtcaacgactcctagaagaggtcagttcacaagcgagtgcttggatgatcaaacaatgccatcgtttggaggtgtttcacaatcttcaggtcgtaggactcccagacgacatactaagaatattacaaataatactaatgaatgtattgagaatatatcaatgccttcgtatgttaacaatacgagagcctccaacgtagaaacctttaagtcaatgcaaggatcaagacaaggagcaatgaccaacgaatgcttggatgaagttaccatgccatcctttggcacttcaagtcgatttacagctacaaacgaatgtctcgaggacatttccatgccttcatatcgcgataataccgaatcgcttaggcatagatgtcctacaccaattcagagctctagacaagaatgtctggatgatatgactatgccatcttatggaagtacattgccaactttaggagaaactcgccgctcaactaggggaaatggtcctaggctcgaggacatttccatgccttcatatcgcgataataccgaatcgcttagccatagatgtcctacaccaattcagagctctagacaagaatgtctggatgatatgactatgccatcttttggaagtacactgccaactttgggagaaactccacgctcaactaggggaaatggtcctaggcgaatccagagcttaaggcaaagaacgttaaccaatgaatgcttggatgatatgactatgccatcatttggaagatcttacggaggacctgctactaatgaatgtcttgaggatatatcgatgccttcatgtggtgaaaatacaggatcgtctagaggatttagtccaatgcctctagaaagcacaagacgcggagcgtcgatggtgcaccgatccagacgagggacgatgactaacgaacggctggatgacatgacgatgccctccttaggtagttcagaacatggacaagctacaagtgaatgccttgaagatatttcaatgccttcatatggagcgaattcaggaatgtctaaaagaaagtgccctacaccaccgaaaagaaatactccgaatgttacaacagagtgtttgaatgacatgaccatgccatcgtttggtgatccaagtcatggaaacggatttggtgaatgtcctgagtccttcagattgattacagaaagaaagttacaatgcccgatgaccagcgaaaacttggataatatgactatgccatcgtttggtactttaggccagagtcaagctacaaatgaatgccttgaggatatttcaatgccatcacatataaggaatactaactcaataccaggaagaagcactacgccaaggacgctgtctagaaatgaggtgactactaacgaatgtttagatgatatgaccatgccatcatatggaaatgtattcggttcacccggaaggcaaatgactttgccaagtgagtgcttgaacgacgtgagtcagccgcccttcgtaagaagtacgtctgaggaaacgaatcgaagacatgaaaacttgacgtcccaaagcgtggactcgcgaaaccccaggccaaatcaaaggtcggtgacaaatgagtgcctggaggatatgacaatgccaacgcttttcgaaaattccggatcatctcggcacggcgtattgaacagctttcgcttggaggacattagcatgccctctggagtctcaaatcgaacccaggacagtgaatgcgttgaggtcaaggtgagcggaacgcatggaggaccaacgaccagcgaatgtctcgaggatgtgagtgcacccagttttgctccaagctctcgcatgacctcaagacatatacccgagatgacaaacgagtgtttggaggatgtttctatgccgttaaatgaatcatcagctatgaatgattctaaatcaatagctcgacgtccacccgacatttcgtatccctcggaaatgttggccaacgagagtgctccttcgtataattcacggcaggataaagctgataaatctgctgattgccattctaagtcaccgcagcaaaccgccagaagtcgtggtcgggaaaattgtagtggtgctcgattggaggatgtgacaatgcccacatttgacgacgtatcctatcaaccacgtcgccatcaattaactatgcccaccgagaatttggaagatcaaactcagccggatttctttaactcaacggctttgccaagttctactagaacggagaagcaacatgcaataaaatcccctcgacaggatcatataagcattagtaaacagcttgccgatgagagtgctccaactatgctgaaggacactacattgatcacccatagctcgacaacttcagtgaccagggtttttcagaagacggcagaaacctctaataactccgggcatccgaggatagatgacctttcaatgccacagtttgagtccacgggtgctagctcccaacaggatatctccctgcacggctttcaatccatggataactatagaccatttgatgaattgatttatagccagaattcggtagctaatgaaactcagcccgagactcctcaaccaacgaggtccataaatcgcagtcgaagtacgcgaagagtaccaagcacaccaagaacaccaagatcaccaagtacaccaaatgttcgaggagacacttctcccaattctagtactagaactccaggacaacaaccatgcgatatggttagcactagttacccctacggaaaaccccaatgctacaaccgaaaaccctgctagaagggtaatatttaacgaatatttctatgtaaattggttttaatacggcttggaggtatattttataaattttatagagggaaagaaaaaaaaacttcaaacgaaaacgttgttatttaatgtccctattttacgattgactaagtagtgatatttataagttatttttaagttaattacctgaattcggtaccccgaaaaacaagccaaaacggtttgagatagaattttcaaagtgttcaataatttacaccatattgaaacaatttccgcgacaaaaaccatgcaaggtttattgcagcaaaaagaaactggtactcgtacgtgcatatatatctacaaaattgttaacaaataggttcaggaatcggagaggaagctttcagcggaagcgcgttcattgctggcttttgtcaggggtttggccttctgttatttctccaatgctcatttcctttgttgctgctttttgtgttactattgctattgtttttgttatcgatgctataaagggtaagtaaggggtatctgtatcggtgtctgtagcagacactcagacgagcgtgtcgagcgatgcgagctatttaaaaacaatttatttttagcaagtgaagcgccacaagcgaaacaacctttcgacccactgtaaagccccatccattaaagctctacacagagaaaaataaaaattggatatgtaggatgtttgaaaataattacagaaaaatatttaatagtgaagtgcagtggtacaaattgcacctacaaatgggaataaatatggcgcccaacgtggggcttcattaccaaaatttctctattcttgtaagaataggttcaagcctcggtttttattcgaattcgaattcccatgtggtgcaaatataatttgggctttaagtgctaatatccagtatttcgtatcttcttttgtgagtttggtttattccagtgtcctttgcaacggtgagtcctcatctcgttcactcccttcagttcc

SEQ ID NO: 4952 - DNA, 4751 bp, DROSOPHILA
ggcgatgtgaaaacctaatggatcaatcaatgccctcgtatcatgaagcatcgatgccaaatgaatgctttgaggtcatgtcgtctcaggacgttctggaggatgagactatgccatcgtttgaaaatagttatgtattttcgcgacgacagccgacaatgccaagcgaatgcctagaggatgtaagccagccatctttcgaaaggagtagatctcgtagacaaagtccaagaaggcaattgacgatgccttcgcaaaacctttgtgacatatcagcgccatcttttggcgacacaactagggatcgaagtaccaacgagtgtttggaggacatatcaatgccgacatttgaagaagaggtttcaaatgtatccagaagcagaagtccgcgacggaagaagatatccaggagtgcgcgtaatacaactgataaagtcagctccagacgacagacaagcgaatgcctggatgatatgaccatgccatcgttcggaagatcatcgagtgcgtcaccgaaccgaagtcgtcgccaaacgcaaagattgatgacaaagtcaaatattaacgatatatccgaaccaacatatgtcagcatcttaaggggaccaagaacaaacgaatgcctcgatgaaattactatgccttcttttggcgcaatatcgaatgtttccaggggaagaacgtatcgaggacaaacaatgcctagcgaatgtttggacgacatgacaatgccatcttttggaggcatttcaagaggcaaaactccagatcgatatcagagatcaatgccatccagaatgacaagcgagtgcttggatgatatgaccatgccatcatttggtggaatttcaggatccaccagaaggcatttaacacttcccaatgcgaggagcagttctcaaggatcgagccgccggcagagaaccaatatcgacgatatatcggcccctttctttgcacactcaaccaaatatggagatacaaatgaatgtctggaaaatgtgtcaatgccatcttacggtggaatatcgggaacatcaaaaatgaaacaatcaaggcggcagcagttaacaatgccatcgcaaaatattggagatatatctgcgccatcattcgcaagttcgggtagaggtaatatgaccagtgagtgcttagaggacatatcgatgccaacttttggagaagtgtctaccaaatccaggagtaaaagtctagagggccaacaaagtgcaagacatcgttcgatgaccaatgagtgtttggatgatatgaccatgccttcaatgcccggactatctgctgcgtccagaagacaaatgacactgacaaatgagtgcttggatgatgttagtgccccatcctttgatcaaagcgtcttccgtggctcgagcagaagacaaggcagactatcatcgccaaaaccatgcgcgagttccaccagatgtccaccgacaaatgagtgtttggatgatataactatgccttcgtttgatcctgtttcgttggcctccgcacagaggcagatgaccatgcctagtgagtgcttggaggacatgagtgcaccgtcctttgcaggtgtttctaatctatctagaagacaaactactggcctacccagcgagtgccttgacgacatgagcatgcccaactttggcaatatttctgaaatatcgcgaagaacggaatgtgagccagcatttcgtagaagtagatcggttggaaggagtgtgcgatgtaatcgcagcataggcaaatcttattcctccagtgaatgtctagcggatgtgacaatgccatcatatggtgggaattcatatgcttcaaggagtaagagtacttcacgaagtcggaaatccatgctacctattagggatttatctgaaatgcggactgatgaatgtctggaagatgtgacgatgccttttgttggagatttatcgggtagatccagagcaagtagtccgcggcaaaggtcaacgactcctagaagaggtcagttcacaagcgagtgcttggatgatcaaacaatgccatcgtttggaggtgtttcacaatcttcaggtcgtaggactcccagacgacatactaagaatattacaaataatactaatgaatgtattgagaatatatcaatgccttcgtatgttaacaatacgagagcctccaacgtagaaacctttaagtcaatgcaaggatcaagacaaggagcaatgaccaacgaatgcttggatgaagttaccatgccatcctttggcacttcaagtcgatttacagctacaaacgaatgtctcgaggacatttccatgccttcatatcgcgataataccgaatcgcttaggcatagatgtcctacaccaattcagagctctagacaagaatgtctggatgatatgactatgccatcttatggaagtacattgccaactttaggagaaactcgccgctcaactaggggaaatggtcctaggctcgaggacatttccatgccttcatatcgcgataataccgaatcgcttagccatagatgtcctacaccaattcagagctctagacaagaatgtctggatgatatgactatgccatcttttggaagtacactgccaactttgggagaaactccacgctcaactaggggaaatggtcctaggcgaatccagagcttaaggcaaagaacgttaaccaatgaatgcttggatgatatgactatgccatcatttggaagatcttacggaggacctgctactaatgaatgtcttgaggatatatcgatgccttcatgtggtgaaaatacaggatcgtctagaggatttagtccaatgcctctagaaagcacaagacgcggagcgtcgatggtgcaccgatccagacgagggacgatgactaacgaacggctggatgacatgacgatgccctccttaggtagttcagaacatggacaagctacaagtgaatgccttgaagatatttcaatgccttcatatggagcgaattcaggaatgtctaaaagaaagtgccctacaccaccgaaaagaaatactccgaatgttacaacagagtgtttgaatgacatgaccatgccatcgtttggtgatccaagtcatggaaacggatttggtgaatgtcctgagtccttcagattgattacagaaagaaagttacaatgcccgatgaccagcgaaaacttggataatatgactatgccatcgtttggtactttaggccagagtcaagctacaaatgaatgccttgaggatatttcaatgccatcacatataaggaatactaactcaataccaggaagaagcactacgccaaggacgctgtctagaaatgaggtgactactaacgaatgtttagatgatatgaccatgccatcatatggaaatgtattcggttcacccggaaggcaaatgactttgccaagtgagtgcttgaacgacgtgagtcagccgcccttcgtaagaagtacgtctgaggaaacgaatcgaagacatgaaaacttgacgtcccaaagcgtggactcgcgaaaccccaggccaaatcaaaggtcggtgacaaatgagtgcctggaggatatgacaatgccaacgcttttcgaaaattccggatcatctcggcacggcgtattgaacagctttcgcttggaggacattagcatgccctctggagtctcaaatcgaacccaggacagtgaatgcgttgaggtcaaggtgagcggaacgcatggaggaccaacgaccagcgaatgtctcgaggatgtgagtgcacccagttttgctccaagctctcgcatgacctcaagacatatacccgagatgacaaacgagtgtttggaggatgtttctatgccgttaaatgaatcatcagctatgaatgattctaaatcaatagctcgacgtccacccgacatttcgtatccctcggaaatgttggccaacgagagtgctccttcgtataattcacggcaggataaagctgataaatctgctgattgccattctaagtcaccgcagcaaaccgccagaagtcgtggtcgggaaaattgtagtggtgctcgattggaggatgtgacaatgcccacatttgacgacgtatcctatcaaccacgtcgccatcaattaactatgcccaccgagaatttggaagatcaaactcagccggatttctttaactcaacggctttgccaagttctactagaacggagaagcaacatgcaataaaatcccctcgacaggatcatataagcattagtaaacagcttgccgatgagagtgctccaactatgctgaaggacactacattgatcacccatagctcgacaacttcagtgaccagggtttttcagaagacggcagaaacctctaataactccgggcatccgaggatagatgacctttcaatgccacagtttgagtccacgggtgctagctcccaacaggatatctccctgcacggctttcaatccatggataactatagaccatttgatgaattgatttatagccagaattcggtagctaatgaaactcagcccgagactcctcaaccaacgaggtccataaatcgcagtcgaagtacgcgaagagtaccaagcacaccaagaacaccaagatcaccaagtacaccaaatgttcgaggagacacttctcccaattctagtactagaactccaggacaacaaccatgcgatatggttagcactagttacccctacggaaaaccccaatgctacaaccgaaaaccctgctag

SEQ ID NO: 4953 - protein, 1577 aa, DROSOPHILA
MDQSMPSYHEASMPNECFEVMSSQDVLEDETMPSFENSYVFSRRQPTMPSECLEDVSQPSFERSRSRRQSPRRQLTMPSQNLCDISAPSFGDTTRDRSTNECLEDISMPTFEEEVSNVSRSRSPRRKKISRSARNTTDKVSSRRQTSECLDDMTMPSFGRSSSASPNRSRRQTQRLMTKSNINDISEPTYVSILRGPRTNECLDEITMPSFGAISNVSRGRTYRGQTMPSECLDDMTMPSFGGISRGKTPDRYQRSMPSRMTSECLDDMTMPSFGGISGSTRRHLTLPNARSSSQGSSRRQRTNIDDISAPFFAHSTKYGDTNECLENVSMPSYGGISGTSKMKQSRRQQLTMPSQNIGDISAPSFASSGRGNMTSECLEDISMPTFGEVSTKSRSKSLEGQQSARHRSMTNECLDDMTMPSMPGLSAASRRQMTLTNECLDDVSAPSFDQSVFRGSSRRQGRLSSPKPCASSTRCPPTNECLDDITMPSFDPVSLASAQRQMTMPSECLEDMSAPSFAGVSNLSRRQTTGLPSECLDDMSMPNFGNISEISRRTECEPAFRRSRSVGRSVRCNRSIGKSYSSSECLADVTMPSYGGNSYASRSKSTSRSRKSMLPIRDLSEMRTDECLEDVTMPFVGDLSGRSRASSPRQRSTTPRRGQFTSECLDDQTMPSFGGVSQSSGRRTPRRHTKNITNNTNECIENISMPSYVNNTRASNVETFKSMQGSRQGAMTNECLDEVTMPSFGTSSRFTATNECLEDISMPSYRDNTESLRHRCPTPIQSSRQECLDDMTMPSYGSTLPTLGETRRSTRGNGPRLEDISMPSYRDNTESLSHRCPTPIQSSRQECLDDMTMPSFGSTLPTLGETPRSTRGNGPRRIQSLRQRTLTNECLDDMTMPSFGRSYGGPATNECLEDISMPSCGENTGSSRGFSPMPLESTRRGASMVHRSRRGTMTNERLDDMTMPSLGSSEHGQATSECLEDISMPSYGANSGMSKRKCPTPPKRNTPNVTTECLNDMTMPSFGDPSHGNGFGECPESFRLITERKLQCPMTSENLDNMTMPSFGTLGQSQATNECLEDISMPSHIRNTNSIPGRSTTPRTLSRNEVTTNECLDDMTMPSYGNVFGSPGRQMTLPSECLNDVSQPPFVRSTSEETNRRHENLTSQSVDSRNPRPNQRSVTNECLEDMTMPTLFENSGSSRHGVLNSFRLEDISMPSGVSNRTQDSECVEVKVSGTHGGPTTSECLEDVSAPSFAPSSRMTSRHIPEMTNECLEDVSMPLNESSAMNDSKSIARRPPDISYPSEMLANESAPSYNSRQDKADKSADCHSKSPQQTARSRGRENCSGARLEDVTMPTFDDVSYQPRRHQLTMPTENLEDQTQPDFFNSTALPSSTRTEKQHAIKSPRQDHISISKQLADESAPTMLKDTTLITHSSTTSVTRVFQKTAETSNNSGHPRIDDLSMPQFESTGASSQQDISLHGFQSMDNYRPFDELIYSQNSVANETQPETPQPTRSINRSRSTRRVPSTPRTPRSPSTPNVRGDTSPNSSTRTPGQQPCDMVSTSYPYGKPQCYNRKPC

SEQ ID NO: 4954 - DNA, 4584 bp, DROSOPHILA
gatgaaaagtaaacaattagcaagtatcaaaaaataaggtaaacataatatagcacgatattatgaaatagttagtatttagttaacggatcctacctaactatccccgtactgcccgaaatttacataaaaatctgaaaatctaacgtaacacctaacaaaacaatttcaaaacaaacaacagctgttttgcgataagcagaatcgccaatcgataagttaaaagggcaaatcgatatgcaaagtcctacctatttaaaaattatccgttgggatttctatagtctttcatctattttagttttaaatatctttattttgtaaattaagaaataactaacttaagaaataataaataattaaactagtacgtcttaagcagaggttcgaaagattttatttcgttttctgacgatctacaaaaattgttttaaaaatccagtttttccttgtcgaactgaatgtacttgacctgtccgcccttggcgatgatctttccatcggacttacgcctcagaatgcagtccaaataggccattttcttaccggcccgcacggtattacaatcaatttcaataagttcgccaggtttcgctgctgcaatgtagcttacattcaggttggccgtaactccgggatgggatccttgaaatttaaaaaaatttcattgtagattctatagattgtaataaacaaactttcaaaatacctttcgacataagggcatatgtggtacaattatcaacaattgttgccgtaagaccaccgtgcaaagttccttggcgattcaaatgctcattggccacagtgaactcccctattgcgcgaccatctccaccgcctgtaattttaatctgcgaattgaaatttgtttacatttttgaatctctgaagatcccacgagagaggtgagcacttcacggttatcgattgcagcgagctgaattatgtaataccatcactgatgacagtcagctgtttttgagagacttcgacggcgtcgctttaaaatcggctgcacaaattgtttagaatcttaccattttcaagacgcggtcgaatccattggacccgctggcgtactcggacatctgcttcacaaagtcctttgaaaagaaagaacttcagttatctactcaacaagttacatggtgctctaaccattcccagtttcttggccgccattccggtggatttggattcctgaactgagcacgacgaaatgacgaaagttactgagggagaaatttcacatggcgttcaagatgtcgggaaatgtgagtgtatgcgtgctaaatagatatacccacacatctgagatagtgattgccgatttcgcgcggtttgttgtgctcgctctgttcgcacttacaaataattcctattcttcaatgaaatagtgtaactggaatatcttgtaatataattgcagtttgttattgcaattaataaatgtttaatttcgttctagattatctggattttcaccttctagccaaaggattcgtccgccaggactcggtacacgactttgtaaacagcgattccgatggagactttatagcactgagcggctccaaatcggaagtgatcactctggaattgagcagcaagttcatggtcgtggatccctttccgtattttgtggccatttatgattccaacgctgcggaaacacgacctctggacgttttggccaacaaagtggatctggttgccatatacgacagctgcgatgtcctggaggcacagcacttggccctggacccggcatacacggctgtgtgctccgttgccgtgccaccagccagactaacagctgttaagcgagcacccaagctggcagctaatggaaatctcctcctgggctccctcaacacttatggatccttgagcctaataaacaagtccgctgagtacaatcgttggaaccctgtggaaggactaaatatcgctgaaactctgagggacactctgctgcctgaagtggacatcgccaagataaaagactttaagagctatcaagaatatattaatcccgcctggatcactatgtttgcttggttacctgatgatgcagatgccactggccagcatgttttggttctgggaacagccgcaggaagtttgtggttgctcacactaagcgccgatgtcaaaactcttttaagtcatcaagaaacgaaaacctcaatgggtcgtatctgccatatacaagctttcaaggaccttctactggtgggcgatagcaacggactcattcacctgtaccaattgccagctaagggaaatacagctctcgccttagtgaagcccttgtgggagaaagccgatcgcatgggtctgcaaatggcagtgatcactgaatgtcccagaatggattgctattatataacctgctgcaaggcggcgcacctgctgacctggagcatgccaagaacggggagcacagactgcctgcaagctcggatctatgtcggcggaatgaagatcaccgctctctgcagcctggagaacagtagctacgttgcaggaaccgctggaagctgtttgtcttgcgtacaaattatccacgagaataatcagcttagcctgcagatgcaatcgatagccatgggtgtccttcaggatttccaggtgatgggactgtgcaccagtaggcacaagaacttaatgaccctgttactctaccgcaacaaggaatatctaaatgaaactgtatctcaaaagaaccagttggttatgcaagtgctcaaggtggggaatcaggatccacttgatcagcttgtcaggcatctggaatccaataagcccatgaatcactataccgatttattagctggactacgtctgcacgtttttgccgaggagaattggcaaaaatttatggacttttgtccattagattccattgaatttgccgataccgccactgaaggtcagctgcagcagctgcaaattaaatttcatgttcttcaaaacgtgattcgcctgcaatcgagccacctccagctgacagttcacatccaaaagtcccgggatgaactgcagctgctccttgcgatgctgaatatcacacacataagactgaggctccagtttattgggtcattaagtaagagatcaccattccaggagcaggcgataaaatgtatgttcgaggaggcccacagactgataaataaactcaatgacgacttcacggaaaaccatgccctaggatccacagcaaggacattcgttgaacaaatgggcaaccatattcagcacttgcacgagatgctaggtatacctgtgatatctaatccccagaagcaacttcatcgatgcagtgtgtcctttgtggaggtaagaattcactagaattcattttaagacaagactacagtatccgtacagatctccctcagcttggagcgacgctactgcagcctctgcaaccgccaaatcctattcgagctggacaatctgcaagaactctacgagtcggggagacatctgacatgtcccgtttgccatggaagctttgccacggaaatgtttaatgcataaacgttaaatttattctcaatcttaattacgaagtgttttgtgtgtccgcctctaagagcaaagcaagtgaatccatggagacacctcactcggcttccagatgccgacacacatggtcagaaaaggtgtgtgtgtcattgttagtactcggaaacatagataatgggagtggtctcgattagcagaatgtcctgctccacctggcgaagatcggactccagcttgcttttgcgctgccgcttggcgatgctgtcgataaggagcgacatcgactgatactgcttggtcatctcggtcaggctcagtcgcagtccctcgaggatctcatttcgctcggcctgctccatcacccgcatacccggcattggcggcggaccacttgattggacggatgccctggtgaaacccttgataccgcggcacagctccagcaaacgtgcctgttccttggcacacaccgcattcatgtcggccaacatcctcttggttttcttgaggtaaacaggcaccttgccgaaatccttgcggcagataaactgcggtaccaatccggaattgagtagatcgtgacgagctcccacgggagtgtctacataacgaggtggcgggggacagggaaccgtttgtccggcacatatcttgttgcgtttgatgaagttaggtaccattgccggctttttgccgccactgcccggtggtggtagtgggggcattggcggcatcttgggacacttgtgggtgttctctcgccgccatttgatgccctggctcttgcgcaaataggcgcacggtgggtcaatcggagtgtgagcacagcccatggtgcggtgggctgatttcttggcctctgtcaggacgcgggttccatcgttctggaggataatcgatagcttcttgtcctcctcgttaaagcgttcgcgaagtctcttggcatacttggctgccctctccacaacagctgcaaaattgcttaaagttaggtgggaggtaacgatttttagtacgaatccctacgatttttgtagacaaaaa

SEQ ID NO: 4955 - DNA, 2339 bp, DROSOPHILA
tcgctttaaaatcggctgcacaaattgtttagaatcttaccattttcaagacgcggtcgaatccattggacccgctggcgtactcggacatctgcttcacaaagtcctttgaaaagaaagaacttcagttatctactcaacaagttacatggtgctctaaccattcccagtttcttggccgccattccggtggatttggattcctgaactgagcacgacgaaatgacgaaagttactgagggagaaatttcacatggcgttcaagatgtcgggaaatattatctggattttcaccttctagccaaaggattcgtccgccaggactcggtacacgactttgtaaacagcgattccgatggagactttatagcactgagcggctccaaatcggaagtgatcactctggaattgagcagcaagttcatggtcgtggatccctttccgtattttgtggccatttatgattccaacgctgcggaaacacgacctctggacgttttggccaacaaagtggatctggttgccatatacgacagctgcgatgtcctggaggcacagcacttggccctggacccggcatacacggctgtgtgctccgttgccgtgccaccagccagactaacagctgttaagcgagcacccaagctggcagctaatggaaatctcctcctgggctccctcaacacttatggatccttgagcctaataaacaagtccgctgagtacaatcgttggaaccctgtggaaggactaaatatcgctgaaactctgagggacactctgctgcctgaagtggacatcgccaagataaaagactttaagagctatcaagaatatattaatcccgcctggatcactatgtttgcttggttacctgatgatgcagatgccactggccagcatgttttggttctgggaacagccgcaggaagtttgtggttgctcacactaagcgccgatgtcaaaactcttttaagtcatcaagaaacgaaaacctcaatgggtcgtatctgccatatacaagctttcaaggaccttctactggtgggcgatagcaacggactcattcacctgtaccaattgccagctaagggaaatacagctctcgccttagtgaagcccttgtgggagaaagccgatcgcatgggtctgcaaatggcagtgatcactgaatgtcccagaatggattgctattatataacctgctgcaaggcggcgcacctgctgacctggagcatgccaagaacggggagcacagactgcctgcaagctcggatctatgtcggcggaatgaagatcaccgctctctgcagcctggagaacagtagctacgttgcaggaaccgctggaagctgtttgtcttgcgtacaaattatccacgagaataatcagcttagcctgcagatgcaatcgatagccatgggtgtccttcaggatttccaggtgatgggactgtgcaccagtaggcacaagaacttaatgaccctgttactctaccgcaacaaggaatatctaaatgaaactgtatctcaaaagaaccagttggttatgcaagtgctcaaggtggggaatcaggatccacttgatcagcttgtcaggcatctggaatccaataagcccatgaatcactataccgatttattagctggactacgtctgcacgtttttgccgaggagaattggcaaaaatttatggacttttgtccattagattccattgaatttgccgataccgccactgaaggtcagctgcagcagctgcaaattaaatttcatgttcttcaaaacgtgattcgcctgcaatcgagccacctccagctgacagttcacatccaaaagtcccgggatgaactgcagctgctccttgcgatgctgaatatcacacacataagactgaggctccagtttattgggtcattaagtaagagatcaccattccaggagcaggcgataaaatgtatgttcgaggaggcccacagactgataaataaactcaatgacgacttcacggaaaaccatgccctaggatccacagcaaggacattcgttgaacaaatgggcaaccatattcagcacttgcacgagatgctaggtatacctgtgatatctaatccccagaagcaacttcatcgatgcagtgtgtcctttgtggagatctccctcagcttggagcgacgctactgcagcctctgcaaccgccaaatcctattcgagctggacaatctgcaagaactctacgagtcggggagacatctgacatgtcccgtttgccatggaagctttgccacggaaatgtttaatgcataaacgttaaatttattctcaatcttaattacgaa

SEQ ID NO: 4956 - protein, 694 aa, DROSOPHILA
MTKVTEGEISHGVQDVGKYYLDFHLLAKGFVRQDSVHDFVNSDSDGDFIALSGSKSEVITLELSSKFMVVDPFPYFVAIYDSNAAETRPLDVLANKVDLVAIYDSCDVLEAQHLALDPAYTAVCSVAVPPARLTAVKRAPKLAANGNLLLGSLNTYGSLSLINKSAEYNRWNPVEGLNIAETLRDTLLPEVDIAKIKDFKSYQEYINPAWITMFAWLPDDADATGQHVLVLGTAAGSLWLLTLSADVKTLLSHQETKTSMGRICHIQAFKDLLLVGDSNGLIHLYQLPAKGNTALALVKPLWEKADRMGLQMAVITECPRMDCYYITCCKAAHLLTWSMPRTGSTDCLQARIYVGGMKITALCSLENSSYVAGTAGSCLSCVQIIHENNQLSLQMQSIAMGVLQDFQVMGLCTSRHKNLMTLLLYRNKEYLNETVSQKNQLVMQVLKVGNQDPLDQLVRHLESNKPMNHYTDLLAGLRLHVFAEENWQKFMDFCPLDSIEFADTATEGQLQQLQIKFHVLQNVIRLQSSHLQLTVHIQKSRDELQLLLAMLNITHIRLRLQFIGSLSKRSPFQEQAIKCMFEEAHRLINKLNDDFTENHALGSTARTFVEQMGNHIQHLHEMLGIPVISNPQKQLHRCSVSFVEISLSLERRYCSLCNRQILFELDNLQELYESGRHLTCPVCHGSFATEMFNA

SEQ ID NO: 4957 - DNA, 3702 bp, DROSOPHILA
tgtatgtcatgctatatgatcgctcctcctatatgtatgttcgcagattcttggtctgctgaggcgcgagcaagccacacgcgctctccaactatttcgaccttgatgggactagcggcattatctatcaactcgcggttgttttgcttgttgtggcaatctgaatatattacatatagaaccggatcgcacgaatgttgtacataaatatgtacgtatgtacatacatatatgggaatggtgcagatacatgtgaatgaaggggctcgtctcatgcttgggatgtgtgtaacgtgcttttaattaaagctgtgaggaaaaccagtttttgatggtgctgtggattcgaaaaacatttccagatctaagcataatcgttgatagttttaatagaacataaccatatcactgaaggtcttagggtcatattaatcaagttgtcaagcgtgtgaagccattgaacatctaattatcttcagggcgcaactcacactattcacgttgctttgggaacctgagtgccggtaaacaaatcgaagcaagtctgtgccttaaatttctctgggcctttttattcaagagacttctctaaatcgatcaaaatttaagtgtgtaaatgcaatttatcagatctatcagatcagtgtgccagcgtcattcccctcatgtacgtataattagcggagattcaaaaggttcatgaaccgcggcttttctccggcggaagtgcttacacatgtaactgcagaggagtggggcggggaagtggctgccatcaagtggccaccttcggccgctggtggctcagttcactttgacggactgctccggacggacgtggtgcgataaaccctcggttccaacccgtatcttttgccgagtcccttatcgtgccaagttttcttatcggacattggggcaatcttatcgccagcaccagaaagtcgggtaaaaagtggtggaaagcacctagctcagtgtgactaaaattggtcggaattcaatgtgttttttcgcagctcttcgctgttatgctgcctcagtagggtaatgatttatcgattgattaccaagttgactaaaagattataagtgagagtgtttatgttattaagaccccatctaagaactattcgtggaaaagagcccgctggcacgtgtctaacctcaaatatcaaacgaattcaataagtgctactgacctaaactttcgaccaagaccggtgataaggagtgaccaaagagcactacaagaatgtactgggctctcaatatcgatctgtccagatcgatttctgactcatcgctccataccagaggccttggtattttcacttcccgtttgcaatttacgaccgatttgaaccgacaaaccgattagataaacccgtagcttggttgtgggctgtactttacagtgttaactctgcgctgacatacacacacgcacacacacatctgccaattaatcgccactaactcacccaagcaatagccacataaactactaaacgcaacgcctaacaacgagtgtaatcgcctaatcgcaagagcatccccatttcttctacgcacacagatcagtaacaggatcaagagcaaggtaaccgtccaacactacatgtcctaaaactaggaacggttctccagcccaaggacttatcgaggacactatccaatcccagtcaatcatgccgctcttcacaagaaaatcacccaagcaaggacccacctcggatgggggctcccagttcggcagtcgctcctccatgaactccgggtcctcccagggcagccacattagcaataacaacaacaacagcattccggagaaaacaaagcccccgctggtcttccactgccaactggcccacggcagtcccaccggtctaatccacgacttctccagcgttcgagagctgtaccagaagattgccgagtgctttgacatatccgagaaggacattctcttctgcaccctcaactcgcacaaggtggacatgacgcgtctgctgggcgggcagatcgggctggacgactttatattcgcccatcgcaaaggtcggcccaaggagatcgagattgtgaagtcgcaggatgccctcggactgacgatcaccgacaacggggccggctacgccttcataaagcggatcaaggaggactcgatcatcgatcgcatcgagcacatcagcgttggcgatcacatcgagaagctcaacggccagaatatggtgggcaagcggcactacgaggtggcgcgcatgctgaaggacattgccaccggggagaccttcaccctgcgcctggtggagccagtgcgaagcggcttccagggcatcggaccgcgcagccagtcaagggcgtcgggctcggccggaggaaagaactatggcagcggcaaggagacgctgcggttcaaggccaatggcaatgcccagatcgagccgcagttcgatgaggcgactgtggccggtatcgaggccattaataacctgctggagtccttcatgggcatcaacgacacggagctggcgtcccagatctgggacttgggcgaccaaaagtccaactcaatggacttcgccgaggccatcgacaactcggacctagagtcgttcggcttcacggatgacttcatcatcgagctgtggggtgccataacggatgcccggcgcaagtccacgaccagtcccaagtaattgggtaaccataccagacgcttttccaataaatgaggagtgctattatctactatttgagaacgttttgttttagagcctagttttatttaccacatatcatgctacaatcccatatacaaacatatgtcgtctgcctttgccaattgtttagttatttgtattcttcacggtaacctatttattatatatatattttttgcgttcagatgaacggggggatgtgccgaggcatccctactatgcatatatttttggtacaatttgtttgatgtacatacatacatacgtataactatacttctttagttttatcctttaaacgatacaaatatatttaaattatttaaatcggatgtgattttggttattttggttttttatttcgattgttattgctctctgttttggtaagtttgtttatttgctcgggcctttaggtattatttgactcataaataagaactattagtttttcgtaggcgttgttatcttttgttggcacacagatcgcatggcattcggaaaatattccacagtccccaaatgtgacgaattgtttggctgcttttctctttgcgatttttctgtttttctataatttgcttgtatagcgacggtcctagtatacatatttgggccatggatcatttgaaatgtcattagtatattctcaagcagacgacttcctgtacgaaagaacaatctagtcagtgtgaaaacatctgcagtgacgtagatcgcaccatcccacagtgacgctctattcgggttccagattggatcagatcatacatataacacggattcctttatttattacatgtgcaaagcttttgattgcgcataaacagctgctgtttggcgtgcgagcagctgataagcacagttattaaggcttgccaaacgagcgggagagagagattggattttgcacattacactgacaaaaatctatatatacagcggaggtcaactgtgcagttgcttttgaagaaat

SEQ ID NO: 4958 - DNA, 1170 bp, DROSOPHILA
tcaatgtgttttttcgcagctcttcgctgttatgctgcctcagtaggatcagtaacaggatcaagagcaaggtaaccgtccaacactacatgtcctaaaactaggaacggttctccagcccaaggacttatcgaggacactatccaatcccagtcaatcatgccgctcttcacaagaaaatcacccaagcaaggacccacctcggatgggggctcccagttcggcagtcgctcctccatgaactccgggtcctcccagggcagccacattagcaataacaacaacaacagcattccggagaaaacaaagcccccgctggtcttccactgccaactggcccacggcagtcccaccggtctaatccacgacttctccagcgttcgagagctgtaccagaagattgccgagtgctttgacatatccgagaaggacattctcttctgcaccctcaactcgcacaaggtggacatgacgcgtctgctgggcgggcagatcgggctggacgactttatattcgcccatcgcaaaggtcggcccaaggagatcgagattgtgaagtcgcaggatgccctcggactgacgatcaccgacaacggggccggctacgccttcataaagcggatcaaggaggactcgatcatcgatcgcatcgagcacatcagcgttggcgatcacatcgagaagctcaacggccagaatatggtgggcaagcggcactacgaggtggcgcgcatgctgaaggacattgccaccggggagaccttcaccctgcgcctggtggagccagtgcgaagcggcttccagggcatcggaccgcgcagccagtcaagggcgtcgggctcggccggaggaaagaactatggcagcggcaaggagacgctgcggttcaaggccaatggcaatgcccagatcgagccgcagttcgatgaggcgactgtggccggtatcgaggccattaataacctgctggagtccttcatgggcatcaacgacacggagctggcgtcccagatctgggacttgggcgaccaaaagtccaactcaatggacttcgccgaggccatcgacaactcggacctagagtcgttcggcttcacggatgacttcatcatcgagctgtggggtgccataacggatgcccggcgcaagtccacgaccagtcccaagtaa

SEQ ID NO: 4959 - protein, 336 aa, DROSOPHILA
MPLFTRKSPKQGPTSDGGSQFGSRSSMNSGSSQGSHISNNNNNSIPEKTKPPLVFHCQLAHGSPTGLIHDFSSVRELYQKIAECFDISEKDILFCTLNSHKVDMTRLLGGQIGLDDFIFAHRKGRPKEIEIVKSQDALGLTITDNGAGYAFIKRIKEDSIIDRIEHISVGDHIEKLNGQNMVGKRHYEVARMLKDIATGETFTLRLVEPVRSGFQGIGPRSQSRASGSAGGKNYGSGKETLRFKANGNAQIEPQFDEATVAGIEAINNLLESFMGINDTELASQIWDLGDQKSNSMDFAEAIDNSDLESFGFTDDFIIELWGAITDARRKSTTSPK

SEQ ID NO: 4960 - DNA, 18748 bp, DROSOPHILA
aagtggccacgtggcacccagaattcgacgctcttttcagcttccattctgggtgcaggtgccgattattctacgggctattttgtatcgcgagtactacgtacaaacctatgtaatttcaataaaaatttattagttgtaaaagcttatgcattttaaagcggaaaggatttcccagcaaatgtgcagtcgagcacttgttggtcgtcagtagccgtacagctggatttagtgcttgaattattccatataaagttcttccttttgcttattatttaagtaacatgactatttttaaatttaagcattttatttaaaaacttgttcagtccatttttacctttatattttatttgatttttaggcatttgaagctggtcacatttcccaactatttcagctgatctggcaagtccgccaacattactatgcataatttttggctgatctggtagcattcgctgctgatatagcaatgcttccagctaacggttcatttccaacgaggccgccatattgaaaaatgcccagttaaaacacctactgagatttgtgttcgcctggtacttcagtctggggaatccggcatactgacagctgaatttattatttttcccgaggatgctcatatatttcgaactgaattaccagggaagcataagcgtggaaaggtgtttttaaaacaaccgccaggattcccaaagtcttggttttggtgggcatgctctattctgagtaccaggcgaacagaacttctagtaggctaccaacgatcagctgatctatctgatgcctggtctaatctaacggttcttttattagggatgccacaatatttttctattgatccggtaatatgtccgatgtttgacaatattttaatcaatctggcaactatgtcgtcataacatttttcgctaatctggcagcactcaaatcgttcgttgaattcaaaaatgtaaaatgtcgtttagttactaatttcactatattttatattgaataaattaattacttttattgtcgcacacacttaataaataatgtactcatttaaattacacagttagaattgctcgctttatggggaacagcgagtaatttacattatagtattggatctacattggaatacttcgcctccttctactccgcagaccattgcaaacttgtagtttctcgccctcaatttaatttctgtctaagtggtaagctttggcatgcattatatgtcatggttcccacttaatgggtatgcgcctaaattaatgtacctaagtatctatgtgttattcctttaggtgtactgtatatgtacgggagtacgatgtatatatctacttctatcgatcggtaagtcgaaggagtcagtccccaaatggagttggaagtggagggcagcgacgggagattttccgggaatactgtcgtcgatggttggttgcggtttggatagtgtacatttttaaaggaggctaggattcgattagtttcgattgggttgggctgctgcttagaagcacgtgtaataccactcaagctgcttgcgctgcgcctcccaccgcagctggctttctcaaatggccgcctcctgcaggttttccttgttcttctgctggccgtgtccgccgaccaggccgccaatgcccaggcccacggcaacgcctccgcccaggtgattcggactggggctgtcgctggcctcggggcgaatgggcttgtttttgcagtagaactgcttgtgagccaggtaggtcttcacgtaattgaaggatatgtcacaggttgagcagtacttcttcatcacctcggcggcggcagctgctgcggcagccacgctgctgctgtttcccagcggagaagtcatcggcggaaccagcccgccgggcgcagcatccgctccgacttcgattggctcagccttaatatgtggcgtggcgatcggggagttgttgttctcgtgcaccagattcacagtcggtggtggatccagaggctccgatttaatgtggaaactgtggacgaggaagttagagaagatatagtaataagaatgtagataatttcctgtcatccttacctgggtgcttcaccgttggatacatcggaattcgagtgttggttggtagtggggttggaagtcacatcttgatctctggtgtcgggggaaatggagggagagttgatggccacatggggatgcatcagcttcatgtggcgcagctgtaaggaaaaagctatagtgagttctttggtctggcagcaataaaaaggagtacgcaccacattgcccttgtaggtggagacatagttgcagtaatcacagttgaacatctgcgagggatgatccatggaatcgtgtccagttgtggtagatgcccctgttggagtaaccagttcctgactcagcgcgctagcatcctcttcaaagatgcaggtcatgtatagctcctcgtttacgtcgctagtcttcttgtcgaaatgggttcgaatgtgggtgcgcatgccgcgaagagtgttccccttgtactggcagatgctgcagcggtatgcctttactgttccgtgcatctccatgtgtttcttggccagtgctgctgtgggactcactaccccgcaaacaggacacttgttcagactattggtggcgggttgcggattgactgtcggcgctgcgagaggattcgcaacgggtggtggacaaggcagaccaatttcatgcaatgtcttgcactttccgcacttctcctttggcatgcccagttggccaggatccgtgggcgtcgcggcaggggcagcaactgctcctcccttggggcaatagtagttctgatgggctcgcaggttgtccagggaagtgtacttaattccgcaggcggcgcagatcaactgttgatatgccaccggtgtggtttccaccgacgaagcagcctctgcagctccggctcccagtcctcctgctccagcgatggatggtgaaacggccgacttgacatccacttcactcgcaccttcttggcttcttgccgagcaataatgctgtttgtgtgccaagtagttctcatacttgcaaaacacaatattgcactccatgcacttggacacgccctttttcacatagatctgaggctgctgggcgccacctgccgatcctccactacccggattcccactactagtttgggcaggaagagaagcgggcgggaaggctgctgctccactactgcccgccacagcagctgcggccgctgccgccgccagtttcagagccagttccgggttggttttggccaacagcgactcggagagtccaaagtccgcaggtagcatggagcgcatgtcgagcagatggggaacagccacattgagaccaggtggtgacatggaggaggcgctaccagccccggaactgcgtggactgatggctcgtcttttgggcgagggactcatcgaaggactgctcggcagggagggagcgcaaacgatttgctcgggagtcacacttccacctcctctcggagtctcaacgttctccttgccggttcctacgccggcaaggagtacttcttccacatctaagagagcattccgcagttggcgctgacgcaagctcagtgaattcagggtgattggcgatcgacgcagcgagagatcgagaggcgcagattctctgaaggtagtaaaaaagagtatgcgttattcagtggttttcatcatcaggggagtctagccatagtaataacttttatctgatgcgtgaatcacaaatatttaggaactaacctagttaaccctgcctcttttcgcttgggctccggaggactactcttggcttctgtggcctcagcagcagatgatggagctgaagggcgttcgggttctaaggtggcgccaactagggcagtggccagtggtttaatcgttccgttgtccacggtaaaacaggtggtttcaggattcacgattcccgagttcggcgtgggcctgcacataaaaatgtaatagttcagtcaaatacctaattattttatatacattgtttcaaagccatcctcaaacgcaactggatgcaatttagggatttttctcctgggaacttacagtgggcctggaataaagctagctgcacggatcagcgagcagggcacaattatgatcgggtgggtgggcagtgccaggaaaggtggatgcgaatgcggcgtggcctggagggaggcagcggcagccgctgctgcagctgcgacggcgaccattgcgggagtcggagtcttgttccttgcctgcggactcagcttgccgggcgtagccgcctgggctgatactcctatggatccgcctgcggaacccggtccggaacctgctcccggagaggcgtctggcttgggcgtgagctgtccctctggtcgccgcgaactgcagtagtgttgtttgtgcgctcgataggtcttgatgttgttgaaccggatatcacagtggctgcagtagcgatcggtttgctgtggaggggatttgtttatcattagcttgcgactccaggggcaactggcacctcaacactttactcacttgactagagctatcctccatcggattgggcgtaactcccggcggcgctattccgttctggagaagacttggcaagccggccagtgtgggagctgctggcgaagtctggtgcatgcgcatgtggcgatttagggataccttcttatccgcgctgtaggagcactgggtgcagccatattgctttcctgtcctggccattttggctggtggctcggtggagcctccggtcaaccctgctgcatcgccagctgtggctcccgatcctcctgcccctgacttatcactgccagcctcgtccgtgtccttaattctatgagagcaatagtaggcttgatgggcctccagagttgagggcgaactgaatgcaatcccacagggcaggcacataaatctggctggttttagcagaggttctgctacctccggttgcgcttgcgtgtccggcttgacgagcggcggaggagccaggagacgagagtccggcagggtcagctccttggcatctggcttaagggcaggatctgaggccaggagcgcattcagacgcactttggggtacttgggcgtgggacatggtgagggtgaggggcacggagaggcttctggctccgagggcggcgtagcgggctgttccagcttgggaatcagctggggagagctgggactcctgggcggagtgcttgggctgtttgcaggcagttcctgctgaagatcctcctgctgaagatcgtgttcctgttccatctctgtctctcccaaatcctgatcctgttggggattggccttttctggctcctcgaactcagcatcttcatcagcgtcgtcatcgatattgttattgttgttttgggggtctctggaatcgttcaactgatcctccaactggtcctccatttgctgctgcttctgctcgcctatatcctgagcactcagatctttggaatctgcaaagaattagaacaaatatatcaatattagttattatccataagtagaataaagaacgacttaaactaaatgtgtacaaatggattttatacacaatttttatctcaagcaagaatgagaatttgcttcggggtcagacagttacatggcagtttagtgcctcaaattggcttcgcggaatccgcaacagcggcatcctatctcttgcatccgctgcccatgaggaatctatgtgtcagacagctggtttggcaattattatcgaacaaattgtcagtggtcagagctgtgaaaacaatgcgacagcagtcggttgcataggctgcataggctgcataggaggagcagcaggggcagtttatccactgtggccatctcttacgtggaaaacgctggtggaaatggaaggagatgggcaggggaaaagaaaagcccatggtggtcactgatgattaggccccgcggatcgctgcaaaagttcgaagttggccagaatcccgaactgacatctgatttgtttctgttttggccacggcgaaatattataacgaccaacggcgatgctggccgagattatggcggcggacagtggaagtggacgtggacatggcacacacatggcatgcagatggagtcgccggataagcgtcgcagtttgcagtttgcatctcgcttcgccagaaattcgacatctcgaccggagcgaacatttaccctgctcgtgcgggctccagctcccaaatgtcccccttctggagtcctccctcgtccatggatttcctttgaggatgggagactggagaggatgcgcgttgacctgtcaattgatggctattgaaatgtcagcacatccagagcgactccgacaagtagagaaaacaagagagacttatacacagaaaatcgtttagtagttagttttaaagtcattcatttcccgaataagcccatgagagaaacatttgatatattcgtattattagacgaaacagcaatgttttgaaagcaatcccaaatttctcgctgtgcagaccaagtttgttgcctgagtcttttgactgctgctgtttgtgatgccgctgccgctgccgctgccactgccactgcaacaaatgttgcaactgttgccaaactattgacggcccgccctaattgccgccgtcgatttttcacgaattcacacaattctgcacgtgagcaatcggttagaagaatcgcttcaccctgcccctccaaaaataaagggctctgctggcattccgaggcattctgcttatttgtaagatatttattgccttcgattgggtggcgataagccgcacacgtaaagtgttttgtccgggctgaagaggcctccgcgaggagaagggcagggagatggccgagcgccgatagagtgcgaacgggagactaacagctaacaatggcttttggctgggtctcggctgtagctctgacttgggtgcccagctcttggctcggagtccctagctctgcccccagcgacagctgcctctgccgccgaggattagaccgggccgggatctctcagcgcggcggttcaccagttggtggagcagatctccaccagcgattgtttcgcgagtgccatcccaacaccctttcctcttttccattgttgtgcggattcggttctgagcaccaaaacctattgcaaaccttcagattaggcggtttcaaatggagaaatacacatagttatttcgatttctcaaaccaaacgaatctatttgaaatgtgtatggctttttatattatttcaacaatattatattaaaaatactattttagtatgaaagacctttcacagttgtatgcccaagtgtacggaatttcaaggctacgcattcgcattcgcatacgaaatcgatttgggatctgggaacaagccgtcttcgctgaaattgcgatcgggcgatcgtttgtttagccatttcgtaacgttacgccgccccacacaccttttgtgtggatggcgaggggggattccccgggcatctccgcgcatctcccctccctgcggccaacgccaacaattgtttatcaatttgttaaatcagctcgccgccgtcttcagcgtcaggtctctctactcttctcttctcttcttcttgctggagctgcgatcgatcctcgccgataagcgacacaacaaaaacatacagggaggagaggtgagggaaggtggtgcatgtgggccggggatacctggcactttatcagccgccagatgattgttgctggtttctcacttggcaacttcactcggtgggcgttgttggcagccataaacaatcgaacaatttggcccaggtcccgatctcggccaggaaaagagatggaggggagccaaatgaaggagcagatccccaggatcgaccctttgttcatttgtcgctggctttcaacccgcggaccgccgtcgctgctaatcgtttcggggtcagttaacccgaaaacgaaactggcaatccctggtagggatctttccgaagatgttggccaacgagggaacgaatcaaaggtgcctaggatctcgggagcaagtcgccagtgcgtctggctgggtcagcacatagaggtcgctggatgcagctaggtacgcgggcgtatttatagtgtttgggatttaaacctgaacacaaaacgttacttcttttaattcaataatcacatttgtggcaatgttcgcctttaaatattcacctggatcactgccaatggtaaaacattttctgcctggtggcacccacttactcattagtcagacaaaatgagcgggaactactgtctccgaaacccccaaatggagcataattaaacaaatttctgcagtcgctatcgatgatcgggattttttgagggggaggggagaacagaaattgaaaaacgtgagtgaggagcccaaaacgaaaaaagcaacgggggaaacgtctgcagctgccaattgtgataagagaaatcttcattttcgcgcgaaaattttgccaccttgccttgggtttccggggctgaggctgcgattccaagtgcagactgcagacctgggacctgggactacgggacttggcacgggtaatcaacgccatcagcagctcggggatgcagccagggctctgggccaactccgcgcttatcaattgttattaatcaaggaaaagaaggcccctctgcggccgggaaacgaatgcaaagagcgcaaagttcgcaaatttcatttcacttcacacttggccagtaggaagaaatgaggcggagaagtcttagccgatctgtttttgcgccgtgtgtccgtgtaaataatcaacattctcatatcttgggggctctcaagctattcgtgatttactcgccaaatccactgctctttttcgccagcttcaacttcgattcctggcttggttcctgtagtcagcacctctttcgtttgtctctatgggaacccggagagtaaaattccattgatccgaggataagcaattttggttcctcttcaacctttggctgctgcactcttcggctcctctcgtcgcattatcgcccaattcaagtcaacaggcatcggacagaagttccttttccgagcgaaactaatttagttcatttggttcaactcaagttgctgatgtcaagggagggatcagattaagagcttgcagttgtgggagtgggagaatgcatacacttgtggtcaaaataataggttttcaaggttctcggcttgtttattgcctagtcaagtatattattgtaaggtatcaaagcatcatcatcctaaactttactctgcagttctattatgtgcacctcaactgtttctgtagtccaacctatgtatgtggtactatatcttcgatctatagaaaccgaaacacaaggcgcacagacaaagacagacggcaggcaattccttgaaatcgcccaagtcaaagtctctttttgatgtcttaattaaaaaacgtgcaaatgatacaagggactggggcaggggcgaccgaagggggtccccaggaggggtgatcgtctgggcccatgcccagagttcaatgttgagcaattgatgcaactgttgagatgtgttgctgctgttgcctgtgctgcagtcgctgttgctgttgcatggcgcgctgataacaaggcagcggctgggggcatggaaattgtcgcagtacttgaaaatttcgtgtgagcacgctcagcgccgattgtttttggctgcggtgcttgatcgcttgatcagcagcaacacaagcacaagcacaagcacaagcactagcaccagcacagcagcaactgttgtcgtcgggtagcaacagcaacagcaacagcgactgcaactgcaactgcaactgcaactgcaacaccaacaccagcaccaacacactgatcaattgcgatcttggccgaacacaataatgctgcctgttgctcccacaatctcatgtgctgctggagcggctgctgctgcggcaaggagttgctgccgtgccgtgctgccactgttgcacaaatttaaattgacccaagtgcaagtatgaatgtcgctaatctgccatcgactgttgctgcaacatgttgctgccgggctcataatttgcgtttattaaacaacctggcatttgcataaatgtcgcttccttcgattaccatcggttgatagtgggaatggcagcaacagcagctgcagcagcagcagcaacatcggctgaacttcgacgagcaacaacatgccaccgcagcaacattcgcaattgctgtaaacaaatcacgctttctgcagatcaatcaaccactgacaactgccccaagaagtcacaattcaattgtgatgttcctgctcccccgcctgcgactccatttccattcgggccattttcccttatagacacgacggcaacagcttgtttctttcgactgttttacttttactgttactgctgtgcagttcgtgagggcagcagggggcggcggggcgtggcaagtccaaaatcgtgtctggcattgtgttgacttcattgctccgttttttttttcttcttgtgctgatgacttttgatgtgttcatcaagcaatcacgacaacagcaacaaaacggagcactagggtttggtatttctttttagcagtaaattaaagaggcgcgaaaattgcccgcaagctgtgtgaatgggaatggaattcccaaaaagaggggagcacggccagttcacaatctgaaaaggaggtaaaataaaggaccccacagcacgagtcgccgatgggaaggggcggagaaaagcggggcgacttgctaacaagatgcgcgcagtcagcgacaacagcaacaacaggcagttagccaactacaaagccagaggccgccaaggagcccaagaagtccaacttcaataccaagttgggtacccgcttcaagttcctggcggagtttagctgccagcccgtttggcagcgcagcaaagggcacgcaacctggttgtatgtacacaaagagaaatttggcgttgatgtaaaccatactcgcagtgttcagcatgagtgcaataaagctgaaacggttttttagtgcgttagctgatctaagccgggcttgcactaagttgaagtacagaaataaataaaaaacgttgttggtaggcgattgcagaatcgatttttgcagtgcaccgccaacaacaaagcggcgagtcagacacatcattacctaccaattaggccccgaaaaaagtgtgtgcgtctgtgtggcgcaggctttgagctggggaatggagccgaaaggaggcaaaattgcagccaggcaacacacgaaggcagaggatgtgaggatgggatgaacggagggctgctcttttggggcaccactcgttgggtgagttgggtaggtcggagtagattggagagcggagaagtgccggatgggaggtagccaagtgagtgacaggcagcaaataagccataaatgctgggagcaaccacagtgggcaacttggagatgatggaagcaattgcctgctaacagcttgtaatgagcttagaaattgttttaaaatttctgaaagtttgaagcatgattttgaggatttgcccaaccctaaaatcaacattcagtagccaatatcgcgcacacagcactgacttgacaaatcctttagatttagcttccattcgattcatgcgcttcgcaagttgattgaatttcgcactggatttgtacaaataagcagtcatcggaaacagcaggaaaaagtaaaggcaatagcaatagcaatagcaatcagcatcatcaacatcaatgacgagggtcattcaggcgttagtttagcagtcggaaaacggctaaaagccaaatacaaacagccatgagcgtgtggtaaaatatcagggggtggcgggcagctggtgaaaggggttaatggaaatacaagtccaagtccaactcagatgactagcaaaagaaatggaattcacaggatgaaaaggcggcgtgctgacatgcagctaattgattgacagatgtgtgtccctgctcaatgtgatttctcaatagagacctaaaccgatttaagttagagcgatctaaaagtacaacagcaaagattaacttgccggcagacatatgacatatgcttaattggttctgtgctccatataatattttaatattttacgtgctctgcgtcatcggaaagaaaatcaactccagttttgtggaaacttgtagaaatgactttaaacgtacgaaaacacaatcctcgtaagtcttgaggatgctcctaaagcgacggtcaagccattagagttcgtccccaagcgaaattcaaattttattggggcatagaattcatttccacagaattctttatttttggccgaatgataaagagctttgtaatgcttgctatatatataaaaaaaattactgcataaatcacacacgcacatttacgagccaccctaacacacacaaacatacaaatttcggttgttgtattaaaaataatatcgtcgtctggtcggcaaagataagaaaatttatccaaaggattgcgcttggtgttatggccaccgcaaaaagtgagaccaacccctggtcctttcttcgccgtttgccgactcctttgtctgcgcaaccgcaaggacaaggcagaaaggactttccttcgacttgatgcgagcattttatgaccaaagcccccaagtcgaactcatcatcatcatcatcatcatctgaatccaagggccaagggtcatgggggaatgtaggcaacaggaggagcggcaggaccaccagctgcgatctgtggccagcgataaggtggaaatacatttcataaatgccacgccgcaaaaaggattacgaggctgctattttagctatccacacacataacggaaaaaatcatgagagaattatttgaaaattctttagaatataaaagggagttggcagagaatttaaaattttgaatttgcaaatgttaatatgaataacatagcttcacaagttaaaggacaccttatttattattttccaagaatttttcgctcagtgtgctctttctattcctcccaatatttcatcgcaaccgaaagggaacctcttcttggtggtaatttattgttaaaatagtataaaatgtatttggctatctgaaatcccgacaccacaatttaatggatcgaaaaaggcattcaaagctttatattcgcaatcataagtcggggaaatagtaagcaccaaaaacatgaacttttttcactgttttatagtgcacttaccacatgccagcccacatgtcgtatgcttgatattctctggtaaggataaagaaagcgggctcaactaaggggtaagggctgtgtgttgatggaacgcagctgataaggtcgagcgccgtgtaatggttttttttttcgattaccgctgctgtcgatgtttttgttgttgcactcgcttttggcccgcagcaattgcaatgcttcccgcataaacaagagccccaaaaaaaaaaacgcagatagggaaaccttgcgtctcgcaccgcgaagcttgaaccatgtcaaatgattaattacatgccgaaaagctatctaacaatttgactcgctgtctgtgtgcggttcgttttggttcggttttcggttcggtttggctggattgtcattaagccaacagcgcggccacagagggagacataataaaaaattatgccatagataaaatgccattagagaggattgggatggttggagtgggcagcaagggggtcaccacttagcgccattagaagccagccaacagccaacagcagacaacacactgcacactacagaggagcagccaaccaaaaagccaggccaaaagggggagagcctgggctgcaagtatgcaattctgcaagataagccgaagcattcatgaatttcatagataaaaaccaaacacacaggcgctcactgatacacagatacaagcacacacacacacacacacacacacagagagatacatacatacggggccagggagatgcgcttacagtacattgcacaggagcaacaacaactgaagagctccaaaagtgagcaacgtcatcatcatcatcgccagatacaccatatatatacaccagattcaccagcaagtgaggaagaaatgcgaagagaggggggcgttcaaacagcagcaaaagccaccacaaacaaacaaacatcaaggggcggactcagaaaaacctgcaagacacaaggcagggtcatatagaacgtgaaataccctacagcaaagatggtccataaaaatagctgagtaatacttgatacttgtcaacaagatacatttcgaactcattaagttatttattccattgagttgcatacttagtatctcttacgttccttataaggatttttcttgagtatcccgaaggtgaccaatccaactaacccaactagccgattagaaagagcggtaatcccaatcattggccaaaaaagtaggaattctgggaggagggcatgccaaaagaataccacacgcttctccccaccatgttgttggctgactggccaactcggctcttcggtcgctcggcgtcgccatggagtgtcaacagccagataaagattagcccagacaaacgcccactttttaggcgaacagttacgcccactggccactcgagtgctccccgctacccggtgccatctggccttggtggtcccttggtgttcgtttgctggaaatctttcactgacgcagcacaaaaagcgccacgtggaagggctgagattttcaggggaaaaggaaggaggaagatgggaagagggaggatggaggatggaggatggaggatgggataccctgctccaattgccgccagtttcgggggattattaatgatgaatgctcgagatggcagcgaaatggtgcggaatgtcgagccaaaaagcgcaggagcggagtttaggttttagataacggatttaactgtccaatgtattatgggataatctggaaattcattgttagaggttggacgcaaatagagaatatactcgtatgagctttacaacattattcacttattattagaaaataatgagacttcttcacgaaatattaattaagttaaccctaaacacacctaataatcggggttaaacgtaatggtaaactagagctgtacagataaattcccatccacttggcgataatcctcggggtttattaccatcctttatcaactgaaaacattcaattcggagcagcagctaagcagcgacagaccgctcctggccagctcagaagggttgtggtggccgggtcagagacatcgtctcaatgacgttgacattgctgatgattatgaagtgatatgaaattgatgccaatgatgtcggagtgaagtcaaaattccgcccgaggggatgggttggttggccaaggggtaacaaataataagtgcgagcgagagacagacccgacccgttgtcatttcctgcagtccatcgaagggactgaaacgagggttgtggccacccttcacccccccccccccccaccacacacacacaaccctttcacgaacgggttcacagggtctgaggtgtcagaatcacaaaaaccgcaggaggccaaggggaatggaaacagtgccactgcactgataaaaattgtattaaattagagagctctcgtcttcatctttttctggattaaatttttattggcagagtatcagcagccagcagtcaaggccagggatgggttcaaattactgggtctacacacatcgggatttattatttattattgggcattaacgggttatgtctgtcagagggagacagccatagacagaaagggatgggcacactcgcctgtttcctgcagtcgaacagataagaatttattttttggcgttcgcccatttcgtttaagctgcaaacttatcgcggattgaagggcggacaaaaggacaacggacaggcggcaggcaggatgtgccctactttgaggaggattttcctatgcatacatttatatctaaaatcgccttacctctgctgtcgacggtcatctcttctgcggtatcggaacaatcacctgaaagcagagattgacgttagttggaaatgataacgaggtttgcttgttcatttcaaaatacttttaagttttagcctatatatctatgtggtagtttgaagcgaataccctaaaaatgtaataagtgataccaaatatatagggtttgaactttatgcatagtccggactaatagttgcagatatatatctgcagattgttccagccaaatggttttactttaaaagcgataataattgctgcgagggccgcattgtttgcttttgtccacccattctctgttttgcccagtatctttgcatctttttctgttggcaaagttgagtttactacgcacagtagttggctggttcgttgcgaggccggtgtccaagccttcactccactcgattaaactacagtacccagagtacccagtacggagtaccccctccctgcacatcgcactccgctttgtgttgtttttctcatttttgattatatttcgctgattattcacttcaaggaattataataacaataataacaacaatccgcagaattccttcgttttaattcagctcctctgctctgcctcttcctctacttcgctcaccgcagatcgtagatagcgcagcacacacagatactcgtactcacagatgcagatacatatgagccgggccaaactgaggccgtggaatgaatgtgaagccacacagcgcagataggcgactgataagcaactgaaagctggctgccatggacgcgaaatgcggacttggacttggactacagtgtcggacaagtcggacaggcgggaatggacccacgtcccctcatacccccatccaccgctcactttcggttcccttctcatggttgggtccaaaggctggcttcgatggcaattggcgggattttcagtttttgcagtcctcccacacatgacgtgcaggttgattcgaggctctacgaaattgagcgggatcggctaaacgtggcttaaatgaaaatcttataatagcaccactcataactttgcaaacagtttgagttcatgattgtaattggcatcatcgcgagtaacttgtctaagtacttaagcattgaaaaatgattgcttaactggttttatttgttgcatatattcaacaatcaatatcaacaacaaatgatacattcactttagatctcaaatttaatataacataattatccaaacattccaaatagaatgaataatttgtttacatctaaatcagatagaattgctagtttgcttttcttattaaaagcatattcaagcatattgtgtttcatagaaaactgtgtatgaataattctcacctcttgtattgctgctaagcattgttttccctatatgtgtattgtaatccacttggcaaataatccaggtttactggtggctccttcactttgtcacttgcacatttctatctttcggtttgggccgtacttaagcggcaattatgttgtcacttcccgtgggaattttctttgactcactactcactgtaatacaattattcaaattctcgttatgacgaacgtgcggtatcgtattgtagctcttaatccctcggccgctgacgatttttagtaccgcgtaccgctcgtggttgctgctcgctccgcgtttcacagcaaactgagactcggaccgaccggctgagtgcggcggtgagtaatgaaattttcgtgcgccgctgtgagatacagatacaaccgatacagataccgagcgaaccaaaccgagcggcgatgcgatgacgacgcagcacagctgatgtttgttgatgccgggacgccggccaaaagttgtttatctttgggattcgaactggtaccgggactcggactggaattcgtatcagcagccgagaaactctctcgctcgtcgctcggtccgctgccaactgaaataagatattgtgccggagcggggacgagacgagacctcttagccgagactctctgctgcggtcgacttccttcgctcgcctcggaattattcgaaacaaaaactgataaagcactgataaggagcgcagcgcggcgagctctgcgcttagataacatcgcagaaacagaaacagaaccaaaaccaaccaaccaaccaaccagccaaccagcagcgaacggatacacaaacactgaagcactgaacacccaacaccgagcgcagcagatacagatacaaagatactttccgagagggtgtgcttgtgtgggtctgtgcgcgagggagatgcttttcagcgatatcgcgtctacggctaatggaattctgattattgcttagtgataagcgttttgtgtttaattgtatctctgtatctgtatctgaatgcaccgagcgaaatggggtgcgtaagtaagtgtactataaataaataaatattcctttgtaaatacgaacaaaattgatcaaattaagttacacttaaattcgatcagaccgatcaacacttttacttgagttgtacattgtaaaattgatgagtttctttttttttttttgtggtacagtgagatctcgcacaggtctccccatcggttatcattcacctcctccagccaccagacgcatccacatggcca

SEQ ID NO: 4961 - DNA, 2849 bp, DROSOPHILA
actaaaaatcgtcagcggccgagggattaagagctacaatacgataccgcacgttcgtcataacgagaatttgaataattgtattacagtgagtagtgagtcaaagaaaattcccacgggaagtgacaacataattgccgcttaagtacggcccaaaccgaaagatagaaatgtgcaagtgacaaagtgaaggagccaccagtaaacctggattatttgccaagtggattacaatacacatatagggaaaacaatgcttagcagcaatacaagagatgaccgtcgacagcagagattccaaagatctgagtgctcaggatataggcgagcagaagcagcagcaaatggaggaccagttggaggatcagttgaacgattccagagacccccaaaacaacaataacaatatcgatgacgacgctgatgaagatgctgagttcgaggagccagaaaaggccaatccccaacaggatcaggatttgggagagacagagatggaacaggaacacgatcttcagcaggaggatcttcagcaggaactgcctgcaaacagcccaagcactccgcccaggagtcccagctctccccagctgattcccaagctggaacagcccgctacgccgccctcggagccagaagcctctccgtgcccctcaccctcaccatgtcccacgcccaagtaccccaaagtgcgtctgaatgcgctcctggcctcagatcctgcccttaagccagatgccaaggagctgaccctgccggactctcgtctcctggctcctccgccgctcgtcaagccggacacgcaagcgcaaccggaggtagcagaacctctgctaaaaccagccagatttatgtgcctgccctgtgggattgcattcagttcgccctcaactctggaggcccatcaagcctactattgctctcatagaattaaggacacggacgaggctggcagtgataagtcaggggcaggaggatcgggagccacagctggcgatgcagcagggttgaccggaggctccaccgagccaccagccaaaatggccaggacaggaaagcaatatggctgcacccagtgctcctacagcgcggataagaaggtatccctaaatcgccacatgcgcatgcaccagacttcgccagcagctcccacactggccggcttgccaagtcttctccagaacggaatagcgccgccgggagttacgcccaatccgatggaggatagctctagtcaacaaaccgatcgctactgcagccactgtgatatccggttcaacaacatcaagacctatcgagcgcacaaacaacactactgcagttcgcggcgaccagagggacagctcacgcccaagccagacgcctctccgggagcaggttccggaccgggttccgcaggcggatccataggagtatcagcccaggcggctacgcccggcaagctgagtccgcaggcaaggaacaagactccgactcccgcaatggtcgccgtcgcagctgcagcagcggctgccgctgcctccctccaggccacgccgcattcgcatccacctttcctggcactgcccacccacccgatcataattgtgccctgctcgctgatccgtgcagctagctttattccaggcccactgcccacgccgaactcgggaatcgtgaatcctgaaaccacctgttttaccgtggacaacggaacgattaaaccactggccactgccctagttggcgccaccttagaacccgaacgcccttcagctccatcatctgctgctgaggccacagaagccaagagtagtcctccggagcccaagcgaaaagaggcagggttaactagtttccacattaaatcggagcctctggatccaccaccgactgtgaatctggtgcacgagaacaacaactccccgatcgccacgccacatattaaggctgagccaatcgaagtcggagcggatgctgcgcccggcgggctggttccgccgatgacttctccgctgggaaacagcagcagcgtggctgccgcagcagctgccgccgccgaggtgatgaagaagtactgctcaacctgtgacatatccttcaattacgtgaagacctacctggctcacaagcagttctactgcaaaaacaagcccattcgccccgaggccagcgacagccccagtccgaatcacctgggcggaggcgttgccgtgggcctgggcattggcggcctggtcggcggacacggccagcagaagaacaaggaaaacctgcaggaggcggccatttgagaaagccagctgcggtgggaggcgcagcgcaagcagcttgagtggtattacacgtgcttctaagcagcagcccaacccaatcgaaactaatcgaatcctagcctcctttaaaaatgtacactatccaaaccgcaaccaaccatcgacgacagtattcccggaaaatctcccgtcgctgccctccacttccaactccatttggggactgactccttcgacttaccgatcgatagaagtagatatatacatcgtactcccgtacatatacagtacacctaaaggaataacacatagatacttaggtacattaatttaggcgcatacccattaagtgggaaccatgacatataatgcatgccaaagcttaccacttagacagaaattaaattgagggcgagaaactacaagtttgcaatggtctgcggagtagaaggaggcgaagtattccaatgtagatccaatactataatgtaaattactcgctgttccccataaagcgagcaattctaactgtgtaatttaaatgagtacattatttattaagtgtgtgcgacaataaaagtaattaatttattc

SEQ ID NO: 4962 - protein, 665 aa, DROSOPHILA
MTVDSRDSKDLSAQDIGEQKQQQMEDQLEDQLNDSRDPQNNNNNIDDDADEDAEFEEPEKANPQQDQDLGETEMEQEHDLQQEDLQQELPANSPSTPPRSPSSPQLIPKLEQPATPPSEPEASPCPSPSPCPTPKYPKVRLNALLASDPALKPDAKELTLPDSRLLAPPPLVKPDTQAQPEVAEPLLKPARFMCLPCGIAFSSPSTLEAHQAYYCSHRIKDTDEAGSDKSGAGGSGATAGDAAGLTGGSTEPPAKMARTGKQYGCTQCSYSADKKVSLNRHMRMHQTSPAAPTLAGLPSLLQNGIAPPGVTPNPMEDSSSQQTDRYCSHCDIRFNNIKTYRAHKQHYCSSRRPEGQLTPKPDASPGAGSGPGSAGGSIGVSAQAATPGKLSPQARNKTPTPAMVAVAAAAAAAAASLQATPHSHPPFLALPTHPIIIVPCSLIRAASFIPGPLPTPNSGIVNPETTCFTVDNGTIKPLATALVGATLEPERPSAPSSAAEATEAKSSPPEPKRKEAGLTSFHIKSEPLDPPPTVNLVHENNNSPIATPHIKAEPIEVGADAAPGGLVPPMTSPLGNSSSVAAAAAAAAEVMKKYCSTCDISFNYVKTYLAHKQFYCKNKPIRPEASDSPSPNHLGGGVAVGLGIGGLVGGHGQQKNKENLQEAAI

SEQ ID NO: 4963 - DNA, 6435 bp, DROSOPHILA
aaactagatgtgagtcaggagctttaaacaggaatttaatctctaatatatgctccaccctactagatgttcgaggacgtgaacacgtcgccttcattggagggcgacatgtcgattccgggcaaaagaaccacaactgcaacgtccgcgagcggagtgccggaatacaatactctggatgagcccatccgcgagacagtgctgagggacattcgggccgtaggcattaagttctaccacgtcctgtaccccaaggagaagtccagtctgctacgagattgtacgtcatcaaatggtttcgttatgcattcgtatgcagttttcttattgtgtttacccgtctttcaggggacctttggggtccactggtgctgtgcaccttcatggccaccatactacaaggctcctccaccgccgacagcatgtctgacaacggacccgagttcgcccaggtcttcgtaatcgtctggataggtgcagccgtagtcacactcaactccaagctgctgggcggcaatatgtgagcatctttgtattattggtatccaattgtttgatcctaacgtactcaatccccatcagctcattcttccaatccgtctgcgtgctgggctactgccttacgccggtggccatttccctaattgtgtgccgggtaatcctgcttgccacccaaacgcggctgctcttctttctgcgttttgtgaccaccaccataggctttgcctgggccacttacggtacgaatatcaattgcatttaatagaacaaacactaattggcgttcctttagcttcctttgttttcctgggtcagagccagcctccccatcgaaaaccgcttgccgtgtaccccatctttctgttcttcttcatcatctcgtggttggttctttcccacaattagtccaatctatgacgcctcgtttagtgattagttcgtaaagaaaacagtgcacgttccatagcgtaaccaaaaaaaaaccgaaaacaattgtacatttctttaagctacaaatccgttttctttattcttaaaatcttaaaagttatctgagttacgaggcatgcatagataatgcatggatatctgggctcacacctccagattgttcgctgaagcggccacctccagggacatctgcatctggacaccgtcgcccttggtgggcctgtaggtcagcgaattggcgcgcgccttgcgtcccatgaagtgtcgttccacccatttcagcagggtgtacacggagtctgtggagggcagtcgatgatccgcagcggtcttcacaatatccgacgatgtcacacggaaagttcgcgccatacccttcagagcctgtgcggataaataataggaataagtaaatcccaggcagctgaaaagaatcctttaaagataacataccaccatggcgtcctcgtctgttagatcgtcacccacatagataatcttgatgcgttcgttccagtccacgccgaaggatgtgcgcaggatgtagatcgaggcacgacccttattccactgcaccggcggacgagcttccagagcgcaatgcgcctccgtggccttgaagccgtacttctcgatcaaggagcgcgccttgtcaaccatagctcccctcagatgattgggcgtctctcggtagtggaacgttagcaacgcccccttattctccacccaagcgccgtcgcggcaaacggaatcctgcagagccttcagcaggtcactgaccttcttttcgtactccatgggcatggggtgtacgaacttgctgccgtccggatgaaggatctctagaccgtgattgcccgcataggttatgccctcgatgccaaccatcttcttgacattgtccacgttgcgacccgagatgacggccacgtagacgtccgagtgattggacagcttatatagtacattcttaatttcgggcgagagcgtggccagatcaggatgaggagcaatgggcgccaaggttccgtcgtagtccagcagcagagccaacttgtggttatagccgatgtatctgtgggatggataaccagaatatttaaggggtttcctataattgtaatgcaattgtctactcacttcagtaagtagtcatcgaaatcgtccacggacactggctgcataatggtggtgcccacatcatccatctccagagcgcccaccgcctttaggaaacaacgcatccagtggctcacatcgcactcggcttcacgacggcgcagccgagccatacgtaggacgcgctcatcctcgggcatggtcagtgctcggtggatcacctcggcggcctcgttcacctcgtacggattgcagagcagcgcctcgtgcatcatctcgccggctcctgcgaacggtgagatgaccagcacgccgggcacctcgttgatctggcaggccacgaactccttggccaccaggttcatgccatcgcgaagtggagttaccaggcaaacagccgcatccctgtacaaagcagccaactcgtcttggctgacatagtcgtagatgtagcgtatgggcgcccagttggctgtggtaaagcgtccgttgatgcggcccaccagctggtccacctcctccttcagctcccggtactcttttacatcggttcgcgacggcaccgagatctgcagcaggctcaccttctccttgtgctgcggatacttcagcagcagcgcctcaaaagccataaggcgatggacgaggcccttggtgtagtccagtcggtccactcccaggatgatttgcatcttggatgtctttagcaccttgggcgcggtcgtggccaaattaacgaagcgttcgtagggaataccaatgggaagcgggcggacgcgaacggtgcgcccgccatgttccaccagcagattgtttctgtccacacggcagccgagattgcgctggcagcagtccacaaagttaaggcaatagtcctgaatatggaagcctaccaggtcacaacccaacataccctaaaaataagtgaatatggtgttaatggtggtaccttgtccttgctgctcaatattctatttgatgagcaaaatgtgaatgttatgctcacctgtaggatctcatcggaccagggcagcaggcggaagatgtcccatggcgggaatgggatgtgcaggaagaaagccagtcggcagggcaggttcttctcctcggcgtgctcgcgcacccaattggcggccagcatgagatggtagtcgtggatccagacaatcggtggactcttctcgctgccctggtttttggccaggcacttctccagagcctcgatggtccgcacggcgaagtgcttgttgacagtgacatagtcgtgccagtgctcgcctccgaagttggctcttcccggcatcgagtggaacagtggccagaagatcttgttgcagcatccgttgtagtagctatcgaagatcttcgaatcgatgttgacggacaccacctgctcggacttgaggccagcagtcggagtctgatcgttgggattggactcgggaatggcctcgttaggatccttcaagtggatacccgaccagcccacccagagaccactgcccttgatcaccaccgggcacactgcagtcaccaggccaccggcactgaaggcaaaaaaatatattattaatatacagtgctttcctataaaactccttagtttagccagatatgagatttcatgacctatagtgtagtggttgtataaagaaaaaccatgtgatgtaacgacttaatctcatacttcaacctacatataaaagacgtaatgaggtgccccaaagctactggactggacggagcggaacccaccaatgtgttggtgtggacccagcccattttgtgcagagtgcatgacacccggggcctgataagcagatgcccattaagcaagcgattgtaaacaagagctggacccggcttcggtccatccgcatgccgtgccatcaatcccggagacaagctggaagagcggaggcccaaaatgaatcgcattcctggcataggtcggggagctagagctccagcgcgatgcgatcggattcacgtgactctagatttcagtgtcaggttcaggttccactgggcgacaacagcctcgttataacgcctctagtattgacccttctaccagacactcgaaagggtcaaaaacgcgtaacgagcctcgctgataacgctcgccattattattgaatttgttttctaactcgcagtccagacatcgcttggttcagcgcgcatctactagattcgcctccctcccgctctgtatgttttgcagtgataagattgagatgctagcgtggatcaagatgaactggcatatacataggtatgtcacatagttgaatcgagcctcacgagctggggaatttgggattggggggcctttggtcggtcgggcggggcttatctttaatgcaaattgtgggctcgaggatcgaactgggttacttggagtttttcgggaatgcggggaacgtggaaattcgccctggtcaagctttggcttcccgattccggagaattgataagcgatgagcttacgactcgatcgatttatttgaacacggctattcgaaactttcctttgtttgaaatgttcttaaattactattagcttagacttattagattaaaaaatgcggccacctattcttaatattttgttaaacccagacattttcgcttaagtgaaaatgtttctccaaaaactaggtttcgaaaaacgtatatagtttaaaattgagatcacttttggtttttataacctgatttatacatcgattttgttttcttttcacttgtttttaatttcctttaaaacgttgtcgtttgaaaagtttaatttagaacacgtatttgttaaactggattatataagtcttttttttttaatgtacccacctggccctgcgttccaactcatcggtcttcggatctcggataagcacaaacggcaaccgattggataccacgatgagactcgccttggtggagggctccccggcattggtaacgatgatttccgtgtcgggcatcgtgatccttggtaagctagctgtagaagagttaaacgaatcttctcctgcggtcaagtctagcacataatttttgacaacagcgtatgggaaaattcgcggatgtggaggttagacaaccgtctagttcaaatccaggcttatcaatgaacgagtccgttcttccgaagcgagagcgaccgttgccgaatttggttcgagatgcgctgatcgatgactgaagactgctcgaagccaagtcaatcactgccttcttatcaaagctactctcagatgcaattctacgtggaaatggcaggcaattttcctggctgattggcggtgagtcgattacgttagtttcgatggtcgcgagagccagcagctccgtaccctgccgaaaatagacaagcactaagccaactaggcgatcaagtcgcacttttctgctaaaaattaatgccagccagccaaccccctccacccattccatcatgggttccacagtccactctccggcttatcagaaaatcgtccggcatctgctcctctcgcgctgattacatttttcccagcggatgtgagagaatcgaaacctgcgcaggagaatacctaccgcttctgtcctggcctagtggccaagtgttcacccaattgatccttgaaggggttagatgtcatggggatgtgatctgaactatcggtgccgcagtttacacaccgcagatagttttctagaattaactggccgtgcctggtattatcagctcgggaacatttcacggcaacgacggccacaacctcatcatcctccgcctcctccccctaaccaccacccatcccattccatctcatcgatgttgtctctcgatgcgataagtcaacaaatcgatgctgttgtttacgcttcgggctcagccttataaagaacatccgaattgtacacagaagatttgtatttctattttcgtttctctatcgaagttgtctgcagattgcagttgaaatctgttcagtttgggattccagctagtgcagatctaaccttgtaatgaccgccatttctggagttcattaccgggcgtatagttttatttgcccggaaagatacaagaccgataaggctatctagtgcattttagtctcggattttacggcgaagtggtgcaagggattacgcccgggcagcttatatattatagaacggaaaacttggctgaacttgaacgcttgatcatgtttggcattcatgcgcttatcacgatgcccggctggcgttttacgtgattcttgatagttgtcgtcgccttagccggaatctgcaataacacattcgcaccgggagaacaaattagtcagctccatcggttgtagcggtgcagcaatgcgatgcgatccg

SEQ ID NO: 4964 - DNA, 2903 bp, DROSOPHILA
ggcagggtacggagctgctggctctcgcgaccatcgaaactaacgtaatcgactcaccgccaatcagccaggaaaattgcctgccatttccacgtagaattgcatctgagagtagctttgataagaaggcagtgattgacttggcttcgagcagtcttcagtcatcgatcagcgcatctcgaaccaaattcggcaacggtcgctctcgcttcggaagaacggactcgttcattgataagcctggatttgaactagacggttgtctaacctccacatccgcgaattttcccatacgctgttgtcaaaaattatgtgctagacttgaccgcaggagaagattcgtttaactcttctacagctagcttaccaaggatcacgatgcccgacacggaaatcatcgttaccaatgccggggagccctccaccaaggcgagtctcatcgtggtatccaatcggttgccgtttgtgcttatccgagatccgaagaccgatgagttggaacgcagggccagtgccggtggcctggtgactgcagtgtgcccggtggtgatcaagggcagtggtctctgggtgggctggtcgggtatccacttgaaggatcctaacgaggccattcccgagtccaatcccaacgatcagactccgactgctggcctcaagtccgagcaggtggtgtccgtcaacatcgattcgaagatcttcgatagctactacaacggatgctgcaacaagatcttctggccactgttccactcgatgccgggaagagccaacttcggaggcgagcactggcacgactatgtcactgtcaacaagcacttcgccgtgcggaccatcgaggctctggagaagtgcctggccaaaaaccagggcagcgagaagagtccaccgattgtctggatccacgactaccatctcatgctggccgccaattgggtgcgcgagcacgccgaggagaagaacctgccctgccgactggctttcttcctgcacatcccattcccgccatgggacatcttccgcctgctgccctggtccgatgagatcctacagggtatgttgggttgtgacctggtaggcttccatattcaggactattgccttaactttgtggactgctgccagcgcaatctcggctgccgtgtggacagaaacaatctgctggtggaacatggcgggcgcaccgttcgcgtccgcccgcttcccattggtattccctacgaacgcttcgttaatttggccacgaccgcgcccaaggtgctaaagacatccaagatgcaaatcatcctgggagtggaccgactggactacaccaagggcctcgtccatcgccttatggcttttgaggcgctgctgctgaagtatccgcagcacaaggagaaggtgagcctgctgcagatctcggtgccgtcgcgaaccgatgtaaaagagtaccgggagctgaaggaggaggtggaccagctggtgggccgcatcaacggacgctttaccacagccaactgggcgcccatacgctacatctacgactatgtcagccaagacgagttggctgctttgtacagggatgcggctgtttgcctggtaactccacttcgcgatggcatgaacctggtggccaaggagttcgtggcctgccagatcaacgaggtgcccggcgtgctggtcatctcaccgttcgcaggagccggcgagatgatgcacgaggcgctgctctgcaatccgtacgaggtgaacgaggccgccgaggtgatccaccgagcactgaccatgcccgaggatgagcgcgtcctacgtatggctcggctgcgccgtcgtgaagccgagtgcgatgtgagccactggatgcgttgtttcctaaaggcggtgggcgctctggagatggatgatgtgggcaccaccattatgcagccagtgtccgtggacgatttcgatgactacttactgaaatacatcggctataaccacaagttggctctgctgctggactacgacggaaccttggcgcccattgctcctcatcctgatctggccacgctctcgcccgaaattaagaatgtactatataagctgtccaatcactcggacgtctacgtggccgtcatctcgggtcgcaacgtggacaatgtcaagaagatggttggcatcgagggcataacctatgcgggcaatcacggtctagagatccttcatccggacggcagcaagttcgtacaccccatgcccatggagtacgaaaagaaggtcagtgacctgctgaaggctctgcaggattccgtttgccgcgacggcgcttgggtggagaataagggggcgttgctaacgttccactaccgagagacgcccaatcatctgaggggagctatggttgacaaggcgcgctccttgatcgagaagtacggcttcaaggccacggaggcgcattgcgctctggaagctcgtccgccggtgcagtggaataagggtcgtgcctcgatctacatcctgcgcacatccttcggcgtggactggaacgaacgcatcaagattatctatgtgggtgacgatctaacagacgaggacgccatggtggctctgaagggtatggcgcgaactttccgtgtgacatcgtcggatattgtgaagaccgctgcggatcatcgactgccctccacagactccgtgtacaccctgctgaaatgggtggaacgacacttcatgggacgcaaggcgcgcgccaattcgctgacctacaggcccaccaagggcgacggtgtccagatgcagatgtccctggaggtggccgcttcagcgaacaatctggaggtgtgagcccagatatccatgcattatctatgcatgcctcgtaactcagataacttttaagattttaagaataaagaaaacggatttgtagcttaaagaaa

SEQ ID NO: 4965 - protein, 809 aa, DROSOPHILA
MPDTEIIVTNAGEPSTKASLIVVSNRLPFVLIRDPKTDELERRASAGGLVTAVCPVVIKGSGLWVGWSGIHLKDPNEAIPESNPNDQTPTAGLKSEQVVSVNIDSKIFDSYYNGCCNKIFWPLFHSMPGRANFGGEHWHDYVTVNKHFAVRTIEALEKCLAKNQGSEKSPPIVWIHDYHLMLAANWVREHAEEKNLPCRLAFFLHIPFPPWDIFRLLPWSDEILQGMLGCDLVGFHIQDYCLNFVDCCQRNLGCRVDRNNLLVEHGGRTVRVRPLPIGIPYERFVNLATTAPKVLKTSKMQIILGVDRLDYTKGLVHRLMAFEALLLKYPQHKEKVSLLQISVPSRTDVKEYRELKEEVDQLVGRINGRFTTANWAPIRYIYDYVSQDELAALYRDAAVCLVTPLRDGMNLVAKEFVACQINEVPGVLVISPFAGAGEMMHEALLCNPYEVNEAAEVIHRALTMPEDERVLRMARLRRREAECDVSHWMRCFLKAVGALEMDDVGTTIMQPVSVDDFDDYLLKYIGYNHKLALLLDYDGTLAPIAPHPDLATLSPEIKNVLYKLSNHSDVYVAVISGRNVDNVKKMVGIEGITYAGNHGLEILHPDGSKFVHPMPMEYEKKVSDLLKALQDSVCRDGAWVENKGALLTFHYRETPNHLRGAMVDKARSLIEKYGFKATEAHCALEARPPVQWNKGRASIYILRTSFGVDWNERIKIIYVGDDLTDEDAMVALKGMARTFRVTSSDIVKTAADHRLPSTDSVYTLLKWVERHFMGRKARANSLTYRPTKGDGVQMQMSLEVAASANNLEV

SEQ ID NO: 4966 - DNA, 3982 bp, DROSOPHILA
aaaggcatttgaacatctcaaaaaccggcagcttaaagcttactcgatccagaatacatatatgtacatatgtatatagcttgggacaataattaaagatattacggccaatttacagtttaagcttggcctcaagcaaaaacttgctaagaaagcctggagtaagtgaactctaaacaagttttataaaacttgcagtaacagaaatctctctacaggttgctgctcttaacagaactgtagccccaaactggttgcgtgtagataaatgtacataaacatacccgatcgaaacaccatgatggtacacataatactcaaaccaacaaccttacatatctatcccaactgaagggttatcaccaaaacaatcattttgtagatattaagatgaagtttttacggaacaaatataataatatcacaaaatgtatcataaattgtttataaatatagagtaatgggtagagagagtgtcggtgagagcgccaaaggcaaccgcattcgtgaaggtttcgggaaatggtgaattgtggtaatgcagggaaaaacgtatgcttaaagtttaggctttgaacacaaataaatctcaataaatattaataaactatattttgaagtaaaaacaaatgtatttctaatgtttagaaatcaccagttaaatacattttttctctgataatttttttgtataatttaaaaaaaaaattaattagcaaattttagattagaaattatattttaaaataatgttctcaaaattgcgaatgttaaccttaaaaatacatttaaaaaaaaaaacttttccgaaaatgtataccccaccgagttaccatccaatttggtcttttaaaacgaactctctcttttcaaacaatctatcacaatcaacagtttggggaacagaccggactgtaacagtagtttctaacagcgggtgtaaaaccattgagaccgctacctctgttacttgctttcgcagtaacagtgtgatttgatcttttgatgtagcaactacattgcgtcgcgtcggaatgtttttggcctcagaggcgagtgcctggcttcaacaaaataaaccgcattcgattttgttaaaataaatgtgcaaaagaaaccagcttctctatgtgaaaagaacaaatgcaccagctttgtaaaaatgttacaagaaaataattagtaacaagccaggcgccaaaacactttttattgtatcacaaactatttgaccaaaatatgtctgctcccaagatgcaaatacaccccacaaagatggaagaagattcagatacccgtaacagtacctatgtacccaaaatggaacttcttatgacccattatatacacgaaggcaagaaagctattatgtacaggtcgagcgagccacagatcgctgcgcgtcgtaataaaaagactcgttttgtaggaaaccgccgacaactaagaaatctttctcaacccgagaatagccataaaaccagtcgaagtctctgcccagataccgctaagactgaaccaaaagtttattctttgcgatttgtcttgaacaaaagtgaagacaaggactatatgtcaaggctcaaggcgcagaacgatttctcacaatcctcttgcctttgcaacaatctaagccatgccaacacagaggctggtgcttatcaaaatgatggtatcttaaaaggccagcgtgaccattcggattttttgactgcggctggcggaattcaatcgcgagcagatcgcatcgcacgcattgagacctgcggaattagaaccacccatctacaaccagagacccaaattcttaagccggtaacggaacctaacgaaactcgcttcgatcaacattctccagactggctatttaaaaactcaagaattggagacgtcagtaacagcagtaaattaagcgcttgtaactccgagttgcctcccgaagaatataaggggagaactctataccatgacacaaagtttgattgtgcgtatataaaaaatcgtcgaccgctgataaccactgagagcaagatgtccattacagaagcagaacatccccagaccaaatataccgatataaagtacgactacaaaacttgttcgatttcccaaggcttacatcagaacaaagcatttcttaataaagttcctcctagcaagcaaagcaaacctttccacagcgtagattatgattattacgaaaatattcaaaaactgcatctgagcaaggaatctgaaagacaaataagggacaatggggacccaaacgatttgcagaactttttaaaaaagaatttaattaaggctacaaccaatgaattgcttaaagctgccgcgcaaagcacaaaaaagtgtaacattgacttagagcgcaagttaaatgatctgaatataaaagaagaggatcacacttccaatgacagcggaaactcatacaagaacgatccctatctagtatctatgagcaaaattaattcttgtaaatttatcagatcatataatagagattgtgaaactatttttcccactggtgaccacagtgacctaaatgaatttagaaagtcttttatgccacaatccgttgatttattatcaagcgcttctgtttcgttgtctagttgcgatgggtcttgcctaaacaaagattctatttgcggttcagaagaagattgctgcgaatgtaatgaataccaatgtatcgcaactccgccaaacgaactttccaaggattgcctaaatgcagttgaagaaggtgttttttgtaacacggagtatgatgactttcatgaaaacttaacatcaagctgttgctgcagcgggtctttttgtgatgacgatggttgttcatacttggatgaaggtttaagcgttgacataaaatccaaaaacgtacaaagcctgcacgagagcggaacagatgaaaaactttcacggaaaaccattcttctggcaagggttagtattatagaactgaagagatgatggtgcccttttgcaaaataaagcgagaaattctgtaacaacgaaccaaaacaaacttaatatattttattatatctactcgatatttgaactttacgaacaatttcgcataatgggagtgtagatacaatttggtttgaatataaagaaaacaccgaatttagaattaaaaaaaaatctgcttagataaaattggcaattgcttcacacaagtttctgtttaagaatttgatggtatataatattaaaaaagaaatagaaattggtgtcattaaaggtgaaactttgattatgctttcgtttgctgttcgtttgcgttttaagtgcagtctctgaatatacaacaacaattgtgatgtatatgtatatcgtttgtaatacaatttttgtcagcgatgcaattcagagtgaagttcgctagggcatgtgttagtcattaagcatcagtgaaattaaaaaatggcaaaaagaaagctttggcaagccgaagcttatatactttttcatatatttacgtataaatattaacatatataattagtataatacaatgtatgaccgcaaacaacgaagctgagatttattttctattataagctagacattttccaattatttctatggcagatattgacagattgtcgtccgatgtttatcaaattaaaaccaaaatgaaatataatgacaaaaaaatgttctatcttacctatggcagatattcgatatagacgtcagatttcaatcaaattgatatcgaaattatattatatcaaaatctggatattttttgttgctttcatttgatttcattttgtaaacaaaaaacgaccgccataaacagtcggaaaataaataggaaatgattaattttgattttagtttgattaaaatctaacgactacctgccattggaaagttttcaacataattgaaaatattaaaaagaaattattgtttctatatttatacccgttactcgtagattaagtggttatactag

SEQ ID NO: 4967 - DNA, 1982 bp, DROSOPHILA
ttttgatgtagcaactacattgcgtcgcgtcggaatgtttttggcctcagaggcgagtgcctggcttcaacaaaataaaccgcattcgattttgttaaaataaatgtgcaaaagaaaccagcttctctatgtgaaaagaacaaatgcaccagctttgtaaaaatgttacaagaaaataattagtaacaagccaggcgccaaaacactttttattgtatcacaaactatttgaccaaaatatgtctgctcccaagatgcaaatacaccccacaaagatggaagaagattcagatacccgtaacagtacctatgtacccaaaatggaacttcttatgacccattatatacacgaaggcaagaaagctattatgtacaggtcgagcgagccacagatcgctgcgcgtcgtaataaaaagactcgttttgtaggaaaccgccgacaactaagaaatctttctcaacccgagaatagccataaaaccagtcgaagtctctgcccagataccgctaagactgaaccaaaagtttattctttgcgatttgtcttgaacaaaagtgaagacaaggactatatgtcaaggctcaaggcgcagaacgatttctcacaatcctcttgcctttgcaacaatctaagccatgccaacacagaggctggtgcttatcaaaatgatggtatcttaaaaggccagcgtgaccattcggattttttgactgcggctggcggaattcaatcgcgagcagatcgcatcgcacgcattgagacctgcggaattagaaccacccatctacaaccagagacccaaattcttaagccggtaacggaacctaacgaaactcgcttcgatcaacattctccagactggctatttaaaaactcaagaattggagacgtcagtaacagcagtaaattaagcgcttgtaactccgagttgcctcccgaagaatataaggggagaactctataccatgacacaaagtttgattgtgcgtatataaaaaatcgtcgaccgctgataaccactgagagcaagatgtccattacagaagcagaacatccccagaccaaatataccgatataaagtacgactacaaaacttgttcgatttcccaaggcttacatcagaacaaagcatttcttaataaagttcctcctagcaagcaaagcaaacctttccacagcgtagattatgattattacgaaaatattcaaaaactgcatctgagcaaggaatctgaaagacaaataagggacaatggggacccaaacgatttgcagaactttttaaaaaagaatttaattaaggctacaaccaatgaattgcttaaagctgccgcgcaaagcacaaaaaagtgtaacattgacttagagcgcaagttaaatgatctgaatataaaagaagaggatcacacttccaatgacagcggaaactcatacaagaacgatccctatctagtatctatgagcaaaattaattcttgtaaatttatcagatcatataatagagattgtgaaactatttttcccactggtgaccacagtgacctaaatgaatttagaaagtcttttatgccacaatccgttgatttattatcaagcgcttctgtttcgttgtctagttgcgatgggtcttgcctaaacaaagattctatttgcggttcagaagaagattgctgcgaatgtaatgaataccaatgtatcgcaactccgccaaacgaactttccaaggattgcctaaatgcagttgaagaaggtgttttttgtaacacggagtatgatgactttcatgaaaacttaacatcaagctgttgctgcagcgggtctttttgtgatgacgatggttgttcatacttggatgaaggtttaagcgttgacataaaatccaaaaacgtacaaagcctgcacgagagcggaacagatgaaaaactttcacggaaaaccattcttctggcaagggttagtattatagaactgaagagatga

SEQ ID NO: 4968 - protein, 575 aa, DROSOPHILA
MQIHPTKMEEDSDTRNSTYVPKMELLMTHYIHEGKKAIMYRSSEPQIAARRNKKTRFVGNRRQLRNLSQPENSHKTSRSLCPDTAKTEPKVYSLRFVLNKSEDKDYMSRLKAQNDFSQSSCLCNNLSHANTEAGAYQNDGILKGQRDHSDFLTAAGGIQSRADRIARIETCGIRTTHLQPETQILKPVTEPNETRFDQHSPDWLFKNSRIGDVSNSSKLSACNSELPPEEYKGRTLYHDTKFDCAYIKNRRPLITTESKMSITEAEHPQTKYTDIKYDYKTCSISQGLHQNKAFLNKVPPSKQSKPFHSVDYDYYENIQKLHLSKESERQIRDNGDPNDLQNFLKKNLIKATTNELLKAAAQSTKKCNIDLERKLNDLNIKEEDHTSNDSGNSYKNDPYLVSMSKINSCKFIRSYNRDCETIFPTGDHSDLNEFRKSFMPQSVDLLSSASVSLSSCDGSCLNKDSICGSEEDCCECNEYQCIATPPNELSKDCLNAVEEGVFCNTEYDDFHENLTSSCCCSGSFCDDDGCSYLDEGLSVDIKSKNVQSLHESGTDEKLSRKTILLARVSIIELKR

SEQ ID NO: 4969 - DNA, 4133 bp, DROSOPHILA
aagcacccaactaatccatccaaccaattacagtgctgagaaggagtggggtgatggcattcgtggaatggccctgaccgccgccaggtactcgctactccgtctggaggaaggcccaccgcatacgaaaaattggcgtccccaaattttggtgctttcgaagctcaacgacaacctcttgccaaaatacaggaagatattctcctttgccacccagctgaaagctggcaagggattgacgatttgtgtgtctgtgataaagggcgaccacactaagatcactaacaaagccgtggatgcgaaggccacgctgcgcaagtacatgaccgacgagaaggtgaagggcttctgtgatgtcctggtagcccagcagattggcgagggcctcagctcagtgtaagttggctaagtcattgaggagggatattagaggccactaataactgaattctcaacacagcatccaaaccatcggactggggggcatgaagcccaacacagtcatcatcggatggccgtacagctggcgacaggagggcaggaacagctggaagaccttcatccaaacggtccgcacggtggccgcctgccacatggccctcatggtgcccaagggcatcaacttctatccagaatcaaaccacaaagtagtatttaccgctccgaatgccaagttttctttgagtaacaaatccttctccctcttcagatcggtggtaacattgatatctggtggattgtccacgacggtggtctgctcatgttgctgcccttcctgctgaagcaacatcgcacctggcgcaattgcaagctaaggatcttcacagttgctcaaatcgaggacaactcgattcaaatgaagaaggatctaaagacattcctctaccatcttcgaatcgaggccgatgttgaagttgttgagatggtatgatatagctgccaggacctaaaccttaaacctattgaccattttatatttgcgaactgcagaacaacagcgatatttccgcttatacctacgagcggaccctgatgatggaacagcgtaatcagatgctgagagcattaggcttaaataagaaagaaaactccaaagtggtaagtggtccatatccgaagcgactctcacccacgtcatctgtacttctgcgaactgaagaacatccatcattcagctcattcttgttttgtttatacggccataatgcacattagcctttcatttacttaaatctttattagcatagttattgtatgcgttcgatttgaaggttgcgtattttgatttcagtaattgttaagaggaaaccatttgccctttgtttctcatgaactctaatttccataccatacctctatctgagatccaaattaaagctttacactttatatatttgaaaatcaaaaggttcagactataatggactataaggaaacacccagtgataataaaatgtctttggtaaagagtataaacagattgcctacatatatcgatatatcaagatacaaactattcattgcccgaactttgtatgaaacctggttgtgtgtatctcatcagtgcatttctcggcgggagcaactgctcctttcatctccatacctatcataatccttatatgttgtgtcaatgtgatgttgctaatgctcacccttctatcaataataactctatcaaattattctcaacaccgagtacttctgagtaatgtctttttctacaataatctaaaaaatagtcttatatggttcttcattccccaggaatgattaactttaatattcctttaattgattgagtttttcaaatttaataaaagtttaaatatcgaataacaagtgtacttaagaattgtcggtaatctttacaatcaaattctttattttaatttaaagcattgggactttggatcccatctataagttcaactaccaatagggaaataaagttgaaatagagtttcctgctttgcggtttgcatcccgagaatagttactccctcctctgatattggcctcccacttttccgcaaccttttctcatactcctcatggtgacattttcaggttcaaacaattgtagaccaccattatgacgccaccaaaacggcgtctaaagttcgcttcgccgatccaactatagaagaaacacagcatcacgtatgtactgccttaagatttttatttaccattgtctcttatctctcgaaatacacatatgacataagtaaagttaagtgagatcgacgactcatcaaatgtaagcctgaaacattttagttttgaagcataatcaacagtagcaatcgaaatccattcccgagttatcttgagttttgttctaactgatattttggcttcttaacatggttgatttgaaatgaacttttgagtttttaatgtcgacggcacttgtcatccaaaactcaaggctaatgccacgctaaagatctgataatgtgactaattgtaattctgcaggattctcaaaacgacgagaaacgtaactcaattgatttggatggtcccgagaacgcggacacacccgaaactacttctaacaaggatgaatcgacagagaaagccgacggagacttcaagtccagtgtgaaaccgtatggaacagctctcttatggcccactttacggtgtcctaattgtccttatatttctttccacagggatgagttcaacgttcgtcgcatgcacacagcaataaaactaaacgaggttattgtagaaaagtcacaggacgcccagttggtcataatgaatctacctggaccacctagggaagtgagagcggagcgtgaaagaaattgtaagatctgaaaggggaatgtatctgaggcacaaactaacccgtttatatccaatccgtagatatggaatttctggaggtattaacagagggccttgaaaaagtgttaatggttcgcggaggaggccgagaagttataacaatttactcttaagagcattaatcgctcagttttataagagttcgcaacactagacaagtttaagaatcaatcaaatttttaaagaaggttattaatttgttatattcaatcatatgtccaaatattttatttttacgtaaataaaatatcaaaaaattgtaacaataagaaccgaaggcgtttatcatttggtctacatctacacacataccctggccgcgtcgcttggaaacggagtaaacagcgtttgcaagatactttacctgtctttctacaatcgcgacgtaaaatcagatgcatctggcagattgaccaacactgctactcgatggtttctccccacttttgttatttcaaccgtggcgagttgtacgttctattacctcggatggcttagaaactgtgtggtcgaaacagaaacgatccaagctccagaaaatactcgaaataagtgtgaaaaactgtatagatcctcggaaaatacaccattcatgaatccggaatcgagggacctggatttgagaaaggtgcgagtgctggcctgccatcgaaggtggctctgtttattttgaacacgcaagcaactttcggtatccagctaacaaaagaatctaaacatatgcatctgggttgatccgagtgacatgtaccccattcattgattgaccattttctctgccacagggcgatgtcgagaggccgcacttcgaggcggttaccacactgtccgactcgcaggcgatccggagcgtcgactttcatccgaatggaaagttgtacgcggtgggctccaactccaagaccttccgcatctgccagtaccccgcgctgtccaagctgaggtaattaaatcgcagtgtgtcgcaactcgtctttgccttcaactcgtttcccatcccaatcccatgcagacatggacaccaggcagcggtgtatcccccgtccgttctctgcaagcgcacgaaacaccatcggggctccatatactgcacctgctggtcacgggatggggagctaattgccaccggatcgaacgacaagaccatcaagtacatgcgcttcaacaacgacaccaaccagctggtgggacacgagatggagctgaacatgcacgacggcacggtgcgggacatgtgcttcctggacgactcgtccaccaagtcccgg

SEQ ID NO: 4970 - DNA, 714 bp, DROSOPHILA
atatttccgcttatacctacgagcggaccctgatgatggaacagcgtaatcagatgctgagagcattaggcttaaataagaaagaaaactccaaagtgaggttcaaacaattgtagaccaccattatgacgccaccaaaacggcgtctaaagttcgcttcgccgatccaactatagaagaaacacagcatcacgattctcaaaacgacgagaaacgtaactcaattgatttggatggtcccgagaacgcggacacacccgaaactacttctaacaaggatgaatcgacagagaaagccgacggagacttcaagtccagtgtgaaaccggatgagttcaacgttcgtcgcatgcacacagcaataaaactaaacgaggttattgtagaaaagtcacaggacgcccagttggtcataatgaatctacctggaccacctagggaagtgagagcggagcgtgaaagaaattatatggaatttctggaggtattaacagagggccttgaaaaagtgttaatggttcgcggaggaggccgagaagttataacaatttactcttaagagcattaatcgctcagttttataagagttcgcaacactagacaagtttaagaatcaatcaaatttttaaagaaggttattaatttgttatattcaatcatatgtccaaatattttatttttacgtaaataaaatatcaaaaaattgtaacaata

SEQ ID NO: 4971 - protein, 69 aa, DROSOPHILA
MHTAIKLNEVIVEKSQDAQLVIMNLPGPPREVRAERERNYMEFLEVLTEGLEKVLMVRGGGREVITIYS

SEQ ID NO: 4972 - DNA, 2484 bp, DROSOPHILA
ctggagttggttggcaaagcaaactcatttaattgcaaggaacaaatataactgcatgtttaatctttaatggttacagtgtgagcccgcccaccttcccgttggttcttcaaattaatccagggtcaatgacctccaatactcactgtcgcagagacgtcgttatctggttcatgcggtaccgctgatgcttgatctcattgaagcagatttgttgatggctgtgcagctgttccagcagctcgatgtaccgcctgttgcagctctgtgatcggtgggaataaaaaaaaagggttggaaaggaataagcaagaccattgagaagaattttgaatacccttgccgagcatcgagcacattttttgccagctctcaaagttcaaagttcaatggtattatctctacttatcgtaataaacagccatataccaacaatgagttcaataatctttaaaaacaggcgatcggaatttcatacgttactgatatcatagctgtaaacttatttatgaacagctgtttgttaaagttttaattttgaaaatcttctgattggaaagaaaaaaaaagtgtatacaattatgcatacaaaatttggtgccatttataatggtgcttaacactttttgctgataatagtatcaaatttaatggaaattattgagttcttagtgaatttcatttggctctctttggcaagggtatttttaagaacaagcagctgtttttgtccaaggtgaaagcgacacagacacacgtgtgggtgtttgtgcgcgtgcctctttcatgtcttcgaattttggtattgatatctatatagtctgtgggcattacttctcgattctacagatgtatgtttgtatatataaatgaatatatatagagcttacctccagttcggcaaactccttattgagttcttcccactcgtttttcagcgaatcgatattcattctggtggttttttgcggctttgctcgccgtttatcctttatttggctgctattatttctccgtttgtttttgtttgcctaggtggttgttgttattattattattatttttattatttttatttgttgtatgcaacagctggcaaagagaagaagcagaagatgttgcgtttgaggttaggaaataaaccggtgaaaaatcaattaaatatttttctgcgatttcccaacaaacaaacacgcacgcactcacacacatgcacacacaccagagcacacccacacaatcacgttgccacgttggaaaagcaaagaagcaacaaaaaaaagaccgcaatttgcctttgcaattggaaaattaacaaacaaaactcaaaagtcaacacaacttatgccgcgttctcttgcctttcgcgtttattattttttaaaaataaatacgtactcgcgatgagcacgaaaacaaccggaccgctaccgtcgactaatattttgttattaactatttccgctgcacttttgttttaaatacttcggccaaacacacaaaatacaacacataaagcgcaaaacaacaaaaaacacactgcccacacgcacacaaagagagcgcgagagcgcgccaaccaagtagcgatagataagagagagagagagagaactagttccagtgaaatccaagcattttctaaattaaatgtattcttattattatagttgttatttttgatatatataaacaacactattatgcccaccatttttttgagatgcatctacacaaggaacaaacactggatgtcactttcagttcaaattgtaacgctaatcactccgaacaggtcacaaaaaattaccttaaaaagtcataatattaaattagaataaatatagctgtgagggaaatatatacaaatatattggagcaaataaattgtacatacaaatatttattactaatttctattgagacgaaatgaaccactcggaaccatttgagcgaaccgaatcgcgcggaactaacgacagtcgctccaaggtcgtcgaacaaaaggtgaatgtgttgcggagagcgggtgggagacagcgaaagagcaactacgaaacgtggtgtggtggaggtgaattatgaagagggcgcgcgatttgaaaagtttgtatataaaaaatatatcccggtgttttatgtagcgataaacgagtttttgatgtaaggtatgcaggtgtgtaagtcttttggttagaagacaaatccaaagtctacttgtggggatgttcgaaggggaaatacttgtattctataggtcatatcttgtttttattggcacaaatataattacattagctttttgagggggcaataaacagtaaacacgatggtaataatggtaaaaaaaaaaacaagcagttatttcggatatatgtcggctactccttgcgtcgggcccgaagtcttagagccagatatgcgagcacccggaagctcacgatgagaatggccagacccacgtagtccagcggcagatcggcg

SEQ ID NO: 4973 - DNA, 350 bp, DROSOPHILA
tatttaaaacaaaagtgcagcggaaatagttaataacaaaatattagtcgacggtagcggtccggttgttttcgtgctcatcgcgagcaaacaaaaacaaacggagaaataatagcagccaaataaaggataaacggcgagcaaagccgcaaaaaaccaccagaatgaatatcgattcgctgaaaaacgagtgggaagaactcaataaggagtttgccgaactggagagctgcaacaggcggtacatcgagctgctggaacagctgcacagccatcaacaaatctgcttcaatgagatcaagcatcagcggtaccgcatgaaccagataacgacgtctctgcgacagtga

SEQ ID NO: 4974 - protein, 61 aa, DROSOPHILA
MNIDSLKNEWEELNKEFAELESCNRRYIELLEQLHSHQQICFNEIKHQRYRMNQITTSLRQ

SEQ ID NO: 4975 - DNA, 10468 bp, DROSOPHILA
ttaaacgatacaaatatatttaaattatttaaatcggatgtgattttggttattttggttttttatttcgattgttattgctctctgttttggtaagtttgtttatttgctcgggcctttaggtattatttgactcataaataagaactattagtttttcgtaggcgttgttatcttttgttggcacacagatcgcatggcattcggaaaatattccacagtccccaaatgtgacgaattgtttggctgcttttctctttgcgatttttctgtttttctataatttgcttgtatagcgacggtcctagtatacatatttgggccatggatcatttgaaatgtcattagtatattctcaagcagacgacttcctgtacgaaagaacaatctagtcagtgtgaaaacatctgcagtgacgtagatcgcaccatcccacagtgacgctctattcgggttccagattggatcagatcatacatataacacggattcctttatttattacatgtgcaaagcttttgattgcgcataaacagctgctgtttggcgtgcgagcagctgataagcacagttattaaggcttgccaaacgagcgggagagagagattggattttgcacattacactgacaaaaatctatatatacagcggaggtcaactgtgcagttgcttttgaagaaattaaatattattttaattttaactttgttcagtttacctgttaggaatttcaaaaaaatgtttaatgaattcttaaaattaaagatctgtaacaagttattaggttagagctatcgttgcgaccacagctgtttgtgcatacatacaaatgcagatatgcatggcaacaagagtttcatgactttccggttttacaggtttgctgcaaagctttcgctctctcattcggcgctctctctctctctcacacactctggcacctgcctaattcgattagccgcaccgctcgaacgctcagtcttcaaagagatctcgaccgagcaacaagtgaacggaagaatccgagcagtgaagaatcagaaagaccgaggaaacactcgagaactctttaataacattgtgaaccaaaaaaccagaaacagccactgaaaatacacggaaagcagagtgattcgccatagttttgctagtgttttcaagggcacccatcatacagctgtgctgcaaattttgtgccaggtagtgaatttaaatgaaaggccaagaaaccacgaattatattgaaaatttccattatactagagatcggtcgagaacgtacgcctgcagacgtattcttggcaagattttcggttagactttggtcgcgtgtttgtttgtttgtttgttcgccccctttctgcgctcgcgttccctgatcaaaaattccctggactttgatcgtgactcaacacaaatcagcaaacagccgcagacccagacccattaaaaagtgcatattatagctaaactcgttgcgaaatgaaaccaatcggctgggacttaaattagacgtggtgcgggaaggaagttgcgtgatactttgtgcagagccagaaaccgagcaagggccactttttagatatgcttgcaaatccatattgtatcaactaaaatatggttgtgtttgaacaaatcttaggaaataccaaagttgttctacgatcttatctatggagtccctgcggtttgtttgtgtggaaatccgagttctcctttgtgtctttgtttggatacacatacatatatataagtgctttcttaagttctcccgaagttgcccccattctgaggtttctttgttgacttctgttgttacgcttgttaccatcgcctgattcccatgtgttttatcgaatgttgttttgctccccgcttctcggcttacttgcctccccagcttcgcaggtgaaagtgaagcggcggcaacgcgtgacagatggcgtgatgtctgcggttcgagtgcgagtgctgcgtgcaattgtaggacccttgattaagtcccccacctatcatacactgagagaaaaggttttagcaaagtgtgcgaataatctctgtcggaatatttggtctgtatgaaacagaaacccatgtacattagatagtaagttcgtctttgtggcttaccttgaagtttcttcaacatgactcaattaccaaaaaatactgtcaagcttttgttaaaagaaattaagtcatattatggaaactatttatcaacaaattgctatatataggtgtgaactattagttgctaggcttatcagttcaagcttacaattattaaatgggttttgtgtttagtagaggtcgcacaaatgtaaaatcagtttctgaacatccgatgtccagcgatctttgattaaaagcatactttgttcataaaatcattattattttgagtttgtaaacaaatagtatgaattctatacgcaatatcgctacaaatcagatgtttagaaaacaatttcacgtataatctgacgtctaatgataaggcaaacaaatataggtataggtattttaaatagttcaacctaaaaacgaaggcattcaattgagatttaaagaaaactgtttaataacaaataaactaggaagttatttggtagttcgagttgataccaatcgaagattatgacaaaaaaactaccaacttcttgcgtatttagatcgattgaatcttatccagcgaattcctccgaattcccagttgcgataatctcgccagattgtcgaatgtgtgaggtaccgataccgtcgaccgttggcacggcttccaaaaacaaaaaatctagcaattattgtttgtcgaattcgcttaattattgtacaatgttggacgttgaactccgtggctagttattaacgaactcgctcgtttgtattttgagttgtaaagcccgcgttccactcgatatcgcgtgatgtcttgcggagaccacgattgattcaacttctgcagtgtgcaaatgtgcttgtacttcgcggcgatatttcttctatttgttttatcattcgcgaacagtaaaacacgccactggcattggtaaccgtcgttgataagcggagttcgaccgggtttatcgccccaattcatcggtgacaatcgtaaatagtttttatcccagataggcgctcaaaagtgccttcagcgccgcccacagctcgtataattttatttacccaccctgactggtttattatcgccttgaacttgcaagaaacgcaactgcaagcaggaaaattaaataaataagtcaaataagtatttgcagtgttacaggattgaggtttataaatttcaaaatacattaccacacaaatactagctacgattttgttgatatctagcattttagtccaatctcaggactagtcgagtgctaaataatgtgaaaaattattcgctttggttgctatggctgtggccacgggtgtagaatatattatacgtatgtagctgctttgtttataattttcatactgcgcttgtatttcgacgtcacgtccgccgtttggcaacatttcagtgttgctggtgttggtgaatggatgtaggtgtggttgatggagtcggagagggagaggggatgttgccggcggtcagcaacactttgctacgcggctttgtctctggtctgttctgtaggcaatcaccttgactttgagcaccgccagggagaggatgggttaaaaataccatgcaggtgcattggcggggcttccgagcacaggatggctggctgctgatgcaatgcgtctattttccgagcgactctggccgttgccaagccgaagagagaggcgggcgaaatatgtatggtttatggcctatacgaattactcatgaccgtttccgctttaccctttacagttgccgtatctcagaagcagcgggtccaaagtaccgccaaatacgccgtagagccgattccttcgccaataagcggcgcatttgaccgcctgcccataaacatggccgccatataaccacaaacggtgaacgcaaccacacaaagtcggagctttgcgattagacaagtagatagcagcggggagttcaaggagagatccccgccagcaaggaaatccattttgaagggagaccagccgcagcagaccaaagatgaatagcctggcgcgggttttcagcaacttccgcgacttctacaacgacatcaatgccgccaccctcacgggagccatcgatgtgatcgtggtggagcagcgcgatggcgagttccagtgctcgcccttccacgtccggttcggcaaactgggagtgctcaggagtcgggagaaggtggtaagtacagagatgagatcttaaagactgtttctataaaccgaaatatcactctttagcgaatgtaaaatccaaataaaacagacttagccaatgattataccttctgagccacctatctagaaggtctaatcccaaaatatttcatatcttatgtgcacagatctagtaacaggctctgtctattaatcaattcaataggtgtgaaatcacttcaatatcatttcaattttgtatttcataataaaatcagacaaaatcccggaaaaaatatacatatatcctatagaaaaacacttgtattaattaacaactaatcttaatccttcattcaggtggacattgagatcaatggcgtaccggtcgacatacagatgaagctgggcgattctggcgaggccttctttgtggaggagtgcctggaggatgaggacgaggagctgccagccaacctggccacctcgcccatacccaacagcttcttggcgtctcgggacaaggccaacgacaccatggaggacatcagtggagtggtgacagataagtaagtgaggtttgctgcatactccaccagatccaccagtctcaccctatcatttgcgaaaccattttagaaacgctagcgaggagctgcttctgccactgccattgccgcggcgcaactccattgacttctccaaggaggagcccaaggaagccgttgttgagggcagcaagttcgagaatcaagtctcggactacacgcagcgcaggtacataatgccttttcatgctcctcaaacgaaggacaaagttagctaacatcatccttgacccaaacaggcacaccgacaacacactggagcgtcgcaacctaagcgaaaagctcaaggagttcaccacgcagaagatccggcaggagtgggccgagcacgaagagctgtttcagggcgagaagaagccggcggactcggactcgctggacaaccaaagcaaagcttcaaacgaagctgagacggagaaggcaattccggcggtcattgaagacacggaaaaagaaaaggatcagatcaaaccagacgttaacctcaccacggtcacaaccagcgaagccaccaaggaggtgtccaagagcaaaaccaagaagcggcgcaagaagtcgcaaatgaagaagaatgcccagcgcaagaactcttcaagcagctcattgggcagcgccggcggcggtgatttgccttcggcggagacgccatcactgggagtgagcaacatcgatgaaggagatgcccccatatccagtgccacaaacaacaacaacacctcgtcgtcgaacgatgaacagctatccgctcccctggtgacagctcgcactggggacgatagtccgctcagcgagattccccacacccccactagcaatccacgtctggatttggacattcacttcttcagcgacacggagatcaccactcccgtgggtggcggtggtgctgggtcaggtcgtgccgccggcggacgaccttcgactcccatccaaagtgacagtgaactggaaaccaccatgcgagacaaccgtcacgtggtgactgaagaaagcaccgcatcgtggaagtggggcgagttgcccacaccggagcaggccaagaatgaggccatgagcgccgcccaggtgcagcaaagcgagcaccaatcgatgctcagcaacatgttcagcttcatgaagagggcaaatcggctacgcaaagagaagggcgtcggcgaagtgggtgacatctacctgtctgatctggatgccggcagcatggaccccgagatggcggccctctacttccctagtcccctgtccaaggcggcatcaccgccggaggaggatggcgaaagcggcaatggcaccagtctgcctcactcgcccagctcgctggaggaaggtcagaagagtattgactcggactttgacgagaccaagcagcagagggacaacaagtaagtagcactatcggggtcagacaccaatttgtatactagattcacatcaataatctgccagcaggtacttggactttgtggccatgtccatgtgcggaatgtcggagcagggagcaccaccctcggacgaggagttcgaccgccacctggtcaactatccagacgtgagtattgttcaaatggcccagtgctatgatctgtgtatgtgtttaagttccaagcacttcactgcgcccccacgcactgcatcccgccttgttaacaagtctcttcccatgcaacgccctcatttgtacctgtgcgcaggtgtgcaaaagccccagcattttttcatcgcctaacctagtcgtacggctgaatggcaaatactacacctggatggctgcatgtcccattgtcatgacaatgatcaccttccagaagccactaacccatgtaagttggcccaacgccttgcctttggtgtagccccatgccttgttcgctttcggctctaattagattgtgtcctcaattgccatttgtcaggatgccattgagcagctgatgtctcagacagtcgacggcaagtgtctgcctggcgacgagaagcaggaggcagttgcccaggccgacaatgggggtcagacgaagcgctactggtggagctggcgacgctcgcaggacgctgcgcccaaccacttgaacaacactcatggtatgcctttgggcaaggatgagaaaggtagatcaagggtagccccaaatgttaataaacagcccatctaaagattgtactgcttttcagatggtgatcaggcagctgtggcaacgcaaacttcgcggcctacctcgcccgacatcaccgatcccacgctgagcaagagcgactccctggtgaacgcggagaacacctcggcgttggtggacaacctggaggagctaaccatggcctccaacaagagcgacgagcccaaagagcgttacaagaagtcgctgcgacttagctcggcggctatcgtaagtgcaccaatgcaagcttcaatgcgaatctaacaaaacctattctcctttagaaaaaactgaacctcaaggagggcatgaatgaaatcgagttcagcgtaacgaccgcttatcaagggacgacgcgctgcaagtgctacttgttccgctggaagcacaacgacaaggtggtgatctcggacattgacggcaccatcaccaagtcggacgtgctgggccacattttacccatggtgggcaaggattgggcgcaactcggtgtggcgcagctcttctcgaagatcgagcaaaacggctacaagctgctctatctgtcagcccgtgccatcggccaaagcagggtgacacgcgagtacctccggtcgatccggcagggcaacgtgatgctgccggacggaccgctgttgctgaatcccacgtccctgatatcggccttccaccgcgaggtgattgagaagaagccggagcagtttaagatcgcctgtctgtcggacatccgcgatctgtttcccgacaaggagcccttctacgccggctacggcaaccgcatcaatgtaagtctggcggttcctattatcttatcttatatgactaaaccaaattattaattacgtgatattcttaacttttccaggacgtgtgggcataccgagcagtgggcattcccatcatgcgcatctttacgatcaacaccaagggcgagttgaagcacgagctgacccaaacattccagtcctcgtaagtagcgttctgttcacgacctagcctagtgttagctgtatccgcacatgtgtctcccccatgtacttggttccggtgttgctcattactgaactcatgccacattcgataacgttaactaattcgccaaagaacaccaacaaacaaacaaacgctaattggctcaagtcgaattaacttcatcaagtaacgctaggtgtcttaagcagtataagtgtatcctcgatctgtgtagtatgtatccattgtactacctaaaccgcaccccactcaatcaatcaatcgatcaatcgaaagcctgccaaatccaattcaagcattttggttgtcaaatttacacagtggctacatcaatcagtcgctagaagtcgacgaatactttcccctgctaaccaaccaagatgaattcgattaccggacggacatcttcgacgacgaggagtccgaggaggagcttcagttcagcgacgactacgacgtggacgtcgagcacggttcgagtgaggaaagcagtggggatgaggacgatgacgaagccctctataacgatgattttgccaacgatgacaatggcatccaggcagtcgtggcctccggcgacgaacggaccgccgatgtgggcctcataatgcgagtccgccgcgtctccaccaaaaacgaagtcattatggcttcgcctcccaagtggattaattcctagactagctccagtcctagccccagtcgaaggttgtgcagcttgcaaattgtgatgttttttttaagagagttaggattgtgctatacctgtatgtctgtgcctgatgtgccaggtcagcgagctccaagttcgtcggccagttaagtttcgaaagtattctgctcccagcaggtctttatgtttagttctaaggatgaccattatacatataaattacccaatgaaatataccttcactttcgccgtgacggaactcttttatttctcggagtgtggcatgagttatgagctagatccggtcgtagactgtagttagcgtagagtgaacatcggtaatttaggtattcgtgagtatgaataatataattcttgaagaatttaccatattaaaaaaaatgcagtatatcccgaggcgccttttcccgatcgaaaatgtctaaggaattgcattgcataccctcgggctgctcagatcgtggagatcatagcatagccacaggagttggtcgtaaatgattcgtttgagatctaataccttgcctttttttccagatactgcagcatgacgtacatcgtcgatcaactgttcccgccggtgaaactcgacgaagcctccgccgagttctccaacttcaactactggcgcgaccccatccccgacctggagatccccgagctggagacggcgctggtgccaccgagcaccaaggtggacatggccaccctgcgccccattcccgagaagtgaactggctgcttagaagcccagcttgcgtactaaaaacctatttacatatatggatatgcaacacactctatttatagcagatatagcgcttttccaaattgtttgcctagcttcaaaccttctagatgtgcttaccaaaaatgaaatatctatattatgcataagcttagccaggattcgcgattgccttggttccattatcatttcctttcgatcgtttctagttaaatgggtggtttaagttgtaatcaaaattcagttattaatagtgactactataagtatgttcctttgagactccccgcaggttcgtagatgatgcatattccagacggcgcataggagttgtgattttgatttcattatttttcgtatgtgatcatttaaattaagttaattgtgatgaggtttttatttgaagtttttatgaaaactgtgctctaaacctatgtatacttaactgatagtgtttcaataccaataaatgcttcaaattcaaacaaaacaagtcaagtctatatacaattctctgtttgtgtctggaaaccacctgcacctgcctggcgtctggcatacgaattatgagttgactggggacgacactcgattcccaggcggcttctcatgttgcagtggaaagttctcgcatctggctggggcacctccatgatccgagccgagagccgcgggtgcgttggcagcggggggcatttcatttgtcaacgtaattttgccaattcaattaatgctcatttaatgcagagcaggccgaccggccagcctacagcatacacattggtgtacaatggcccacggacaacgaagtgggcagttaagtggccacaaacggtcggtcatgcaaactcagtggcagatccacaattacttttcctagggggcacaactctcctagtatgtacatatgggggaattacgaaaagcacagttttgcgtatgtgaacatgccttttggttccaaagttctatgaattttattttc

SEQ ID NO: 4976 - DNA, 3761 bp, DROSOPHILA
agcaacaagtgaacggaagaatccgagcagtgaagaatcagaaagaccgaggaaacactcgagaactctttaataacattgtgaaccaaaaaaccagaaacagccactgaaaatacacggaaagcagagtgattcgccatagttttgctagtgttttcaagggcacccatcatacagctgtgctgcaaattttgtgccagttgccgtatctcagaagcagcgggtccaaagtaccgccaaatacgccgtagagccgattccttcgccaataagcggcgcatttgaccgcctgcccataaacatggccgccatataaccacaaacggtgaacgcaaccacacaaagtcggagctttgcgattagacaagtagatagcagcggggagttcaaggagagatccccgccagcaaggaaatccattttgaagggagaccagccgcagcagaccaaagatgaatagcctggcgcgggttttcagcaacttccgcgacttctacaacgacatcaatgccgccaccctcacgggagccatcgatgtgatcgtggtggagcagcgcgatggcgagttccagtgctcgcccttccacgtccggttcggcaaactgggagtgctcaggagtcgggagaaggtggtggacattgagatcaatggcgtaccggtcgacatacagatgaagctgggcgattctggcgaggccttctttgtggaggagtgcctggaggatgaggacgaggagctgccagccaacctggccacctcgcccatacccaacagcttcttggcgtctcgggacaaggccaacgacaccatggaggacatcagtggagtggtgacagataagcacaccgacaacacactggagcgtcgcaacctaagcgaaaagctcaaggagttcaccacgcagaagatccggcaggagtgggccgagcacgaagagctgtttcagggcgagaagaagccggcggactcggactcgctggacaaccaaagcaaagcttcaaacgaagctgagacggagaaggcaattccggcggtcattgaagacacggaaaaagaaaaggatcagatcaaaccagacgttaacctcaccacggtcacaaccagcgaagccaccaaggaggtgtccaagagcaaaaccaagaagcggcgcaagaagtcgcaaatgaagaagaatgcccagcgcaagaactcttcaagcagctcattgggcagcgccggcggcggtgatttgccttcggcggagacgccatcactgggagtgagcaacatcgatgaaggagatgcccccatatccagtgccacaaacaacaacaacacctcgtcgtcgaacgatgaacagctatccgctcccctggtgacagctcgcactggggacgatagtccgctcagcgagattccccacacccccactagcaatccacgtctggatttggacattcacttcttcagcgacacggagatcaccactcccgtgggtggcggtggtgctgggtcaggtcgtgccgccggcggacgaccttcgactcccatccaaagtgacagtgaactggaaaccaccatgcgagacaaccgtcacgtggtgactgaagaaagcaccgcatcgtggaagtggggcgagttgcccacaccggagcaggccaagaatgaggccatgagcgccgcccaggtgcagcaaagcgagcaccaatcgatgctcagcaacatgttcagcttcatgaagagggcaaatcggctacgcaaagagaagggcgtcggcgaagtgggtgacatctacctgtctgatctggatgccggcagcatggaccccgagatggcggccctctacttccctagtcccctgtccaaggcggcatcaccgccggaggaggatggcgaaagcggcaatggcaccagtctgcctcactcgcccagctcgctggaggaaggtcagaagagtattgactcggactttgacgagaccaagcagcagagggacaacaagtacttggactttgtggccatgtccatgtgcggaatgtcggagcagggagcaccaccctcggacgaggagttcgaccgccacctggtcaactatccagacgtgtgcaaaagccccagcattttttcatcgcctaacctagtcgtacggctgaatggcaaatactacacctggatggctgcatgtcccattgtcatgacaatgatcaccttccagaagccactaacccatgatgccattgagcagctgatgtctcagacagtcgacggcaagtgtctgcctggcgacgagaagcaggaggcagttgcccaggccgacaatgggggtcagacgaagcgctactggtggagctggcgacgctcgcaggacgctgcgcccaaccacttgaacaacactcatggtatgcctttgggcaaggatgagaaagatggtgatcaggcagctgtggcaacgcaaacttcgcggcctacctcgcccgacatcaccgatcccacgctgagcaagagcgactccctggtgaacgcggagaacacctcggcgttggtggacaacctggaggagctaaccatggcctccaacaagagcgacgagcccaaagagcgttacaagaagtcgctgcgacttagctcggcggctatcaaaaaactgaacctcaaggagggcatgaatgaaatcgagttcagcgtaacgaccgcttatcaagggacgacgcgctgcaagtgctacttgttccgctggaagcacaacgacaaggtggtgatctcggacattgacggcaccatcaccaagtcggacgtgctgggccacattttacccatggtgggcaaggattgggcgcaactcggtgtggcgcagctcttctcgaagatcgagcaaaacggctacaagctgctctatctgtcagcccgtgccatcggccaaagcagggtgacacgcgagtacctccggtcgatccggcagggcaacgtgatgctgccggacggaccgctgttgctgaatcccacgtccctgatatcggccttccaccgcgaggtgattgagaagaagccggagcagtttaagatcgcctgtctgtcggacatccgcgatctgtttcccgacaaggagcccttctacgccggctacggcaaccgcatcaatgacgtgtgggcataccgagcagtgggcattcccatcatgcgcatctttacgatcaacaccaagggcgagttgaagcacgagctgacccaaacattccagtcctctggctacatcaatcagtcgctagaagtcgacgaatactttcccctgctaaccaaccaagatgaattcgattaccggacggacatcttcgacgacgaggagtccgaggaggagcttcagttcagcgacgactacgacgtggacgtcgagcacggttcgagtgaggaaagcagtggggatgaggacgatgacgaagccctctataacgatgattttgccaacgatgacaatggcatccaggcagtcgtggcctccggcgacgaacggaccgccgatgtgggcctcataatgcgagtccgccgcgtctccaccaaaaacgaagtcattatggcttcgcctcccaaatactgcagcatgacgtacatcgtcgatcaactgttcccgccggtgaaactcgacgaagcctccgccgagttctccaacttcaactactggcgcgaccccatccccgacctggagatccccgagctggagacggcgctggtgccaccgagcaccaaggtggacatggccaccctgcgccccattcccgagaagtga

SEQ ID NO: 4977 - protein, 1102 aa, DROSOPHILA
MNSLARVFSNFRDFYNDINAATLTGAIDVIVVEQRDGEFQCSPFHVRFGKLGVLRSREKVVDIEINGVPVDIQMKLGDSGEAFFVEECLEDEDEELPANLATSPIPNSFLASRDKANDTMEDISGVVTDKHTDNTLERRNLSEKLKEFTTQKIRQEWAEHEELFQGEKKPADSDSLDNQSKASNEAETEKAIPAVIEDTEKEKDQIKPDVNLTTVTTSEATKEVSKSKTKKRRKKSQMKKNAQRKNSSSSSLGSAGGGDLPSAETPSLGVSNIDEGDAPISSATNNNNTSSSNDEQLSAPLVTARTGDDSPLSEIPHTPTSNPRLDLDIHFFSDTEITTPVGGGGAGSGRAAGGRPSTPIQSDSELETTMRDNRHVVTEESTASWKWGELPTPEQAKNEAMSAAQVQQSEHQSMLSNMFSFMKRANRLRKEKGVGEVGDIYLSDLDAGSMDPEMAALYFPSPLSKAASPPEEDGESGNGTSLPHSPSSLEEGQKSIDSDFDETKQQRDNKYLDFVAMSMCGMSEQGAPPSDEEFDRHLVNYPDVCKSPSIFSSPNLVVRLNGKYYTWMAACPIVMTMITFQKPLTHDAIEQLMSQTVDGKCLPGDEKQEAVAQADNGGQTKRYWWSWRRSQDAAPNHLNNTHGMPLGKDEKDGDQAAVATQTSRPTSPDITDPTLSKSDSLVNAENTSALVDNLEELTMASNKSDEPKERYKKSLRLSSAAIKKLNLKEGMNEIEFSVTTAYQGTTRCKCYLFRWKHNDKVVISDIDGTITKSDVLGHILPMVGKDWAQLGVAQLFSKIEQNGYKLLYLSARAIGQSRVTREYLRSIRQGNVMLPDGPLLLNPTSLISAFHREVIEKKPEQFKIACLSDIRDLFPDKEPFYAGYGNRINDVWAYRAVGIPIMRIFTINTKGELKHELTQTFQSSGYINQSLEVDEYFPLLTNQDEFDYRTDIFDDEESEEELQFSDDYDVDVEHGSSEESSGDEDDDEALYNDDFANDDNGIQAVVASGDERTADVGLIMRVRRVSTKNEVIMASPPKYCSMTYIVDQLFPPVKLDEASAEFSNFNYWRDPIPDLEIPELETALVPPSTKVDMATLRPIPEK

SEQ ID NO: 4978 - DNA, 6306 bp, DROSOPHILA
cgttgccaagccccaaaaagggggctcaccagaacgagcacagtaaaagagcaagctgaatatattttctaagtaaaatttatttattatgtataaataattctcttttagctctcgcacaagcgctattaacgttagtaatttacagttcgctctgcagtcctcgttgccgaaccagggactcacagtcgggtatccaggtcacctttggtgggatttaggagatcccccctgctgtaaccactgggtgtccctggtcggctgcgaagtggaaatcaaacgaaacataacggcacaaatagttggcttaaacaattacaataacaattgtggaatatataaatttgcatacaggctaaaagtgaagtggtcccgtctccacaagcatagctcccacttcacttacgttcgtattcgtaatttagttagaaattagatttcttgtacttgttgaacatcgtttgctttagtgttgttttgcagttcccatagctatctatccaatatataaatacgaaaatcaattgtaaagaagagggatattcgggccggtgccaccgctgcgccatggtggttatttgttgacttgggcgcaatggagccccaacgggtacagaaggaatgattgggatagatgcgactcgcttctgtgatttttgactttggctacccttaaacccataagagagatgcaacgcagaggttacaatttttacaatagaacgtttgttaatttgttgcttaggcgctgctttatccactactatatctaccagttatttatcatcctcagttatacatttatacaatcctattgcacacatacgattctcatatgtcttgcttagcaccccctcaagatacatatacataatcatatacatacatagatatagatattttgatacagttatagttaaagttaaaaaaatacctcacacttgataataatgagtgtaaagacccgcccgcgactatggtatgaagttaaccccgaccagctcgaaagaaagtgatagtgtaggaggcataggaaatagagggtcgagaaggccttgagttggcggtcctagacgggcccaatatcactttggtatctggcggtcaggtagttggccgcctctgtcatttgttccaggcactggtacagaccgttaagatgcctccggcagcgcttggccagctccgtggccttgtcccccgagcccggcttcgatttggcgacgtctacaatgtcgctgccgtcgctgctttgggcgttgtcgctcttgttgccatcggactctagccccgagtcgttttcctgcgatatgtccgagtcagagtcactcatgttgctcaccgagttggtggacatcatggatgcggtagaggtacggcgcacatgacccttgacacttccggatgcggttgtgcttggactgccgctgttgaattcagtcttgctctcgctgggattgcagctcgaagtggaactggtactggcgttgagctgctgttcggagtgctgctggtcgtcgtcctcctggttggcggtccaaagcagatcttttttcagggagttcagcatgttgtacagattgaacagctcggaggcgctgagaaagtcttggacattttttgaatgcgccgctccccgcttgccgtgggcactggaggtctgtgtcagctggttggcggtcgagtccttgccggttgctgggatgatgtcagtgctgtcgccgatctggggataaattatgtaaagtgggagccataagttgttggttccggatccggatggctggtcaaatggggggctggggttcttgggttatgcggtaccaacctgccgatccatgagcctgcatggcaccagtatggtgtcgtccataatgttgacagtctttacaaacttttccatcacattgacaatgctgtctttggagaactgctgctcatcgtgacgggcgatgcggcgcaggcagtttctgaaaaacagaacaatcgaaagatgagcttgggccagagcacaataaaccagtagagcgtgtgcaggggaaccagtttggattggacaatagtctgcgtgattagtgactatgccacatcacgccagactggaccaagcgctggccgttctaaagcgtcgttaagtctgcggcgatcagacttccgccactcgaagccatctttctttgatgctttcgactggagatgggtgcgcctcctgctgaccaacgtggcatatgatatatatgaattggtttctatgcaaatcagcgactcgctggcgttgtcgcaaattcaatttgtataaaatagaaaaccagttggtgctttatacctgacattgctcgtgtggctcttaaaacaaagcacagacggacggacagaaagatttctattttggtttccaaagccaatttaacgcgtccacgtgctgtcggtggcggggtgcgagggtaaagcccgactttgctcgcaagcttcaatgtaatggttatacaatcctggctggtcgcattaactttaatttcacgaaaagatcgcgtaacatctccaggtcaagccccataaacttgcctgagctccctccattaacccgccgggaatatatgttagttgctgatatctggagctggagcggccaaagtctagaggcggcttggcttatcgtcgctagacagttcccagacagagctgaagttgcgtatctcccgcacctcctatttaatgcggccagattgctcggggcggatcggcatgtgggcagccagttcggggccgcgtgatcgcagctagttgacagagcgagcgccgagcgcactgataaatttagtttcagtgactgcgccatttaaagacctctaccctacagttctatccctggccagcgcccgccccgatgccatggcaatccaacttagaaaatctagatatcgatgactgaagtgtaacgcgcggcaggccggggtggggtggccacgcgagtactgcgtgctccgaactctgctgaccgacatcgtctcactgtggtctagaaccacaataagatctagatctagagaaggctggcgcgggtgtcaatgttctttccactggcacggccagatgtcgtggacgtcgacggaggattcccagccactgaacagagtgactaattaagctaattgcagcgggttccaatcatggaaatccgcgtaggaatgcgaaaacaattaccatcttatcaacgcttttcgcttagacactcgaccataattgactgccatctcgtggaaacctgagtaatcgcctctatttattttaaattatagatattttctagccctgaccacgacccttgcttcgcttagtcacttaagctggccacacgatagttcaacttatcactgcattttgaatcctttccttgcgaatcctctgaacagatcccgaaagcccaaaaacgccggcttgggcaacacgccagatgctaccagccaattgaccaggcaataggtacacctgaagtgttatggaaatttggctaagccccacaagcgtcacgcgacatgctcgccaagaagggcggggtaagcagcgggagagggagggtaccgcatacaacgccgaaatcaggcgactttttcgctcagcggtagctaagggcggtgaaggagtgctgaaggggtggtggtttggtgggtggctgatgacgagctggctttatgtggcaagcgaatcaaacgcttctcttcgcactctctcttcggtccgtttcgccgttttctctttgccgccgagtggcgtgatgttgcccagaaactgtacagcggccagagtcgcctccatcagctgagcaagatgaatgaatctctagcgatgctctgccttcccctcaccttcctaccatcgctcatgcaaccatgtttagtggtatttctcgtatttgcaatgttgagcaatggcatatacatagccatacgaacagagttgaccaatatttggtttactttggctttggctgcgcctcgacctccagcataatcgatttttgatacgcccgcaaattagatattctacctactcggtggccgggttggccggattggctcggccatcgggcatagagcattgacgaccgtaagttggcgctcaaggcgacacctgcctcaaaaagtgacacactgccagcgcaacgaggtgaatcagagaattttctgcgatttaagcgccccaaggaggcgggcagcaccagaagcgatgagtaatggctatggccgatagctgggctggcggactggtgtcagtggaccggaggtgcgcacagataaggcatcttatcgcttatcccaaagctgtgatttgcctccgctggctcactcgaaacatttgggcaaacaaacggcaaaaaaaacaccaacatacttctgtataggtgtacaatatatagccgattgtgtcatattagcgctggcttgatttttttattttattttattttttttgtatttgttgttgtatttttctttcgagtttgaatggccgtccgtccccctgtccatcgaaaatcgtacgataaatttcttgtatctcgtttttcgttcggcggtggtggtgcaaacgaaagagaaaacgctcgcggggtgcggtttggattcaatttgagaggcgagtaaatggacggaagagagcgattcggatgggttagaggagaggcagtgcggggcttgggtgatggatcgggaacgggggggggggatcaatttagcatcacttgggcaaattgaacttaaacgccttaactagcgaattcggattgcgacttaccgacttgtctccagcttggtgaggtccgtgtatccactcatgatgactgtgtattcctgatgactatgtactgctgctgcaggaaatatgtggttcgagaaattttctttggccgcaccaacactcgcgcactttcactcgcgtttggaatcggagtattcctgacagggattacgaaatcggcacaggtgactgggctggcttcagctcggttgcagtgcaggtctggcctgaattggtttggattcggaataggagtagctgctgccccggcggaactgctgtgtctagtgcgctgcctccaataagtcgcggctgttttatgccaaaaatttacatgtactcgattagaccccgactttggtttggctttggccgtcgatctagtccgaaccaattaaatatgggaattctaagtagtctgcacacgcaccgagtttaatttaatttcagtttctgtttcgacacgagcagtcagcgagaagaattttgaaaaaattacagagagggaagcattgccagttgcttttatagtacgggccgagtcagggctgcggaggctccgatagaactatcgattactcagctcggggcaatcgatgtaaacatcagctgtcatgttcaatgtggcagcaccggccaacgccgttaattaattagctaattcgaaaatgcttaaatttaaaaataaattaggataagtggcaaaatattcaacattgttttatttttttttagttttgcaccaaattatcaatatagattgttgtaacataacttgggcaaaaaatagagcgtgccatttaattttcctcttattactactaaagtgcattcaacaattgctggagagtacatatgtaaattgcactgagattagagaacttccattattgcgaatcaatgctcttcccagaaccacctttgcaaccacccggaagcgcacgtctgttaggaccgctcgtgtcgcaggacactatccacttactccacaatcccttctgaccacgctgcgtcctttactgtgtcccaagtcgacaccgtttccgatgggcctctgtacgcatggccgggtcgagtccaaagtccagcagtccaggtaccgttagttcgagcatttcttagcttgcaaattgaagtggtcttcagtcccttaataacatttcgttttcgcctagagctgcactttagatttacatttctttcctttttgtgacctaaaaaacaaagaggcgttaaagacagttggaagtacattttctataaaagcttactgaattcccgaagtacgaaaaaactccatttattccggctgatctctgcgcccctcaggtctcttggaatcctttgcacgcacaggtacatttcccaaacttgatcccgggtcaatgcgtcgatcatgttcagctcggggtcccaaaaaaaggtaataactccccgccttaagttctccgccaagtcgtcgaacatctgttaaatttaaattaaaattatttttgcattcgtcgacat

SEQ ID NO: 4979 - DNA, 1380 bp, DROSOPHILA
ttccctctctgtaattttttcaaaattcttctcgctgactgctcgtgtcgaaacagaaactgaaattaaattaaactcggtgcgtgtgcagactacttagaattcccatatttaattggttcggactagatcgacggccaaagccaaaccaaagtcggggtctaatcgagtacatgtaaatttttggcataaaacagccgcgacttattggaggcagcgcactagacacagcagttccgccggggcagcagctactcctattccgaatccaaaccaattcaggccagacctgcactgcaaccgagctgaagccagcccagtcacctgtgccgatttcgtaatccctgtcaggaatactccgattccaaacgcgagtgaaagtgcgcgagtgttggtgcggccaaagaaaatttctcgaaccacatatttcctgcagcagcagtacatagtcatcaggaatacacagtcatcatgagtggatacacggacctcaccaagctggagacaagtcgaaactgcctgcgccgcatcgcccgtcacgatgagcagcagttctccaaagacagcattgtcaatgtgatggaaaagtttgtaaagactgtcaacattatggacgacaccatactggtgccatgcaggctcatggatcggcagatcggcgacagcactgacatcatcccagcaaccggcaaggactcgaccgccaaccagctgacacagacctccagtgcccacggcaagcggggagcggcgcattcaaaaaatgtccaagactttctcagcgcctccgagctgttcaatctgtacaacatgctgaactccctgaaaaaagatctgctttggaccgccaaccaggaggacgacgaccagcagcactccgaacagcagctcaacgccagtaccagttccacttcgagctgcaatcccagcgagagcaagactgaattcaacagcggcagtccaagcacaaccgcatccggaagtgtcaagggtcatgtgcgccgtacctctaccgcatccatgatgtccaccaactcggtgagcaacatgagtgactctgactcggacatatcgcaggaaaacgactcggggctagagtccgatggcaacaagagcgacaacgcccaaagcagcgacggcagcgacattgtagacgtcgccaaatcgaagccgggctcgggggacaaggccacggagctggccaagcgctgccggaggcatcttaacggtctgtaccagtgcctggaacaaatgacagaggcggccaactacctgaccgccagataccaaagtgatattgggcccgtctaggaccgccaactcaaggccttctcgaccctctatttcctatgcctcctacactatcactttctttcgagc

SEQ ID NO: 4980 - protein, 279 aa, DROSOPHILA
MSGYTDLTKLETSRNCLRRIARHDEQQFSKDSIVNVMEKFVKTVNIMDDTILVPCRLMDRQIGDSTDIIPATGKDSTANQLTQTSSAHGKRGAAHSKNVQDFLSASELFNLYNMLNSLKKDLLWTANQEDDDQQHSEQQLNASTSSTSSCNPSESKTEFNSGSPSTTASGSVKGHVRRTSTASMMSTNSVSNMSDSDSDISQENDSGLESDGNKSDNAQSSDGSDIVDVAKSKPGSGDKATELAKRCRRHLNGLYQCLEQMTEAANYLTARYQSDIGPV

SEQ ID NO: 4981 - DNA, 4170 bp, DROSOPHILA
accacatcagacttgtgcggcagggattaaagtgagttatttgctggcatgcttatttagatttaaaatcttttataccattgcagaggattttagtaagaagtctacaatgcagggattcactagccatgtccgtctgtccgtcaaggaaaaatttccaaaagttttctttcaatgcagaaacggtccagaaaagaatattttattataccgccgtcaagagtaagagtatataaatactgcaagggtatataagctccggcttgccgaagctacttacttcttccttgttatatcttaatttaatgaaaatcctttgctgaatttcaggaacagtacggacgaggagcggaccacgtgagttggcatggaccagaaactacgaatttccttttaatactcgaactgcgaactaacataagctgtgtggccaaatacctgacaatcaaaatgagattggcccgaatatcataacctagacataggctggagcttcctttaactattgttgttcgtttctcagttgctaatcttaccgctttgcgaacattgatttttatgatattattcaatattccgtctatgcagcaagcgctccttaatatctattctatcgatcttagtgttcttacatacaaaatgtacctcgaattatttgtagtcgcgaaacatttccaaagccttcaagtaccgatatcgtgctcgctactaattgcttaatgtaaaattgtgatgtgtttaaacttagatacaaaatgtcttgcaaatatatttctgtactaactaactaccgctgaatgcaagcttttttgaatttgaaagtggttttccagctcgattcctcgaagggtcaacgaaactgttaacgacagtataataaaaacgaacgataacacggatggaaagtctgtcatagagggaaaacctgttgagctgaaaatcgtaacgaaaaccaagacatttcaactgttgaataccaaagaaaaccagtaaagaatttgtatataaatatcataactacattttatctgtgtataatgaccgaattgcgagtaattactttttttataactgttacaaaataaatggttgcttttctatactttcgacacaaagtaatgttttggaaaagaatttactgcgttcatttgaattctttttatatagctatgccgtttagttcgtgtactgattcttgaaggtaaactcaggatgcctttccacactgtaaacaaaataaaaataaataaataaataaaatagagggattaaagctaagtcatatttttatacccatggaagaatgcaaagtcacagattcgaatattctggtccaggctagacaacttggccacctcctcggccgtcagttcgaaatcgaagacgtccagattctgtttaaggcgagcgggattcgtgctcttgggaatggcggatacaccagtgtcgataatccagcggaggaggacctgcgctggcgtcttgccatggcttgcggcaatctccttcacctcagggatgtccatcaggtccggcagatctctcacgatgcccgctccagcattaaacttggcgattcccttggatcccaacggggagtaggcagttacggtaatgttttcggacttgcagaagtcgaccagatctcgctgctgcaaataaacgtggtgctcaatctggttgttggccggccggatcttgcagttcttcaacagacgggccacctgatccttgctgaagttggataccccaatggacttggtgagacccttctccaccagggcctccatagcaacccagatggctgcgtggttcgtggtaacgtcgacctccattaggccctccttgtcgagctgaaagttaatgctcgagatgtgtataggagttgggattagattccgtagcacaactaccttaaagcttccgtcctcgttgatattaattgtgaagggagtgtgcaccaaatataagtccacatagtccagttgcagatcttccagtgactttttgatggttggctcaacttcgtgggggcggttggctaaaacaaggattatattattattatattatttttgaaataactggactcgtaatagtgaaaactctcacagctatatttatagtcattcacatcaggttcatttatcatatcaaagagtcatgtggtgataataaaaatgtttttaaattgaaattatgaacactgaaggagtctatgttggtgttttaaaatcacgttcctagtcttattttatcaactagatatcaaaaagaatattggtagctggtgtaaaatgctttggtttctatggatcttaagattctgtgggcatagaacataggaactatttataaatgtttatatggcattttgaaataccatccaactactaaatgctacttacaaacgggtggcaccttggtcacaatgaacagctcctcccgcttgaccttgccggcgtccagccaacgctttaggactcttccgatggccttctcattgccgtagactggcgccgtatctatgtggcgatacccagcttccaaagccgcatcgatggcggtttcgatttcctcatcagatgcctgcattgtggtgatgaaagtgcggtttagtggtattgtatatatattgattataggatttgcataatctacactacccgaaaatcttcaaactcgatttacaacgatatttattctcccgtgaccagagaaagtccagtccaccagtggatatgaatggtggtttattgtttgtttttgaaaaccggtctaaagtcccccagcaccaaccaaattgttgattgcatcggaatcggaatttcaagagatttaaatgacgtgtcagcgatttgttgaggtcattaataagttgaaacaatagtattaagattcgaatatctactatccatttaaccacttacaagcaatctatgaaattacagaattaacgtgattataaatacctgccaggtgccgatgccaatcacgggcatcttctctccattgttgaacgttaagaacttggtgttgaccattttgtattgatttttgataacttgtacactaaaacagacttgagtaacagattaaatggaaaagatgcggcacaacctgttgcttcgaggattgaattgaaattaaacaagaagctacgacccagtcaccggcccacttatctcacccaatccaatgagattctgccttttgcaaagcgcggtcttactagtcgatatttgtttaacaaaacaatcgaatttaaaaataaatgtacttaccataaatggtttaaggctcgtttactataaaatatcggactaatttatttgcattttagttagatttaatattataacaatagaaaaatttgtagctcatatccaaatactgtataagtgtgtgtaagaaaaattcaattccgtttctaaatgattttaagcttttagagaacaactaatccaccactatggagaagttagtgaacgtgaattctgaaagttctgtagtctcactgaaaatgcatttgtcaattcgactggtggggctgccggtgtgctttagccagaggcgcctgtaaaagaacggcttgataattaaacgttgaatggaaaaaatcactcacatggactcaaaggaatgtcggtgtgcttgaatttcgcccttcaccgtattctcgttggtgtttttgcaccaaccccggactcccagcttttgagctcttcgcaaggtgtactaaaacatggtaattggattacagtaaagagatttcacatatacaataagaggtagcagaaaatccatagctcaaaggggttttgaagatcccatttcccagcaagctcttaccattcgaaatgaaacgcctgttggtgccagataactaattattgcgactatacgatttgtgaataccctaccttgcacaatgccgaacacttcgaattggcagctgaagaccggctcatcgcttctgtccgatgttactcttttttggaactctgtgttcgaaattcggttgggctcctcgctgccttttttggatggtgtacctttatctggtgtcgaagatggaagagttaccctcctacgttcaccctcagtctgcgtttcttgggaggtcattttacaactcgtatatttaacatatttggagcggaaactgtc

SEQ ID NO: 4982 - DNA, 1292 bp, DROSOPHILA
actgggtcgtagcttcttgtttaatttcaattcaatcctcgaagcaacaggttgtgccgcatcttttccatttaatctgttactcaagtctgttttagtgtacaagttatcaaaaatcaatacaaaatggtcaacaccaagttcttaacgttcaacaatggagagaagatgcccgtgattggcatcggcacctggcaggcatctgatgaggaaatcgaaaccgccatcgatgcggctttggaagctgggtatcgccacatagatacggcgccagtctacggcaatgagaaggccatcggaagagtcctaaagcgttggctggacgccggcaaggtcaagcgggaggagctgttcattgtgaccaaggtgccacccgtttccaaccgcccccacgaagttgagccaaccatcaaaaagtcactggaagatctgcaactggactatgtggacttatatttggtgcacactcccttcacaattaatatcaacgaggacggaagctttaagctcgacaaggagggcctaatggaggtcgacgttaccacgaaccacgcagccatctgggttgctatggaggccctggtggagaagggtctcaccaagtccattggggtatccaacttcagcaaggatcaggtggcccgtctgttgaagaactgcaagatccggccggccaacaaccagattgagcaccacgtttatttgcagcagcgagatctggtcgacttctgcaagtccgaaaacattaccgtaactgcctactccccgttgggatccaagggaatcgccaagtttaatgctggagcgggcatcgtgagagatctgccggacctgatggacatccctgaggtgaaggagattgccgcaagccatggcaagacgccagcgcaggtcctcctccgctggattatcgacactggtgtatccgccattcccaagagcacgaatcccgctcgccttaaacagaatctggacgtcttcgatttcgaactgacggccgaggaggtggccaagttgtctagcctggaccagaatattcgaatctgtgactttgcattcttccatggtgtggaaaggcatcctgagtttaccttcaagaatcagtacacgaactaaacggcatagctatataaaaagaattcaaatgaacgcagtaaattcttttccaaaacattactttgtgtcgaaagtatagaaaagcaaccatttattttgtaacagttataaaaaaagtaattactcgcaattcggtcattatacacagataaaatgtagttatgatatttatatac

SEQ ID NO: 4983 - protein, 329 aa, DROSOPHILA
MVNTKFLTFNNGEKMPVIGIGTWQASDEEIETAIDAALEAGYRHIDTAPVYGNEKAIGRVLKRWLDAGKVKREELFIVTKVPPVSNRPHEVEPTIKKSLEDLQLDYVDLYLVHTPFTININEDGSFKLDKEGLMEVDVTTNHAAIWVAMEALVEKGLTKSIGVSNFSKDQVARLLKNCKIRPANNQIEHHVYLQQRDLVDFCKSENITVTAYSPLGSKGIAKFNAGAGIVRDLPDLMDIPEVKEIAASHGKTPAQVLLRWIIDTGVSAIPKSTNPARLKQNLDVFDFELTAEEVAKLSSLDQNIRICDFAFFHGVERHPEFTFKNQYTN

SEQ ID NO: 4984 - DNA, 2689 bp, DROSOPHILA
tattgttgttatagtttgctaaggccagctcaaataataattcgcttttcagcgtccaccggctgtttggagcttggagcatggagcatggagctcaacaggggatgagaagggggtggctcagagtcatggtcacggttcacaggttaattatgcagcttgttaaggcgcaccagcggaaaaagccacgcgccaaaaagagcacaaaaaacaaggcacggtcgaaaaacaaaaaaaaaaaaaagaaaagagaaaaccaaaatgttgctgcaaaaaaaaaaaaaaatcagaaagaaggtggaaaacaagaaaatttcgccaacggcaaacaggggggttatggaaaattcggggtggcgaaaaacgagggcactacatgttgcgttcgagttcgaagccaactttggccattcgggaaatgcctcgacgaactttgctaatgagttttaacgaaatgattttattttggaatgtgtgaaaatcggtgcaaagttaatgccttttacagctaataatgctgctaatgaattaacttaaaactgctgaaaataatatatattgtgcctattttgtagagaacacaattgtagcgaaacataaagctagctaattgaaagttttcggtagaaattctctgcactttcatagcaaatttgtgctatattttttaaggaaattttgattttttaattaaacatcacctctttcatgcggtggctttgtttccttgtgtttttttttttggttggtggatctggggggaattctgaaagacaaccgaagtttccacttgtgccattcaattaacccagctccaaacgagacccctaaacccaaactaatccattcacccgccaccccaaaaaagtatgcaatgcattgaggcaagagtgagagtttgtcactcgcgcagggaaaattaaaagcataaattctgttccccagaaacgcacgagacaaaacaaaaaaaaaacgaaaaaaagtgaaataaaaggaaaccatgtcccaggagagtaatggtggcccagcagcaggaggcggagcagcagcagcaccaccaccaccaccacaatacataataaccacacccagcgaggtggatcccgacgaagtgcgctccatggccgacctagagctgggatcccccgaaaagcaggtgcaggtacagagtcaaaagttctccagcacgtcgagcaccaccaaggtggccacccactcattttcgatgagcagtagtgccggcactactgggcagcaaagcaaacaggacagcgcccagcaaatccaacagcttcagcagctccaacagctccagcaactccagcagcagcagcagcagcaacagtcccagagaatcatatccagttcgacgagaagccagagcctgcagtccagcacaattgtgggcgaggccactacaattacgagcggagctgcccaaatcctaagcgcctcggcggcggcttcgctggcccagcagctgaaggcccaaagctccacctcgattatcacaagcagcgagcagaggacgagcacaagcaccagtagcagcagcagcacccgttacatagccagcggctcgagcaacctggccggtggcaattcgaattcggccagctcggccagcagcaagactcgcttccagagtttccttcagcagccggagggtgcgcacggttttctgacggcccatcagaagcatgtgcgtcaatttgtgcgctccacatcggcacattcggaggcggcagccggagtggctggggcacgggcggagaagtgcatacgcagcgcttccacacagatcgatgatgccagtgtggccggtgtggtggagtcggctggtaacttgactgacagctccgccacgggaggatccatgcagctgtcgatgagcaaactgggcctgcagcagtcatcgtcctatattgatctccaagtcggccgaaacgatcgagatgaagagctcgtcggcgggcatgcgcacccagttgacattgagcggtggcttcttggcgccgccgggcaatcgaaaaataaccattttgagtccaattcacgcaccgcccggtctgcatgatatgctcaagcgggcccaaggacgatcgccgctatcgcccaggatcagctttcccggcagcgattcggacctctttgggtgagtaactataattgaaagaatgttttatacctttaaatagttttactgcttcgtctttatgacgcccagtaagatgattgaatagaaagtaatttagcaaaaggaaaatacaatacaataaattgaattcctatgtacgtccgccagattatcctttgaattctgcgtaaagctttaaattcgcccattttgctgcctcgaattcagtgcgccaaaggacacctctcgctctaagtttccccttttgctaatgaacctgtttatatccttgcccgtggactccggtactctgatggcacattgaacccgctgctaattgttgacttgctgttgcaaattgttggaagttggtggcagggggggggggcgtggctgtggaggggcggccagtgcctttcatcagaacgaaagcgttgtcaaaatgccaaaattgtttgtcatagtcgtataattaaatttaaatgtttttttattttccgcatactctctgtctttgcctttgcctgtctctctttctggcagcgacagcag

SEQ ID NO: 4985 - DNA, 1077 bp, DROSOPHILA
atgtcccaggagagtaatggtggcccagcagcaggaggcggagcagcagcagcaccaccaccaccaccacaatacataataaccacacccagcgaggtggatcccgacgaagtgcgctccatggccgacctagagctgggatcccccgaaaagcaggtgcaggtacagagtcaaaagttctccagcacgtcgagcaccaccaaggtggccacccactcattttcgatgagcagtagtgccggcactactgggcagcaaagcaaacaggacagcgcccagcaaatccaacagcttcagcagctccaacagctccagcaactccagcagcagcagcagcagcaacagtcccagagaatcatatccagttcgacgagaagccagagcctgcagtccagcacaattgtgggcgaggccactacaattacgagcggagctgcccaaatcctaagcgcctcggcggcggcttcgctggcccagcagctgaaggcccaaagctccacctcgattatcacaagcagcgagcagaggacgagcacaagcaccagtagcagcagcagcacccgttacatagccagcggctcgagcaacctggccggtggcaattcgaattcggccagctcggccagcagcaagactcgcttccagagtttccttcagcagccggagggtgcgcacggttttctgacggcccatcagaagcatgtgcgtcaatttgtgcgctccacatcggcacattcggaggcggcagccggagtggctggggcacgggcggagaagtgcatacgcagcgcttccacacagatcgatgatgccagtgtggccggtgtggtggagtcggctggtaacttgactgacagctccgccacgggaggatccatgcagctgtcgatgagcaaactgggcctgcagcagtcatcgtcctatattgatctccaagtcggccgaaacgatcgagatgaagagctcgtcggcgggcatgcgcacccagttgacattgagcggtggcttcttggcgccgccgggcaatcgaaaaataaccattttgagtccaattcacgcaccgcccggtctgcatga

SEQ ID NO: 4986 - protein, 358 aa, DROSOPHILA
MSQESNGGPAAGGGAAAAPPPPPQYIITTPSEVDPDEVRSMADLELGSPEKQVQVQSQKFSSTSSTTKVATHSFSMSSSAGTTGQQSKQDSAQQIQQLQQLQQLQQLQQQQQQQQSQRIISSSTRSQSLQSSTIVGEATTITSGAAQILSASAAASLAQQLKAQSSTSIITSSEQRTSTSTSSSSSTRYIASGSSNLAGGNSNSASSASSKTRFQSFLQQPEGAHGFLTAHQKHVRQFVRSTSAHSEAAAGVAGARAEKCIRSASTQIDDASVAGVVESAGNLTDSSATGGSMQLSMSKLGLQQSSSYIDLQVGRNDRDEELVGGHAHPVDIERWLLGAAGQSKNNHFESNSRTARSA

SEQ ID NO: 4987 - DNA, 4749 bp, DROSOPHILA
gcctgcaagtgaggatagtcaggtatttgtaagactaggcttagaaacattttttttaggatcttatttaacgaaactcattcattgctgtagcctatggaaaatacacacacacacacacacacattgaataacatactaaacatatagctatttaaatatacgaaaagcatgatgatatacataattaaattagtggacttcttacagcaataaccaaagcatttcgcgtttgtagcgttgtttaagctaaacgaaattacatttacccaatgcatgcctatctatatataacgacatatttataaaaaaaaaaagcacactactatattatataaaatatatggttctatttaatgtggatgcagcagcagcaacaaactactgaacaaattaaactatgtacttagcgattatgaatgaatgtacttaaaactgtaaaagtgtacttaaaattgtaaactcagaaagacacacgcaacgagaatggattacaaattgaattctaataaaataacgatgaaagaacaaaataattggcgctgtttttattttccaaagaggtcgtgcccaagaagcacgtcaaatattccagatcctcaggagaaatcgcatctttaaaagcaacggaacttttaaatttggcggaaaacggtgtgcccagatgtaaagatcgaaaacataggcatttggccacactgcgatatagatttaaatcgatcgtcgacccgttctcaatttatttcttttaaaaacattacaaatttagtcaaatgctagatcaacataattttctatgtttaaagttaattggccggctacattaaattttaacattacgtatggactggacttaaacaattgtgatcgattaaaatatatagaaaaataacaaagcttggcagtggcaaaagcataataatgaaaaactaaaactggtgggtgccatggctgtgggtgttgatgtcggtaactggtgtcggtggctgtggggaaatccttattcgatcttctctagatgattaccacgctgcgatatatttccgctggccacgcgacttttgaggcgctgtttggataaatgggacttaggaatttatgagattttaaatatatgggcaaatcgggttggttgggttcattgtctgaccttgttgaaagcatcgcgcatcaaacgattggagcgacgtctctgctcctcctcctggcgactttgggcggccaacacttccggcaaatttttgcaccgtttggaggtaatcgccttcatttccctggtggtaaataatttaactcgagctgcaagttaagaaatgtagttattattcggacttcggattccatttgatatcttactattggctgctggaggcagctgctccagatgcctgttcagcgcctccatgctggtactctggctcaaaacattgtccagctcctggcgccgagcattgcgaatcatctgcatctcattaagtatggccttgcgctgcttggcattggcacagaattcgggacgagccagctgcagttgatcctgcagggagggaggtttctcaatcacctcactgctgcccgtcggcgtaaactggatgacataggatatagcacgtggacgcacttggcgttgcatacgctctgcattcatcctggtctccttgtgcccccttcgcacccgctgacatgccacatcatcgtactgacgagtggtggtctcacatctggtgatggacgagcctcctgctccaccagttgcagttgcttcattttgtgtctctgtgctcaccattgttgcttgcacatagctagctactccctgagggttgaccacctggtggtagatggcttcattcccaaccgcgccggatgcataggcacccgccgcctgggcgtactgcatctgcatatattgctctcgttcatcgtgctgatcctgtgcttcctgttgacgcctctgcgaaaaagaaagagatggagtatgaggaagtcgccctttctttgggcaatagccttaagtgatgtccttaccgggcaatgctgctgatgaacgtaagtccgctgaccacaatgttgctgcctctgtatcaaaatatctttttgctggttcagctgtttccgcagctggtaaagtttctgtttctggagcaatacaaactcttcaagctgctcgttctcataatgctcgcagaactgacgctgcctttgctggacaaaggagcagacactttcactgcgaccgccgccactggtagagctacctgagacaagtaaaggagtggccatctttttacggttctgcagattccgctggttaaggtgaggaggtggtggtggtggttgtgtcgggggcggtgctggcagtgtggaaggatcagaattggtcacattcactccaaccgattcaattctcactgggggcggcggtgttgttgttgtttccgaattttccatctctttgctctctgcttcagctgacatttcttgtcgcagaagatattccttgtccggtcgctccttctggtcgcccatacatcgcatggaacttggaatctgcgcagccgtcgcagattccgtgtttgctttcttctgcgacttgctgggcaaactgatactttccaaaagatttttaaattcctgcatgcgattaatctctgtcttgacccagtggagctgcctccttcgctccgaatccgtgccacctttcaaacgctcttcgaactctatttcactcagggtcatgggattcagccaatcctgcaaatccaaaggctcaatatctgcatccgttgaggcattgcgattcggtatatttgtcttctgggtgatcacctcgcctgagccactggttgagccactgtacgatacgctttcaggcagtggcgaagatgatccgatagctgctcgctttcgtggagcgggaactggtggagcaatacgttcagctttggatgagcttctcgcattggattggttcgtattggtgcccgcaacttgctgcagagaacctgtaggcactgtttaaagtatgaattactacaaatgccaccttgttgaagagtttactcacccttcaactgctccttgctgctgctgctcagggaacgcgaactagtgctggattcggtcagttccagacaggagatacgcctggctatatcacggacgagttttttcttctgtccctggctgaggctgcgagattttaccagagaacagaccaactcgattcctatatccaatacccctcgcggtctactaccggatccaacgtctaatgaagtggttgatgaggaggctgtgacgccggtggagggatttactacagggttctcgggctgctggttctccttgctcacatgccgcctattgccccgaattttctcgaactgagccgccgtgtactgtcgctcttgctcgcgcaccttttcgcgctttgtagcttttctttggtccctcgtgagttgctgaattccttgctgttccctttccagttgatgatccttttcatggcgctgtttagctttcctttggtctctcatgagtggctgaatttcttgctgctccctttccggatgatgaatgtccgtctgacaagagctaactttggaatcctgtctcctggatttacattggcacttctttgtgtgtttgtgtgacttatggacagactctagtgtctgggtttttttgttttgcatctggggcgacttgataggtctgcgaatgtcccccgcggattgggacatggtttgggtaactgctacggaacgaaaactggggctactggccaatacaataggaattatagtgtattcattcggtttcgtctgagttacttccgatttcggtgatgtgaactgactgatgttgtgcttactgggtggtggtgaaactgacagttcccggagctgttcctttgcttccccccgttcgtcaggtgaacgatgatcgctgctcttcgtgcgacgcctgtggcctgattctggtcgcgcttcatgttccatggaggcacatcctggcggctggactgatcccagggcacaactttgggtgctgccactggctccactgcttgccgtcgacgaaagggccatgaatcgatccaattcccggtccgtggccattgcgctgatataataatccccgggtggtggatgaacgcgggttaacttcgccggtctgttatctcgggaaccaaacttcttaaacattcggactgtttcttggctctaattgtcgaaaaagtttatttccctgctatattccaattcgccagagactagtttgatgtgacgcaaaaatcattcgaaaacgcagcacaagtttgttgaccaatgttgccacgcccactctaacgcccacaaacagcacgtgtgtttatatttttctcaaatttttattagtcttgtaaatttctatagatttgctaatcaactttttgccacgcccactctaatggcctaaagccgaacaatttttaaactttttctcattttattccccaatatctatcgatatcctagaaaaattatgaaatttcgcgttcgcattcacaccagctggagtaacaggtatctgatagtcggggaactcgactatagcagtctctctctcctattaatttgttcaaaatgccattacattttcctaaagtacatattgagatgataatcaataaaatatcaataaaaatataatatataatatatatcgatcgtcaacccgtgctcaattatttctttaaaaaca

SEQ ID NO: 4988 - DNA, 2990 bp, DROSOPHILA
aatatagcagggaaataaactttttcgacaattagagccaagaaacagtccgaatgtttaagaagtttggttcccgagataacagaccggcgaagttaacccgcgttcatccaccacccggggattattatatcagcgcaatggccacggaccgggaattggatcgattcatggccctttcgtcgacggcaagcagtggagccagtggcagcacccaaagttgtgccctgggatcagtccagccgccaggatgtgcctccatggaacatgaagcgcgaccagaatcaggccacaggcgtcgcacgaagagcagcgatcatcgttcacctgacgaacggggggaagcaaaggaacagctccgggaactgtcagtttcaccaccacccagtaagcacaacatcagtcagttcacatcaccgaaatcggaagtaactcagacgaaaccgaatgaatacactataattcctattgtattggccagtagccccagttttcgttccgtagcagttacccaaaccatgtcccaatccgcgggggacattcgcagacctatcaagtcgccccagatgcaaaacaaaaaaacccagacactagagtctgtccataagtcacacaaacacacaaagaagtgccaatgtaaatccaggagacaggattccaaagttagctcttgtcagacggacattcatcatccggaaagggagcagcaagaaattcagccactcatgagagaccaaaggaaagctaaacagcgccatgaaaaggatcatcaactggaaagggaacagcaaggaattcagcaactcacgagggaccaaagaaaagctacaaagcgcgaaaaggtgcgcgagcaagagcgacagtacacggcggctcagttcgagaaaattcggggcaataggcggcatgtgagcaaggagaaccagcagcccgagaaccctgtagtaaatccctccaccggcgtcacagcctcctcatcaaccacttcattagacgttggatccggtagtagaccgcgaggggtattggatataggaatcgagttggtctgttctctggtaaaatctcgcagcctcagccagggacagaagaaaaaactcgtccgtgatatagccaggcgtatctcctgtctggaactgaccgaatccagcactagttcgcgttccctgagcagcagcagcaaggagcagttgaagggttctctgcagcaagttgcgggcaccaatacgaaccaatccaatgcgagaagctcatccaaagctgaacgtattgctccaccagttcccgctccacgaaagcgagcagctatcggatcatcttcgccactgcctgaaagcgtatcgtacagtggctcaaccagtggctcaggcgaggtgatcacccagaagacaaatataccgaatcgcaatgcctcaacggatgcagatattgagcctttggatttgcaggattggctgaatcccatgaccctgagtgaaatagagttcgaagagcgtttgaaaggtggcacggattcggagcgaaggaggcagctccactgggtcaagacagagattaatcgcatgcaggaatttaaaaatcttttggaaagtatcagtttgcccagcaagtcgcagaagaaagcaaacacggaatctgcgacggctgcgcagattccaagttccatgcgatgtatgggcgaccagaaggagcgaccggacaaggaatatcttctgcgacaagaaatgtcagctgaagcagagagcaaagagatggaaaattcggaaacaacaacaacaccgccgcccccagtgagaattgaatcggttggagtgaatgtgaccaattctgatccttccacactgccagcaccgcccccgacacaaccaccaccaccacctcctcaccttaaccagcggaatctgcagaaccgtaaaaagatggccactcctttacttgtctcaggtagctctaccagtggcggcggtcgcagtgaaagtgtctgctcctttgtccagcaaaggcagcgtcagttctgcgagcattatgagaacgagcagcttgaagagtttgtattgctccagaaacagaaactttaccagctgcggaaacagctgaaccagcaaaaagatattttgatacagaggcagcaacattgtggtcagcggacttacgttcatcagcagcattgcccgaggcgtcaacaggaagcacaggatcagcacgatgaacgagagcaatatatgcagatgcagtacgcccaggcggcgggtgcctatgcatccggcgcggttgggaatgaagccatctaccaccaggtggtcaaccctcagggagtagctagctatgtgcaagcaacaatggtgagcacagagacacaaaatgaagcaactgcaactggtggagcaggaggctcgtccatcaccagatgtgagaccaccactcgtcagtacgatgatgtggcatgtcagcgggtgcgaagggggcacaaggagaccaggatgaatgcagagcgtatgcaacgccaagtgcgtccacgtgctatatcctatgtcatccagtttacgccgacgggcagcagtgaggtgattgagaaacctccctccctgcaggatcaactgcagctggctcgtcccgaattctgtgccaatgccaagcagcgcaaggccatacttaatgagatgcagatgattcgcaatgctcggcgccaggagctggacaatgttttgagccagagtaccagcatggaggcgctgaacaggcatctggagcagctgcctccagcagccaatactcgagttaaattatttaccaccagggaaatgaaggcgattacctccaaacggtgcaaaaatttgccggaagtgttggccgcccaaagtcgccaggaggaggagcagagacgtcgctccaatcgtttgatgcgcgatgctttcaacaagcgcctcaaaagtcgcgtggccagcggaaatatatcgcagcgtggtaatcatctagagaagatcgaataa

SEQ ID NO: 4989 - protein, 949 aa, DROSOPHILA
MATDRELDRFMALSSTASSGASGSTQSCALGSVQPPGCASMEHEARPESGHRRRTKSSDHRSPDERGEAKEQLRELSVSPPPSKHNISQFTSPKSEVTQTKPNEYTIIPIVLASSPSFRSVAVTQTMSQSAGDIRRPIKSPQMQNKKTQTLESVHKSHKHTKKCQCKSRRQDSKVSSCQTDIHHPEREQQEIQPLMRDQRKAKQRHEKDHQLEREQQGIQQLTRDQRKATKREKVREQERQYTAAQFEKIRGNRRHVSKENQQPENPVVNPSTGVTASSSTTSLDVGSGSRPRGVLDIGIELVCSLVKSRSLSQGQKKKLVRDIARRISCLELTESSTSSRSLSSSSKEQLKGSLQQVAGTNTNQSNARSSSKAERIAPPVPAPRKRAAIGSSSPLPESVSYSGSTSGSGEVITQKTNIPNRNASTDADIEPLDLQDWLNPMTLSEIEFEERLKGGTDSERRRQLHWVKTEINRMQEFKNLLESISLPSKSQKKANTESATAAQIPSSMRCMGDQKERPDKEYLLRQEMSAEAESKEMENSETTTTPPPPVRIESVGVNVTNSDPSTLPAPPPTQPPPPPPHLNQRNLQNRKKMATPLLVSGSSTSGGGRSESVCSFVQQRQRQFCEHYENEQLEEFVLLQKQKLYQLRKQLNQQKDILIQRQQHCGQRTYVHQQHCPRRQQEAQDQHDEREQYMQMQYAQAAGAYASGAVGNEAIYHQVVNPQGVASYVQATMVSTETQNEATATGGAGGSSITRCETTTRQYDDVACQRVRRGHKETRMNAERMQRQVRPRAISYVIQFTPTGSSEVIEKPPSLQDQLQLARPEFCANAKQRKAILNEMQMIRNARRQELDNVLSQSTSMEALNRHLEQLPPAANTRVKLFTTREMKAITSKRCKNLPEVLAAQSRQEEEQRRRSNRLMRDAFNKRLKSRVASGNISQRGNHLEKIE

SEQ ID NO: 4990 - DNA, 3296 bp, DROSOPHILA
ttatgaatttatttactaacgttgtgttgtcatcacatcagctcatcactagctcactcgctcatctctaatcgaacagctgattgctgcgaaccggaacaaatggaaattgtatcgtgaggcaagtggagtttcccctttacttttggcaaataataaataaacaaaggaacaagcctaaacattttcaattaaaccatatacagaactaacgcacacatgtgacggaggcaatacacaaacacggcacctttgaatctcgccttaaaattggcgaaaccaacacggaattatataaccgccggctgaaaacacatgagtccgtacagcggatccgtgcgtcgtctgctggacagttggccaggaaagaagcgcttcggtgtctaccgcttcctgccgctcttctttttactgggcgccggcctggaattctccatgatcaattggacagtgggcgagaccaatttctgtgagactgctacgcttaaaaccttacttttatttactaatacggaatcttttccatgcagaccgcacttttaagcgccgccaggcgaagaactacgtggaagagcagcagcatctgcaggcgcgagccgcgaataacaccaactaagcaaaatgcccgccggagtttcctggggccagtacctgaaattcctcggctgtgccctggcatccatgatggccggatcgcaggctgttcacctttactataagcctctggaggacttgcgcgtctacatcgaacaggagcaacacagcacacaggtggatcccaccgcaaagccaccggaatctgcataacactgtgtactagacaagttattggtgactaaagctatttaagtgaatgcctgctgtttgttgaggaaagggttgttggcatagcaccttcatgtcctacgaagagcgttacctgttccagaacattcaaaagacgccacgtttccacttaatcagtctattttaaaatcttttccactaaggctagctaagactacttctcgtgcaccttccggtggtttttaagacacgtctgctgccggaaggcctgtccacaggtgtcgcaaatgtagggcttctcacccgtgtgtatgtactcatggtgccgcagggttttcctagaagcaaagctctccggacagtggtgacagggaaagggtttcagctttaagtggactgctctcacatgggcttcgagctcgaatcgcctggcaaatcttctgccgcagtgctcgcagggcaacttgtcgttcgagtgcatcagcatgtgctgcagcagcatgaacttcttggccatccggcgtccacagacctggcattcgtggggcaactcttcctgcacctcgtgctgctgcaaagtgtggtacttgagggtgtatcgtgaatggaactccttttgacaaatgtcgcagaaatggcgctctccggcgccgccctccctggcggccacctcgtcctccgtgggatgctttgtcttaaggtggtatttaagattcgccgactggttaaagctggctccgcactgctcgcagatgaatttcttcaaagcatcgcggtcacgcggactgtgcttcagccttttgtgcttctgcatggctatgcggctggtgtagattctctcgcagcctggctggtcgcagggatggcgtcgctccttgggggcatgcacctctcgaatgtgggtatacagaccgcccatgaaactgtaggccttctcgcactgatcgcattggaagggccttttgctgccctcgtgcaccttacggatgtgcgctgctagggtgatctggtgggcaaagctgcgccggcacacagaacacttcagggtgttccttgatcccctgaaggactttcggggggatttatcactttttatagccggctcatcgatgggatctgggtcgggagcgggttctggtggttccagaccatgcagagactcttggtcctcctccctgccatcgtagactacttcgaaagtgggttcccgtgggtctttcttcagcatttccagcagctgcttcctgcactcgtcggctttcctgcggaacttttcgaaattctgcacggcgctgcggcattccaggcacagttcgttgggcagccactgctggtcggcgtcctggttctccacatcctgcgatagatttatgttgagcagctgctgcagctcctggctgattggaatctcatctgattggagctctgtcttcaagggttccttctccaattggagcaggcatgtgcaacagagttctcgtacggattcccgggtaagatttaaaggcattttgtggttctttgaaaaaattcaattcaaaacgctttttgttaggcgttccaacagcttgttgtggctttgtgaaagaagaagaacatcaactacagtgctctcttcaaaaagcaaacaataactgtttgacaactctgatttaatataagtagacgaatttgtgaaaacggtgtcctaaagaaatttgagttattaaagccaaattaaaagcggaatttatatatatactaagtgatacagaaatcagcactatgcaaattccactgtatttcatttgtatttcagacaagacgtcgtctggtcacactgagccagaggtggacctgaatcaagcctcccaagaaaacatattttattctatttgcagttcgtcctctggaatctggcgcaatggtgttctacttcaagagcaatgtggtccagccgccggcgatgctatacatgggtcgcgacaagcacgaaaacgaggagctcatcagatggggctggccggaggacgtgtggttccatgtccacgacctgtcctcggcccacgtgtatttgcggctacggaagggccagacaatcgacgacatacccaccgatgtgctggtggacgccgctcagttgtgcaaggcgaacagcattcagggcaacaaggtgaacaacctggaggtggtgtacaccatgtgggagaatctgaagaagaccccggacatggagcccggccaggtggcctaccacaacgagaaggcggtgcgtcgcattcgcctggagaagcgcatcaatgagattgtcaatcgcctgaacaggaccaaaacggaggaggagcatcccgattttcggggattgcgcgaggcgcgggatgccgctgagcggcaagatcagaagaagatccagcgcgagcgtcgcgagcaggagaaggaggctgccaagcagcgtgagctggaggcggagctgcgcagctatgcgtccctccagaaatcggagaacatgcgcaccaactacgatgccggca

SEQ ID NO: 4991 - DNA, 1296 bp, DROSOPHILA
atgcctttaaatcttacccgggaatccgtacgagaactctgttgcacatgcctgctccaattggagaaggaacccttgaagacagagctccaatcagatgagattccaatcagccaggagctgcagcagctgctcaacataaatctatcgcaggatgtggagaaccaggacgccgaccagcagtggctgcccaacgaactgtgcctggaatgccgcagcgccgtgcagaatttcgaaaagttccgcaggaaagccgacgagtgcaggaagcagctgctggaaatgctgaagaaagacccacgggaacccactttcgaagtagtctacgatggcagggaggaggaccaagagtctctgcatggtctggaaccaccagaacccgctcccgacccagatcccatcgatgagccggctataaaaagtgataaatccccccgaaagtccttcaggggatcaaggaacaccctgaagtgttctgtgtgccggcgcagctttgcccaccagatcaccctagcagcgcacatccgtaaggtgcacgagggcagcaaaaggcccttccaatgcgatcagtgcgagaaggcctacagtttcatgggcggtctgtatacccacattcgagaggtgcatgcccccaaggagcgacgccatccctgcgaccagccaggctgcgagagaatctacaccagccgcatagccatgcagaagcacaaaaggctgaagcacagtccgcgtgaccgcgatgctttgaagaaattcatctgcgagcagtgcggagccagctttaaccagtcggcgaatcttaaataccaccttaagacaaagcatcccacggaggacgaggtggccgccagggagggcggcgccggagagcgccatttctgcgacatttgtcaaaaggagttccattcacgatacaccctcaagtaccacactttgcagcagcacgaggtgcaggaagagttgccccacgaatgccaggtctgtggacgccggatggccaagaagttcatgctgctgcagcacatgctgatgcactcgaacgacaagttgccctgcgagcactgcggcagaagatttgccaggcgattcgagctcgaagcccatgtgagagcagtccacttaaagctgaaaccctttccctgtcaccactgtccggagagctttgcttctaggaaaaccctgcggcaccatgagtacatacacacgggtgagaagccctacatttgcgacacctgtggacaggccttccggcagcagacgtgtcttaaaaaccaccggaaggtgcacgagaagtag

SEQ ID NO: 4992 - protein, 431 aa, DROSOPHILA
MPLNLTRESVRELCCTCLLQLEKEPLKTELQSDEIPISQELQQLLNINLSQDVENQDADQQWLPNELCLECRSAVQNFEKFRRKADECRKQLLEMLKKDPREPTFEVVYDGREEDQESLHGLEPPEPAPDPDPIDEPAIKSDKSPRKSFRGSRNTLKCSVCRRSFAHQITLAAHIRKVHEGSKRPFQCDQCEKAYSFMGGLYTHIREVHAPKERRHPCDQPGCERIYTSRIAMQKHKRLKHSPRDRDALKKFICEQCGASFNQSANLKYHLKTKHPTEDEVAAREGGAGERHFCDICQKEFHSRYTLKYHTLQQHEVQEELPHECQVCGRRMAKKFMLLQHMLMHSNDKLPCEHCGRRFARRFELEAHVRAVHLKLKPFPCHHCPESFASRKTLRHHEYIHTGEKPYICDTCGQAFRQQTCLKNHRKVHEK

SEQ ID NO: 4993 - DNA, 7454 bp, DROSOPHILA
ttcaaaatgaactgattgcgtcgttagtataaaataattcatagaatagtatttagaagaaacctaatcctctgaaaacatttattttaagtattcctttagcttaatattatttaaatgtagtgagcatatgaagaccaagtctgaggttatatgcgcctacggctatctacttaagtattatttttagtacctacatcatgccttgctcatgttagttaaacacaaaagcatacggtgcattaatatcaatgaattaaataatatcaacaaacataaacagtaattagttaacagagtattcatatgacttttgattagctagttctttttatggttatcattcgtgccgaacatcaacaattgcttgggtttgattaaaatgttctctttacacagaagataatatcatcaacggtaataaaacttgcagttcgcagttcaacaacaatctttggctatatatgtatatacgattataccgatataaatataattatcataggctttgtgtggattatgtgatttatgatatacacaagtgttgagtatatatttccagttctttccctatcttgtgttgcagtttcgatttcggagcttgtaaatagaaattcgcgtaagcgagaccctaatagtatatactatatatgctttatagatcgattaggccagtttgggtctatgtgggctaatggtattggtagtggttatcggtattgctgtgtatgcatatgtagtttctctgttaggtacatagtttcattgtgttagtgtggcatgtggaatccccttattcgctgacaaattcgttactctttagttatatatttatatacttctgaaaggtccacggatccctccatcgatggaactcaacaaatagagagaaaaaggggggaaaactttaacggcacaccgagaacaaacaataaacgtcaaacgatttccgactacaactaaaagctatgatatatatcagtgacctatggcgaacccattactgctgctggtatccctgcggatcgtaggacggcatttgtccttgcgtgtagccatactgcccaggattggtaacatccccgtaggtcggtggggcatcctcctccgcaatgggcggagcaccactggccatggcgaagggattgttggccacgtgtcctgtggcgccgtagctaatggcagtcgactgctgcatttggctctgctcagtgtactcgggggcaccctattcacaaaaaaaaacacacaaacacgctttgtaggtagtggctcgattgatagaaatattaatatataattcgtaataactttaaaacttacgaatgaggtttccttcatgtagtcgcccaacatgcccgcctggctaggatccgtgttggtaatggcacctggtggtggagcccacaccttttgctcctcggccggaggttccgcccacggctgcagctctccagatgcgaaaataccatagaaagtgcagccaaccaaatgaacacaggcggccagggtgaagactgtagtccaacacccggtaggctacaataccaaatgaataccttagctacagaaactaccttacactaaaaaaccccaacttacattagcttggatgaggccatcaagggcatagggcacaatgatgccggccagagtaccaattccattcgaaagacccatcaatatactagcataacgaggagcaatatccaggtgattgacattataaccggatatggcaaagccactgaaggccacgccgcaggtcaaggcaaacatggcacccgtctggaaaaaacaacttatagtattgagtataaaggaatttgtttataacttaccgccgttgaggaatgtgccacgaataggaaaaacagaccctccatgccaaagccgccgcaattgaagagcttgcgcacattggtggtggacaggataccattctttcgcaggtgatccgccaacatgccgccaaatggaactatcgtagtcatgatcaagtggggcagcgagcccacgaagcccgcctcctccaccttaaaaccgaacttgtgcttgaggaacgaggactggaacagcaccaggaggtagaagttccaggagcggcagaagttggccacaatgatggcgtagaccggcatcgagcgcatcatttcccgccacggagtcgtcttcagggatggcatcgtgggatgagccgactccccgagcgatttctcgatgtacttcaactcgggtatgctgatggccggatgtttgcgcgggttctcgaagcacaaccatatccagaacatgtaccatatgattccgaacaccccgtaggcgtagaacggcgcctggtagcccacggcatcggccagaagtccggagagcggaagtccaaccaccacgcccgcataggaaccggaaaaggccagcgtcgccagtcgggagcgctccatgggcggcgcccagaaacgccagataccatggcaagctggataggtaacgccctaaaagagattatgtttaaataaatggattatttaaataagtcaattaggatattgtcctatattccaatgcacttagtctcatgcagttatagtatcttaagaaaatgtgctttgtgaaattaaaaatatatatctaaaatatagttacttccgaactcgaatagacaaacatcctttttacaaagtatcattctctcccttccgattcgaagaaaaatgacatacttcccagtccttggcacaaagaaatcgcattaaaataaatgcttttgttattttttcctgccctcccaggacccccatccctttgagggcttaggacatgtttccatttcacatatttgctttatcataaagcaaaatctaaccctccccattttcgcaacatcacgcagccgtaatccccggctttgatctgtggcaaaatcgaattgggcaagttgttaggttggttgggctacatacctcgaagagtccttgcaggaccctcacgcaaatcaccacatgaccgtgcatcagggtcatggcgaatggcacgaagagatgcagcgtggcggagctcacgatggacagtccgaatatcttgttggccgggaacttggaggcgatgaagccgccgggaatctgcgtcaccagatagccccagaagaaggacgagtccacatggctctccacggcgaccgtccagttcatgaacacagtctgcaaaaatccggaaacacattttacgggatgagtgacagaagctcagcaatcattaaaaactgctccaggcatttattaacgagcgtcaagcaggattcagaatttcaaattggtttctatgatgggtctgtgtgggtgcgtgtccttttgtgtatgtatgacttttgagccacatccacccacacccacacacacactccctaattgacagcagcttctcgtcaaatgaagcgaattttatgaataactcactcctctctcgaatttatgaatgctcattcgctgccgaaaatttaatcaatttaatatgcaagtaatttaaggaacaactttaaaatcgactcttcatccgtgtagagcttaaagaacttaagctgaatataaagcgagttcttggtgttgagcggattgtaagtagattattacactgtgagtactcaccccattgtgctcccctttgagcttggccgccgacatattgcacctcatgccgaaggcgatcatgaatcccacgcaggccatggtggcgatggtgtagcgggccggcatgcaaggacactccgccttgcagtacttgtcgatcttgcggagcggcgggcgctcgatctcctcgaaggaggcgggcgagtcgggccggtcgtcatcgtcgtcgtaggcgtggccgccgcctggtccgcggccctcccggtcgcccccctccatttcctcgtagccaccgtggccaccatgatagctctgcgatatctcaaacttctccatattgggcttcaggctgtggaagaaaaacaaaaaagatttttattattcattcagttaaatcaatcctgtcgtgtagtgtcttccaaacattttctcctggggcataattcatgccaattagagcggatagctggccaaatcaacaggtcaacgagagggcgtgaaaacacaaatattttcggcttgttagcagcaacagctaccacccccttccgatttcacccaccggaggtggttgatgttttcccaagggtcccagtggaattgcggtgactgaggggaggaatcgctggcagaactttcgtcctgggagttgaataaaattcaattttattaagtgccgatagctgggctacgggtatttaaagttgattggagcaggtaggaattcgcaatcgcatttcccgatttgatttcccagtttaaacacagttaaaagaccttgtcaccgaccagattgatggatgtgtgttagctgatatctgctgataactggggtgacctggccacctaaccaccccgagcaagccattaacccaagataagtgacacatcaactgagatatggcccctctcactctccacggatttggaatttttcttcataaatatccagacaaagtccccataagtacgcaatacaaactaataagcagccaccagccaaaaacaagccactacagtggatataactttgccgtcgtcgtcgaagtcgccgcctgtcacataactcaactgtctgccgccaaagctaccctcgtctggtcacgcaggacctcctgaataagagcgaaaaaaaggagctgagggaacgacttgcgtccttcgagcaacttgcgccttgaccgactttaaggctgacgccaatttgatgcccttcgcaaaaagggactgcgttatgcccatcattaggtctgttataggacaaaagaggattcgattaccattttgaggtaatatattaagatcttggcattgaaaaatcagtcacataaatatgaatgataacagggttttaaaggtttttaaatagaaatagctagttacttttcaatgattgactatttatttttttttttttatatattcattttagaacatatcagcgtcgcattttttagacaccaaattttttgaagatgagccaaactatccttggcgctcaagttccgcattgattgtcagtaaaaatgttgcagactttttgtcgccgcccagattaaggataactggcgccacaagcagaaggcttttgtacaattcgcctttgactttaacgtggccacaaaacgcgaccattagagatgtaaatggggcacattctcagatatatatgtatatgtagagctgtatggagtgtattagtttgtttgccctgacaactgtgatgaagatgctctggcactgagggggagtgggagaatgggggcttgtcagcgacacgaccgcgtcttcaatggcaattctaatttcattttcactagcaaggataaaggaactccttgagcactcccccaacgaggcatttcaatttcttcgcgccgagtgccactcgagcgcttcagcgccaggtcctgttggcaatggatacggatacggaaacggaaacggctcgcagctcgtaaaaatcaatttcatttgccttaagcgctgcagcagccttcgtcggtatgcaacaaattccgtaatgaaagcgatgtgccacctattgttccaatttctaatttagcactcaaggtccttgagaaatcagacgaggtgtgcccatcaaattgcataccacgaccacacacattcatcgagtgtttgcccaatatgtcccagtggcacgactttattgcgtttcgtccgcaatcgaaggtgccggagttgaagttcccggacacgtgctgccaacgtgcccggaattcctgacgcaccggtgagctcgtccgcatgccactgcgttcgttgtcaccagtgaaaagtgccaagtcccaagtccttagaatccctataaaccccctctaatgacttgttaagcatgccaataattttacaactttccggggggggcgcgacacgtgccgaagtttcgcgacgccggctagtcgccagtgcgtatcaatatcggtacatatttactgcattatcctggcatggtcaagttcagccaaccacgagcaccgaccatccttgcgttaaattaaactctctcccttttgttctccgcaggtccatttgattgcaatcatatttcatttcgggcatattgccacccatcatcgctgtacacttgccaacaaaatgaggatatattttaaatatacatatagatctgctttctatgcttaaatatatcctcttgctggtaaaaaaaaaaaacctttataaatctgaatattctttaagacccaaaccctgctgtctggtgttactagagtatatcatatcacatcgactcacccgccaaacacgcccgttgccttctccttaaacgccgtcagacccttcatcttgctgctcagctagtagtcctgattttcccagacgcctgtcctcactccgcccctgcctccggatcaacgagtcctgctcctgctgctgtcctttcgcccaagtcagcgtctgttgtgcttcgttgcctttgcgccgttatcacttgggcgcataaatatattttgttgcctacttcacggcggattgccgtgtatataagcgtagcgaatcggcggcggttaatttccgtgaagccagcacaaatttgatgactctattttcgggttggctcgttctctcagcgggggattttcacttggtcgccatatgatttcgattctcgtggagtttgtgcattttcatttacagtgcctgcaaaagagatttgtatgcggctattaatgggtccggcaatttgtgttctgctgctgataagcaaaagtctcgtacaatttcatcattttgcacatttcttgtaagccgcttatgttcataaattcacgagaatttcgaaatgattgtgatgaggggtaactactgagccggcagagcattttgtaaatatttctggcattgtgagcggttttgatagcgttttatgcttcatttggtgtgagcatgaaatttgacacctcttttgatttgggtaatctctttcgaaagagttagcaatgttacgattattggaattattagaattacaatttataataagaaaacaaattcaatggaaataatcataggttttaagtttgtgcattttttatactagcttatttcttgttagatcaggaatttcgaaactaaatgtaaagtatatatgtacgcattctttggcgtttttcacaaaattctttagatgattccattggaagctcctcccccaaaacagttgtacttttgacctttggccacaacgcctacttacatgccacaccagagttacgtaatccatttcgtagttggtgcaagattatataatcggcctctagtcgtaacttaagcacagatattttt

SEQ ID NO: 4994 - DNA, 1683 bp, DROSOPHILA
atgaagggtctgacggcgtttaaggagaaggcaacgggcgtgtttggcggcctgaagcccaatatggagaagtttgagatatcgcagagctatcatggtggccacggtggctacgaggaaatggaggggggcgaccgggagggccgcggaccaggcggcggccacgcctacgacgacgatgacgaccggcccgactcgcccgcctccttcgaggagatcgagcgcccgccgctccgcaagatcgacaagtactgcaaggcggagtgtccttgcatgccggcccgctacaccatcgccaccatggcctgcgtgggattcatgatcgccttcggcatgaggtgcaatatgtcggcggccaagctcaaaggggagcacaatgggactgtgttcatgaactggacggtcgccgtggagagccatgtggactcgtccttcttctggggctatctggtgacgcagattcccggcggcttcatcgcctccaagttcccggccaacaagatattcggactgtccatcgtgagctccgccacgctgcatctcttcgtgccattcgccatgaccctgatgcacggtcatgtggtgatttgcgtgagggtcctgcaaggactcttcgagggcgttacctatccagcttgccatggtatctggcgtttctgggcgccgcccatggagcgctcccgactggcgacgctggccttttccggttcctatgcgggcgtggtggttggacttccgctctccggacttctggccgatgccgtgggctaccaggcgccgttctacgcctacggggtgttcggaatcatatggtacatgttctggatatggttgtgcttcgagaacccgcgcaaacatccggccatcagcatacccgagttgaagtacatcgagaaatcgctcggggagtcggctcatcccacgatgccatccctgaagacgactccgtggcgggaaatgatgcgctcgatgccggtctacgccatcattgtggccaacttctgccgctcctggaacttctacctcctggtgctgttccagtcctcgttcctcaagcacaagttcggttttaaggtggaggaggcgggcttcgtgggctcgctgccccacttgatcatgactacgatagttccatttggcggcatgttggcggatcacctgcgaaagaatggtatcctgtccaccaccaatgtgcgcaagctcttcaattgcggcggctttggcatggagggtctgtttttcctattcgtggcacattcctcaacggcgacgggtgccatgtttgccttgacctgcggcgtggccttcagtggctttgccatatccggttataatgtcaatcacctggatattgctcctcgttatgctagtatattgatgggtctttcgaatggaattggtactctggccggcatcattgtgccctatgcccttgatggcctcatccaagctaatggtgcccccgagtacactgagcagagccaaatgcagcagtcgactgccattagctacggcgccacaggacacgtggccaacaatcccttcgccatggccagtggtgctccgcccattgcggaggaggatgccccaccgacctacggggatgttaccaatcctgggcagtatggctacacgcaaggacaaatgccgtcctacgatccgcagggataccagcagcagtaa

SEQ ID NO: 4995 - protein, 560 aa, DROSOPHILA
MKGLTAFKEKATGVFGGLKPNMEKFEISQSYHGGHGGYEEMEGGDREGRGPGGGHAYDDDDDRPDSPASFEEIERPPLRKIDKYCKAECPCMPARYTIATMACVGFMIAFGMRCNMSAAKLKGEHNGTVFMNWTVAVESHVDSSFFWGYLVTQIPGGFIASKFPANKIFGLSIVSSATLHLFVPFAMTLMHGHVVICVRVLQGLFEGVTYPACHGIWRFWAPPMERSRLATLAFSGSYAGVVVGLPLSGLLADAVGYQAPFYAYGVFGIIWYMFWIWLCFENPRKHPAISIPELKYIEKSLGESAHPTMPSLKTTPWREMMRSMPVYAIIVANFCRSWNFYLLVLFQSSFLKHKFGFKVEEAGFVGSLPHLIMTTIVPFGGMLADHLRKNGILSTTNVRKLFNCGGFGMEGLFFLFVAHSSTATGAMFALTCGVAFSGFAISGYNVNHLDIAPRYASILMGLSNGIGTLAGIIVPYALDGLIQANGAPEYTEQSQMQQSTAISYGATGHVANNPFAMASGAPPIAEEDAPPTYGDVTNPGQYGYTQGQMPSYDPQGYQQQ

SEQ ID NO: 4996 - DNA, 3819 bp, DROSOPHILA
gggccctggattttggagcatgccgccatgctgtgtggcgaattgtgctgccccccatcccccgcctcctctcccctttcattctgttcttaaggaacttgcttggctcttaacgactgtttcccacgcttgaaaaatgactcgcgaactggactcgaaatctgagttattttctcaacccgtttggggtccgagccccaaacattttgtgcccgttcaagagctggctctctctgtgtgtgtgtgtgtgtgtgtataacatgtctagccatggtcgacgtcgcctttcggtggcgcttgttggctaccgttgcacgccgcgcccaaaagcctagaagctgttgctgcttgcggctgccatgggtcaaggggggcggtccaaggcatgcatcgggggcgtggcagggcaaaccggttaccggtctcggccagaggcaaaaatgcagctaagcttgtagaaggagataacgaggcaacacagtgaaacctcgtgtgcttgttaattgcattaaaaaaaaactgattctaatagggatttaacgaaaaactcattgaagagtcaaatagaaattgaatttgggtttcttcttaacaaaatgcgtggggtatagtgtaatgtcacaactcgataatttgatcagtctttcacttttcagcactcttgcctagaaatgtacgttagcgagtctctacttcttcgcattgttcacacacattgataaacaagatgtatacacactattcgtatgctaaatgcgttggcctggctgcaaaatcaagttttgcattttcatttgaatttattggtttcctcgctggctgttgccaggcgcactgcgatcgagtggagtgacttgacttggagtgcagtgcagtcgacggtgccattgccatgcgatgccatgccaagccacgccactcgaagacttgcaacttcattcccaatcaattctcgcattcttactcttcgaatatggcgacggcgtccaagaacaacgacaaggcgactacacttgaagttaatattttatgggtagagatatagatacataaatgagatacacagggagagagacgagggctagaacatcaaatgaaaaaaaaaaaaacaagcggaatacacttaacgttagctattaattaaagctggaattggaatccggatgatgattttgtctacatccgcacctggaacttgcccgccttggtcaggtatttgacgcccttgaaaggcttgtacttctcgccgtacatgtccaggcgatttacctttagcccagagacggccagctgcgagatttggaactggacattcacggatggattggcatcgatgttggtcgtaccgggcgtaatggaaacctaggcgtgcaaggacagtatattattaatgggataaaaatataaataatttaagacgttagatacatgaatcgtgtaaaagtgtaaagggtctcaatagttattcttaccgatcccctaatatttggcaacttggaaacatcgatccgtcccacatcccaggacagcgtcttggtcaccgaatcgaaggtatactttccctgattcggcgtcaataggcaattaagcacacaccgcggcatggtcagctccagcttcaccttgtcaacggtgcgaccaagggtgttcctcgggccaatcgtgaggtccagacgcccctgctcacccgttttgatcgaaaagttgtgcctgatgtagatgggtatggccaccacggactgagagctaatgtgatatgacatcaggcggaagtttccgtcgggcgggataaaggagagcaggcgctccgcctcccagcgcttgtagcgcacgcaaggatggaaggaaacgtcgtcgaagaggcgaggattcatgaaagataacgtcagatctggcatgccggataacttaatgcagcagtcgatctgataaaaaaataaaagagatagaaattatttttatagacttaagtgaaacttacgtgtccctggatctcggcaaagaccgtggatccggatttatcaatgatagcgtccacctcctcgatgacatcgaagtacgcctcgttgttggtgtacctcacgccgcttctgcgccagcgaaccgccgacagctgacccgagggcaaagtagtgcttacacttcggaaatcggattattaattggattattaaggtaaatgaaagacaaagacggagggagcatcattcaacttacttgctcttgcccgtcaccgtgttggcaatggtgcgcaggatattgggcggcttgatcagctccttgaggatgttgctctcggtggccagtgggaagccattatcgagcatctcgtccagcagctcgtaaacgaccacatagttgtccttgatcacggactcggagcagtcgccgaaatagtcctggaaggtgtccaccacgcgatgcaggaactcgatgacaaagagcggcggcacctcctgcttgcaggcggcgaccaaagacaccgtgtccctttgcactgtaatcaggtagtagtggggcgtggctatcaccggcggcacatcctgcaacaaagagatatggtcagcatacaacccatacgtggcacgggcgactcacatatggagcagcgcgctgggcgtcaaggaagtattcgcacacagatctcgagacaaccgagcgccaatgcttttccaggaagacctcgctgaaatgcggatatatgggtatatgggtattacatcgtcttcacatttcacttataggtatggcttacccgccgctgtttacaataaacagactgtgtatcataattcgacctaaattgcttgctagtttaagctatgtttttttttcagggatgaatcattagcgatgacagcgtgaaggtgttctactaccatgctcccgaagcgcttcagtaactgttaaataatttcattaaattgaaattaagataggctgaaataaacgaacatttatttaaggggccttatacatagttaacttatgaatttatttactaacgttgtgttgtcatcacatcagctcatcactagctcactcgctcatctctaatcgaacagctgattgctgcgaaccggaacaaatggaaattgtatcgtgaggcaagtggagtttcccctttacttttggcaaataataaataaacaaaggaacaagcctaaacattttcaattaaaccatatacagaactaacgcacacatgtgacggaggcaatacacaaacacggcacctttgaatctcgccttaaaattggcgaaaccaacacggaattatataaccgccggctgaaaacacatgagtccgtacagcggatccgtgcgtcgtctgctggacagttggccaggaaagaagcgcttcggtgtctaccgcttcctgccgctcttctttttactgggcgccggcctggaattctccatgatcaattggacagtgggcgagaccaatttctgtgagactgctacgcttaaaaccttacttttatttactaatacggaatcttttccatgcagaccgcacttttaagcgccgccaggcgaagaactacgtggaagagcagcagcatctgcaggcgcgagccgcgaataacaccaactaagcaaaatgcccgccggagtttcctggggccagtacctgaaattcctcggctgtgccctggcatccatgatggccggatcgcaggctgttcacctttactataagcctctggaggacttgcgcgtctacatcgaacaggagcaacacagcacacaggtggatcccaccgcaaagccaccggaatctgcataacactgtgtactagacaagttattggt

SEQ ID NO: 4997 - DNA, 1453 bp, DROSOPHILA
ttaaactagcaagcaatttaggtcgaattatgatacacagtctgtttattgtaaacagcggcggcgaggtcttcctggaaaagcattggcgctcggttgtctcgagatctgtgtgcgaatacttccttgacgcccagcgcgctgctccatatgatgtgccgccggtgatagccacgccccactactacctgattacagtgcaaagggacacggtgtctttggtcgccgcctgcaagcaggaggtgccgccgctctttgtcatcgagttcctgcatcgcgtggtggacaccttccaggactatttcggcgactgctccgagtccgtgatcaaggacaactatgtggtcgtttacgagctgctggacgagatgctcgataatggcttcccactggccaccgagagcaacatcctcaaggagctgatcaagccgcccaatatcctgcgcaccattgccaacacggtgacgggcaagagcaatgtaagcactactttgccctcgggtcagctgtcggcggttcgctggcgcagaagcggcgtgaggtacaccaacaacgaggcgtacttcgatgtcatcgaggaggtggacgctatcattgataaatccggatccacggtctttgccgagatccagggacacatcgactgctgcattaagttatccggcatgccagatctgacgttatctttcatgaatcctcgcctcttcgacgacgtttccttccatccttgcgtgcgctacaagcgctgggaggcggagcgcctgctctcctttatcccgcccgacggaaacttccgcctgatgtcatatcacattagctctcagtccgtggtggccatacccatctacatcaggcacaacttttcgatcaaaacgggtgagcaggggcgtctggacctcacgattggcccgaggaacacccttggtcgcaccgttgacaaggtgaagctggagctgaccatgccgcggtgtgtgcttaattgcctattgacgccgaatcagggaaagtataccttcgattcggtgaccaagacgctgtcctgggatgtgggacggatcgatgtttccaagttgccaaatattaggggatcggtttccattacgcccggtacgaccaacatcgatgccaatccatccgtgaatgtccagttccaaatctcgcagctggccgtctctgggctaaaggtaaatcgcctggacatgtacggcgagaagtacaagcctttcaagggcgtcaaatacctgaccaaggcgggcaagttccaggtgcggatgtagacaaaatcatcatccggattccaattccagctttaattaatagctaacgttaagtgtattccgcttgtttttttttttttcatttgatgttctagccctcgtctctctccctgtgtatctcatttatgtatctatatctctacccataaaatattaacttcaagtgtagtcgcctt

SEQ ID NO: 4998 - protein, 415 aa, DROSOPHILA
MIHSLFIVNSGGEVFLEKHWRSVVSRSVCEYFLDAQRAAPYDVPPVIATPHYYLITVQRDTVSLVAACKQEVPPLFVIEFLHRVVDTFQDYFGDCSESVIKDNYVVVYELLDEMLDNGFPLATESNILKELIKPPNILRTIANTVTGKSNVSTTLPSGQLSAVRWRRSGVRYTNNEAYFDVIEEVDAIIDKSGSTVFAEIQGHIDCCIKLSGMPDLTLSFMNPRLFDDVSFHPCVRYKRWEAERLLSFIPPDGNFRLMSYHISSQSVVAIPIYIRHNFSIKTGEQGRLDLTIGPRNTLGRTVDKVKLELTMPRCVLNCLLTPNQGKYTFDSVTKTLSWDVGRIDVSKLPNIRGSVSITPGTTNIDANPSVNVQFQISQLAVSGLKVNRLDMYGEKYKPFKGVKYLTKAGKFQVRM

SEQ ID NO: 4999 - DNA, 3797 bp, DROSOPHILA
ctggtctggccccgcgctgctggtggtggcgagtggtgcgacggtggtggtgggtgacggcaaagtgggtgtgggatgtgcgtgcccagacaaagtaagagcgcttagagtctattatctatccggcaagtgctgacgcgttgcgatcgcccgtcgtcgatcgctaaatctgtgtactccgaaaaatctggtgcatcaaaatgtgctacgttattatcaccatcgccagtctggtgtggttcctctgttcgctggtggccgacatgctctttgctgtggccctggtcacgcccaggtggctggtgggccccgcccaaggaacagactccaccgccagctctcaccaccaatcctcggtgggcatctacacgcgctgcaaggtcatgcaggagggcggattccaatgcggccgcttcgacttggacggactggccacggacagtagcgtttaccccaacgaatggaaagcggcaatgttcttcgtcatgctgggatttagtctactctctgtaacggtgatcctgaccctgatcacctgctgccgccagtcggcctgtggcaagagcatacacaacatgacggcctgcgcccaggtcgtagcaggtaagcaaccattactgtgatatcctcgcagcatttaagtttgcattgtttataggaatatgtatgatgttgggtctatttctgcatccgatgggatggcgagcgaaccggattcaacgtctatgcggcatggatgccgaacccttttaccccgccgactgtagcataggtaattctttgaaacttttcttagaaacttactaaacttaatccttacaggagtttcattctactgcggaatcattggggtactcctaacatttactgccgccggtataagcctaaaggcagagtcttccaatatgcgaactcgagttcgcagacgcgtggaggcgggcagtaaactggtctgtattccgtagctgcctttgaatacaataagaacactatctgacttggagcgagcatacttaacttcattctcgaattaaatttatcattagcataaataaacttttaacattctacagtatagatacaaggtgtgggtggatatctatacgaccctacttgttgcgcttgcccttagctttgccaggaggcttgccctcaacattaggctttgccttaggtatgtagacaccatggttcgtcttctttaggtgggcaaacagcttgttcttggagtcaaagacaagcctacaggtaacacaagtgtgttgcgacttggtcgggtcgaggtcctcatctccgcttttgggagccactgttgcctcctttgtattcggttccgaaacagtttgctctaatagcttaaccttcctagtcgtcgtctttttgcttttactctttttgctcgcttttttgcctttactccagtcttcatcctctgactcgctcttgattgccttcttttctattggctcatctggttcgtcactgccttccgcctgcgcttgcttgacagctgacttccttgcctttttgttttttttggttcgtttggctagcgaagattcttcttcgcttggaaccccgtcgaaagatatctgatcctcagagacttgcaattcttccagcgattcctgtacgcccattaaactgtcttcatggggttcattgtggaaagcgtcctcttcttcctccatttcctgacacagccggtcgacattttcattatgcttcttgctttcttcgtgattagcacgcgccttggcgtttttaaatgtcttgttgcatgccacgcagtaaagatcgtctacatactccacttcgtactcctcggcttcctggccgccttcatggtcaaagtcctcgccatcgtcgtcgttctcgtcttcatccgtgtaatcttctgacttgctatcgtactgctgctctaactgctttagctgctcctcgtagccctcgttaaagacattatttttcctgacggctgccagttcttcctggcgcttccttaactgctctttgcgcttctcctcctgcttaagtcgattggcctcgacgcgttcctcaagcatgcgcctgtaggcctgcactctgggatccctttttcgcacaaagttgactaagttgcgaacctaagtaaatgaggtaagtaaaatgtgtctcggaagaaaaaaaagggaattcatcgcccacctcttcgttgcgttccttgcgggcagcctgaacgatctttttcatctccttctccaccttgcgtaggataaagcgctcttttatttcgcgaacatcgtagggacacagccagtcgtaggtcttccgggtactgtatgcctgccaaaaggcgtagaacggacccaccacatcttcgtaactactgtttgaatgaccaaagtcaggcgccatccccaaccggtcgtccttgtccatgaactctaagtcctccgaggcgatttggacgaagacatcggtgtacacgcggtaaaagccgtgctcattgtcgccatagcccttgtaacaggagctcgtgaagaactggaacacgtccaggcagttctccgcataatcggagttcttgccgcgcaagatctgctcgcgatggttgtcgtaccaagaccgttcctgaggatcagacagaacttcatacgcttgctggatcagctggaagcgctctttggcctccgccagtcggtcgggattcttgtccgggtgccagcgcagggccatcttacggtacgcactcttgatgtccccatcgttggcgtttctttggagctcgagctcctcgtaatagcaacgcatgtttcttagaacaacaaataattttgatagagttgccagatgggcggaaagacagctggcgctcacagatgcgttgtcagtgctgcaaagcgctggaaggggaacgtaaatatcttgcaaagtagcttacttttgggctgagagcgttttgcgtttattgtaatagctgaaaaaaacgttaggaaaacaatagaagcctattcttacaaggtcttgaaattacagttacccagttaagtggctaaactgcaagtggcatctcctagcagtcatacgtaactgcgcatcccgtcattagcttttttactttcgacggcgacggacgtttcttttcatccgtgtccgcgcatccttagttgactaaattctgccgcatgcttttctcactaccaccgaagctcacacatcgcatacctatacacaggcagagaaaaaaaataaaatcggaaaggttcctgtgaaaagcagcagttaaacacatcagaagttgtagtttttcccaggacgtaacggtgcttttttcccttagtttccgaagcatttatacataatttgcataaactaaataataatcgactggaatcgaagctcgactattgccaatcacccataacgatacaagcaaagtgccaaaatgtcgtttagcatttgagtctgcatacgaaaaggaaaatagcttgacataaaatttacagttacgtgggatttacaaccgtgggctgtaacacacagacaggccttcacatacacacacatacttacgtcgagtgagtgcgggagtggagtccttgaagcatctctgcttacgaacaacccccacaacattgggtgcgtcggtactcggcgcgaagtaatgaataacggccaaaaataaccgtcaacaaaaaacaaacaaacacaagtatagaaagccgacgaagtccgtgtgtgttctggtgtagatttaccattgccctttcatctcttgtgcgggtgtgtgtgtgggcgccaaaataaaagaaggc

SEQ ID NO: 5000 - DNA, 1736 bp, DROSOPHILA
aaacatgcgttgctattacgaggagctcgagctccaaagaaacgccaacgatggggacatcaagagtgcgtaccgtaagatggccctgcgctggcacccggacaagaatcccgaccgactggcggaggccaaagagcgcttccagctgatccagcaagcgtatgaagttctgtctgatcctcaggaacggtcttggtacgacaaccatcgcgagcagatcttgcgcggcaagaactccgattatgcggagaactgcctggacgtgttccagttcttcacgagctcctgttacaagggctatggcgacaatgagcacggcttttaccgcgtgtacaccgatgtcttcgtccaaatcgcctcggaggacttagagttcatggacaaggacgaccggttggggatggcgcctgactttggtcattcaaacagtagttacgaagatgtggtgggtccgttctacgccttttggcaggcatacagtacccggaagacctacgactggctgtgtccctacgatgttcgcgaaataaaagagcgctttatcctacgcaaggtggagaaggagatgaaaaagatcgttcaggctgcccgcaaggaacgcaacgaagaggttcgcaacttagtcaactttgtgcgaaaaagggatcccagagtgcaggcctacaggcgcatgcttgaggaacgcgtcgaggccaatcgacttaagcaggaggagaagcgcaaagagcagttaaggaagcgccaggaagaactggcagccgtcaggaaaaataatgtctttaacgagggctacgaggagcagctaaagcagttagagcagcagtacgatagcaagtcagaagattacacggatgaagacgagaacgacgacgatggcgaggactttgaccatgaaggcggccaggaagccgaggagtacgaagtggagtatgtagacgatctttactgcgtggcatgcaacaagacatttaaaaacgccaaggcgcgtgctaatcacgaagaaagcaagaagcataatgaaaatgtcgaccggctgtgtcaggaaatggaggaagaagaggacgctttccacaatgaaccccatgaagacagtttaatgggcgtacaggaatcgctggaagaattgcaagtctctgaggatcagatatctttcgacggggttccaagcgaagaagaatcttcgctagccaaacgaaccaaaaaaaacaaaaaggcaaggaagtcagctgtcaagcaagcgcaggcggaaggcagtgacgaaccagatgagccaatagaaaagaaggcaatcaagagcgagtcagaggatgaagactggagtaaaggcaaaaaagcgagcaaaaagagtaaaagcaaaaagacgacgactaggaaggttaagctattagagcaaactgtttcggaaccgaatacaaaggaggcaacagtggctcccaaaagcggagatgaggacctcgacccgaccaagtcgcaacacacttgtgttacctgtaggcttgtctttgactccaagaacaagctgtttgcccacctaaagaagacgaaccatggtgtctacatacctaaggcaaagcctaatgttgagggcaagcctcctggcaaagctaagggcaagcgcaacaagtagggtcgtatagatatccacccacaccttgtatctatactgtagaatgttaaaagtttatttatgctaatgataaatttaattcgagaatgaagttaagtatgctcgctcc

SEQ ID NO: 5001 - protein, 540 aa, DROSOPHILA
MRCYYEELELQRNANDGDIKSAYRKMALRWHPDKNPDRLAEAKERFQLIQQAYEVLSDPQERSWYDNHREQILRGKNSDYAENCLDVFQFFTSSCYKGYGDNEHGFYRVYTDVFVQIASEDLEFMDKDDRLGMAPDFGHSNSSYEDVVGPFYAFWQAYSTRKTYDWLCPYDVREIKERFILRKVEKEMKKIVQAARKERNEEVRNLVNFVRKRDPRVQAYRRMLEERVEANRLKQEEKRKEQLRKRQEELAAVRKNNVFNEGYEEQLKQLEQQYDSKSEDYTDEDENDDDGEDFDHEGGQEAEEYEVEYVDDLYCVACNKTFKNAKARANHEESKKHNENVDRLCQEMEEEEDAFHNEPHEDSLMGVQESLEELQVSEDQISFDGVPSEEESSLAKRTKKNKKARKSAVKQAQAEGSDEPDEPIEKKAIKSESEDEDWSKGKKASKKSKSKKTTTRKVKLLEQTVSEPNTKEATVAPKSGDEDLDPTKSQHTCVTCRLVFDSKNKLFAHLKKTNHGVYIPKAKPNVEGKPPGKAKGKRNK

SEQ ID NO: 5002 - DNA, 4180 bp, DROSOPHILA
ggataaagcgcaagtagtcgtgtgtgaatggtagcgtgggttccggacagatggccggcgtaaggaactcgtaggtggcatcagtagttccgccgtcgtcgcagtcgcccatggagtgccagtttcgcagggagctgagcccttggcccaccttccttcgtagtctggcaaacacgtttcgcttgtccttgtcccgccttctgcgcagagttcctgtgcccgtgcccccattgctgcagctggccatggaagagtccgctgcctcaaggacgcacacttcgttgttgttgttctgcgatccactggtggagacggcggcggatgcagtcacggccagcgccgagtcggacttcttgcgcctggtcagcgagtggaaccagcccttcttttccttctccctgtccctcggggagtcaccaccgccagtgagcgcctggctccgctggctgctctggttttgactctggtcgccgtggctcattttggagtggaatcggatcggatcggagcttcctcgtggtggaattacatcattgatctaattcggagccgtgatcaatgcctaactttattgataagaactatttgttttcgttgtacacaagaactgtcttatcgctatcggtcgtgcgtagctggtaaatgctatcgataacataggggagtttaaaaaattaaattctctgcaaggcaaagctttaatttatccattattacagccctctgctttaggcatttttaaaactaacttaaattatttcaagtaaaatctcgttgacttaaatatattgttttccatattgcaattttttaatattaatgtagtttgtcattcaaataagctttatttttataaatcgctacaaaaaatatgacattaatttgacagaaatttaaacacatcgatttaacgataacgaaatcgaacatacttccatctctagcacatttaaaatcattttaatcataagaaaactaagtcaaaaatgcaacactccagcatgaaggtggatctatcaaactttttcaaggacgaacgacgaaattcgttggttttcatcgatgcagcatggaacaacatcaaggacctccaggaccacatacaaaacctcttcagcttggcaagatttttaagaatctctaactgctaattctaaataaattgcattcaaacagaaggacattagtctgctcacctcagatggatgctatctgcccccgagggagtctatcaaagtgttgaactctgccgaaggactcaagtaggtgagcttatttctttttacgatctacttgagcatattcatcccttgcagagcctttcggtttgccagccacgatagtgatacctttgtgagccctgctcctgtaaaatccagtaaaaagcgcaagaatcgatccgtcgaggaacaggttcacctaaccgcctccactcccctccgaccttcaaagcgctccaagaaccagaacaactcagaatggataaatattgcagaaaacccatctcgtgtgagaaagaaggagttgctagatatggctcctggaccttctgtacaatcaaagctcttgacaaacaaaggcactccaaaggcccctgaaactcagacagaagtttctaacatgtcagcgaacatcgagacagagaacaaggaatctgctcctcagattaaaaataaatccaaaaacaagaaaccgaccaaatcgcccgaggcatctgaccaggtagagaatgaacctgctcctaagagtatttctcgatgcacgctcaaggagggtaaaatgtcagaaagcaagaatcaagagacatcgcctgacattctatcagaaaaatctggtgtggtaacgaaggaaaacgaaactcgagaggagcaacaggacaaaacacacttggagtccaacaaaattccggataaactatctcaactgaaagcaggggaccaaattgagaagagtcctggcattgctgctagcctcctatcgatttcgttccgctcccctctcttggagatgccctttaatgttccgcgcatatttcaatttcccactaaaaaacaacaaattgaaattctggaatataaaaaacttaagcccatcagtcctcgttttttgctgcagaaaggagctaagagtgatgatacggctaaacaattcccaagcaatgggaaggattcaaccttaaagcctaaatcctacgaaattttgcacgacgaagaattaccagatgtaaaggataaaaaaaatgtttcagaaggtataaagagagcagttgcacctctttgcgaagacatcattgaaacatcaaccactcttccgggggccataggagcagttgaatccgcttatctggacaattcgactgaagctgagaccactcttccgtccgaagctgaagcaactaatccacttgaacttactgagtcatttctacagaacaacacatctatggaaaaaacacccaaagtcgaaaaaattttgccagatgacggaagtgcatctccgattaaaaataacgttgattcgaaggatgttaaaacggtaacagtgcccatttttgaggaacaactagtatccgattccgacgacgatgtgatgttggtagacgactccaatatcgacgtttcatacggcgactctgatattgaaccgattccaggtgagatacgaggcatttaaatggtagatgtatgcttatgagtgcccttgacatcttagtagtagaaaataggcaatctttggatattataagggacctactgcggactgcaactccactcaatagcctgccgtccaggggcgatacggttatatttaaactgctgaagattaagggaaacgccaattctggcacaaccgaatttgtcgccgggaggtgcacttacgttaaccggcgcaccaaaattgtcacagtggaaacaataagtaagcgactatcaatttaaattgtatacccgaaactgatctcgttaaaatttttagcttatccccccgaaatcggtcgcatgttgcgtcaatattatatgagtgggttggacgagtcttctgaggatgtgcgaactttaagtattcatctcaaagatatgcttgaagccaaaatcattgtagccacaattgactgattatcatttttgtgtgtacattcttgagttctatttccagggtttcgtacatttatagcttttaaaatacaaacgattaaacaacatctatatgtacgaattcatgttagttgtctatcctctacttgatgtgctccttgatcttctccagcaagtcgtcggcttcgtcaccggtctttacgcgtagcaacagcgatgtggccttggagtcctctggcgtgggcacgcagaccatcagcacattgttcttgcccatgcgctggcaaggtatacccttgctaagaataaggttgaccaagatgttgcccagattggtgtcggcgcggactaacagttggatcttttcggagtccttgacaggtttcaagtacaacgtgcccacgccacgatcgccaaagtccttgtctttcttaatgaacaccttacaccgcttggagtatatagcgtcatcctccacaacctgtttggagtagaagttatattatctttcccttcgaaaagaaaattcttttatcatcacctgtttaaactcgacttttgggggcgtatcctcttctttttcctcctccgcaggcgctgccgctgcagctggcggatgaatgtttccgagagagaagggcgtggcactgttggtgaaggaaaagccctttgcgccgtctcctgctcctccaggcgcttttccgaaacccgcaaacaacgaggtgcttggcttgtcgtcgttgttacttttcagtccgaaggaaaagccattggtcttcggtgccgagaagttaggctcatcctttttagtggtcgtatcctttgctccaaagctaaaaatgctggacttaggggtatcatcggatttggcttctccagtgggttttgctgtcaaactgaagatactggaggaggacggcactggcgcagtgaacgatgccgtactgccgaaggagaccagtggtgttgcggtcgtggtggttgttccaccactggttatggtgcagttgggtttcttggctaagggcgatacgctggcgcctattggcgcgctgggcttgccaaacgtaaacgtagtagccgct

SEQ ID NO: 5003 - DNA, 2009 bp, DROSOPHILA
catgaaggtggatctatcaaactttttcaaggacgaacgacgaaattcgttggttttcatcgatgcagcatggaacaacatcaaggacctccaggaccacatacaaaacctcttcagcttgaaggacattagtctgctcacctcagatggatgctatctgcccccgagggagtctatcaaagtgttgaactctgccgaaggactcaagtaggtgagcttatttctttttacgatctacttgagcatattcatcccttgcagagcctttcggtttgccagccacgatagtgatacctttgtgagccctgctcctgtaaaatccagtaaaaagcgcaagaatcgatccgtcgaggaacaggttcacctaaccgcctccactcccctccgaccttcaaagcgctccaagaaccagaacaactcagaatggataaatattgcagaaaacccatctcgtgtgagaaagaaggagttgctagatatggctcctggaccttctgtacaatcaaagctcttgacaaacaaaggcactccaaaggcccctgaaactcagacagaagtttctaacatgtcagcgaacatcgagacagagaacaaggaatctgctcctcagattaaaaataaatccaaaaacaagaaaccgaccaaatcgcccgaggcatctgaccaggtagagaatgaacctgctcctaagagtatttctcgatgcacgctcaaggagggtaaaatgtcagaaagcaagaatcaagagacatcgcctgacattctatcagaaaaatctggtgtggtaacgaaggaaaacgaaactcgagaggagcaacaggacaaaacacacttggagtccaacaaaattccggataaactatctcaactgaaagcaggggaccaaattgagaagagtcctggcattgctgctagcctcctatcgatttcgttccgctcccctctcttggagatgccctttaatgttccgcgcatatttcaatttcccactaaaaaacaacaaattgaaattctggaatataaaaaacttaagcccatcagtcctcgttttttgctgcagaaaggagctaagagtgatgatacggctaaacaattcccaagcaatgggaaggattcaaccttaaagcctaaatcctacgaaattttgcacgacgaagaattaccagatgtaaaggataaaaaaaatgtttcagaaggtataaagagagcagttgcacctctttgcgaagacatcattgaaacatcaaccactcttccgggggccataggagcagttgaatccgcttatctggacaattcgactgaagctgagaccactcttccgtccgaagctgaagcaactaatccacttgaacttactgagtcatttctacagaacaacacatctatggaaaaaacacccaaagtcgaaaaaattttgccagatgacggaagtgcatctccgattaaaaataacgttgattcgaaggatgttaaaacggtaacagtgcccatttttgaggaacaactagtatccgattccgacgacgatgtgatgttggtagacgactccaatatcgacgtttcatacggcgactctgatattgaaccgattccagtagtagaaaataggcaatctttggatattataagggacctactgcggactgcaactccactcaatagcctgccgtccaggggcgatacggttatatttaaactgctgaagattaagggaaacgccaattctggcacaaccgaatttgtcgccgggaggtgcacttacgttaaccggcgcaccaaaattgtcacagtggaaacaataacttatccccccgaaatcggtcgcatgttgcgtcaatattatatgagtgggttggacgagtcttctgaggatgtgcgaactttaagtattcatctcaaagatatgcttgaagccaaaatcattgtagccacaattgactgattatcatttttgtgtgtacattcttgagttctatttccagggtttcgtacatttatagctttta

SEQ ID NO: 5004 - protein, 488 aa, DROSOPHILA
MAPGPSVQSKLLTNKGTPKAPETQTEVSNMSANIETENKESAPQIKNKSKNKKPTKSPEASDQVENEPAPKSISRCTLKEGKMSESKNQETSPDILSEKSGVVTKENETREEQQDKTHLESNKIPDKLSQLKAGDQIEKSPGIAASLLSISFRSPLLEMPFNVPRIFQFPTKKQQIEILEYKKLKPISPRFLLQKGAKSDDTAKQFPSNGKDSTLKPKSYEILHDEELPDVKDKKNVSEGIKRAVAPLCEDIIETSTTLPGAIGAVESAYLDNSTEAETTLPSEAEATNPLELTESFLQNNTSMEKTPKVEKILPDDGSASPIKNNVDSKDVKTVTVPIFEEQLVSDSDDDVMLVDDSNIDVSYGDSDIEPIPVVENRQSLDIIRDLLRTATPLNSLPSRGDTVIFKLLKIKGNANSGTTEFVAGRCTYVNRRTKIVTVETITYPPEIGRMLRQYYMSGLDESSEDVRTLSIHLKDMLEAKIIVATID

SEQ ID NO: 5005 - DNA, 2877 bp, DROSOPHILA
agcatgcagagttggcttttatttctttaacaaacaaataatggagagcttcattggtttttaaagctcagcatttccaaagcaacaatcatatgcaaaattattattcatctaaatttgttttttgagccggtactttgggaaagagccattagtaccatgtttaagtgttgcttccgactgacataaaagtcaagttcatcttcaaaccacgtatatggcttgttgttcgcgtgtatatatgcatatagcatagcatacaaaaagagtaagccgaacaatggtcggaattgtcaggcttttgattctgtctttcttgctcggtgcgcggtacggtaaagagaaaactgtgatcacatgagctatctttctccattacctgaaggtaagagtttccagtacaaagttattattaggactattattagtcctagatacaccaataaagtaataaatattaagcgaacacaagcaacaaatgccaagcaaaaccagtcaagattgtgttcgaattactgcgagctgcgttacaacagagctttcatgccttgcttcgattcaagatatagcttttgatctggcttcgaagtacaatacgaagcgtacaaagtggtattgttcagtggagcagactgtctgattgcttagcattggtagcgacagcgccacgagcacaatagcaaatgctgttggcaggtctagctctcttgcatggtcagtaaccattggcacgtgattggatttttatatctacctccaacgtacatatttatgttaatatatcattggattcgtcaatatagcagactgtagcaagtattcacatcagagcagaggtctagagggagatgcatacttgatgactttttggagcgtggtaactcaattgtaaataaagctaaatgcctacttgaagccttgacactatctcgcaaaaatcatatattgtgtcccttaggatccatttatttcatcgctataaatttgttttacctacttaatgtaccaaattcttgagctaagtaagaggccttttacaacgactgaggaaataacaccatcaaccaaaaaaagccattggtcatatgtactttaatgtcatattttgtatgattacgtgaaaagggaaaaagtaacatggactcttacacaaggaataacttgtatttttccacatcgtcaaaatacgtgaacaattgacattatattcctgcgtgattctcgtgattccaaaatgtgttcccaaaaaaccaaacactcatttaaatacaatcttttttctagcacccacagaggcacaaaacaaacgaacctcgcgcgtaaccagctcccgcagcttcgggaccaacatcaagaccgacacttccaatggccctagcttcgactgccctgaggagttcggatactatccgcacccatcggattgcacccaatactacgtgtgcgtctttggaggagcgctgcttgaaagttgcactggcggcttgatgtactcgcacgacctgcagacctgcgactggccgcgaaacgtcggctgcgagttggcggacacatcctccgagcgcaaccttgcacaaagccaggtccagaggcaaagagaaccccatgcacagcacgtgccaagccgagtacgttttggagccgctttcagcagtcagggtggcacacagaagacggccacagtgccgccacagtaccatcgttctccaccacaggtaatacaggcgcaggtgcagaatatacctcctcccccaccggagctgcgagtgtcaccaaacccggtaatcacgtcgcgtggtcaaccaaaaccgctgatcgactcccaggaggacattgcaaaggtaactcaaaagaacatgaattcgaagacaaactgaggatttattttgggggatcattctttcaattctccgaattcatataatataattgaaaaaaaaataatataagaactaagcaagtcgaggtttatatacccttgcagtgattaaattaaaaaacaaaaaaaaatcgatgtttgcgagggaatgtttaaaaaaaaatcaaaattagaacaatatcttttgaataattatatgattcaggtgtcaatcgatgcgctctttttacagacccataaccacaatttcaatatttcaaatattacgctttcgccgctttttctcgtaaactattaagtgttggtatgcattctcgttagtttttacgatacccttcgatttttgtattactccttaatatcgaacagcagatttttgtttcttcgtgtatatatagtacatagtagtcgacttcacacactttcctggtaggtacgtaagctttccatctagtgatttctaattttaaaattttcacacaaatgaacttttaaaaccgaaataaaatgtaaatattttatgtaatttagctgtatgctgatgcgcaggaatcattgccgcctgtggaagaagaggagtccgaccgtcagcagagagtgtatcgaggccaacccagtaccgttagtcaagttcaacgcgatcgcgatggtattattcaccaagctagtattaattctattcctcaaactggaaaaatcggatcttacgcttttggaaccgcctataggtaagctgttattcctgccacaagtagctcagatctcacaatcgttgctttctaatcgatgacactactttttgatgccagcaaaattccaagcaactcattatgttacatgctcttttctctcatacaacgcatactgcgctatctttttgcaccacccgacaccgacacatctacactccgacttaaacccggacaacctttacgcttttggaaaaaacactgtacacgaacagcgaaagcctgcaggacgaccatactcacgaactg

SEQ ID NO: 5006 - DNA, 615 bp, DROSOPHILA
atgtaccaaattcttgagctaacacccacagaggcacaaaacaaacgaacctcgcgcgtaaccagctcccgcagcttcgggaccaacatcaagaccgacacttccaatggccctagcttcgactgccctgaggagttcggatactatccgcacccatcggattgcacccaatactacgtgtgcgtctttggaggagcgctgcttgaaagttgcactggcggcttgatgtactcgcacgacctgcagacctgcgactggccgcgaaacgtcggctgcgagttggcggacacatcctccgagcgcaaccttgcacaaagccaggtccagaggcaaagagaaccccatgcacagcacgtgccaagccgagtacgttttggagccgctttcagcagtcagggtggcacacagaagacggccacagtgccgccacagtaccatcgttctccaccacaggtaatacaggcgcaggtgcagaatatacctcctcccccaccggagctgcgagtgtcaccaaacccggtaatcacgtcgcgtggtcaaccaaaaccgctgatcgactcccaggaggacattgcaaaggtaactcaaaagaacatgaattcgaagacaaactga

SEQ ID NO: 5007 - protein, 204 aa, DROSOPHILA
MYQILELTPTEAQNKRTSRVTSSRSFGTNIKTDTSNGPSFDCPEEFGYYPHPSDCTQYYVCVFGGALLESCTGGLMYSHDLQTCDWPRNVGCELADTSSERNLAQSQVQRQREPHAQHVPSRVRFGAAFSSQGGTQKTATVPPQYHRSPPQVIQAQVQNIPPPPPELRVSPNPVITSRGQPKPLIDSQEDIAKVTQKNMNSKTN
